United States Patent Application Publication US 2024/0398993 A1 - sequence listing, part 2

SEQ ID NO: 3252 - protein, 691 aa, Homo sapiens
MAAAAGDGGGEGGAGLGSAAGLGPGPGLRGQGPSAEAHEGAPDPMPAALHPEEVAARLQRMQRELSNRRKILVKNLPQDSNCQEVHDLLKDYDLKYCYVDRNKRTAFVTLLNGEQAQNAIQMFHQYSFRGKDLIVQLQPTDALLCITNVPISFTSEEFEELVRAYGNIERCFLVYSEVTGHSKGYGFVEYMKKDFAAKARLELLGRQLGASALFAQWMDVNLLASELIHSKCLCIDKLPSDYRDSEELLQIFSSVHKPVFCQLAQDEGSYVGGFAVVEYSTAEQAEEVQQAADGMTIKGSKVQVSFCAPGAPGRSTLAALIAAQRVMHSNQKGLLPEPNPVQIMKSLNNPAMLQVLLQPQLCGRAVKPAVLGTPHSLPHLMNPSISPAFLHLNKAHQSSVMGNTSNLFLQNLSHIPLAQQQLMKFENIHTNNKPGLLGEPPAVVLQTALGIGSVLPLKKELGHHHGEAHKTSSLIPTQTTITAGMGMLPFFPNQHIAGQAGPGHSNTQEKQPATVGMAEGNFSGSQPYLQSFPNLAAGSLLVGHHKQQQSQPKGTEISSGAASKNQTSLLGEPPKEIRLSKNPYLNLASVLPSVCLSSPASKTTLHKTGIASSILDAISQGSESQHALEKCIAYSPPFGDYAQVSSLRNEKRGSSYLISAPEGGSVECVDQHSQGTGAYYMETYLKKKRVY

SEQ ID NO: 3253 - protein, 678 aa, Homo sapiens
MAAAAGDGGGEGGAGLGSAAGLGPGPGLRGQGPSAEAHEGAPDPMPAALHPEEVAARLQRMQRELSNRRKILVKNLPQDSNCQEVHDLLKDYDLKYCYVDRNKRTAFVTLLNGEQAQNAIQMFHQYSFRGKDLIVQLQPTDALLCITNVPISFTSEEFEELVRAYGNIERCFLVYSEVTGHSKGYGFVEYMKKDFAAKARLELLGRQLGASALFAQWMDVNLLASELIHSKCLCIDKLPSDYRDSEELLQIFSSVHKPVFCQLAQDEGSYVGGFAVVEYSTAEQAEEVQQAADGMTIKGSKVQVSFCAPGAPGRSTLAALIAAQRVMHSNQKGLLPEPNPVQIMKSLNNPAMLQVLLQPQLCGRAVKPAVLGTPHSLPHLMNPSISPAFLHLNKAHQNLSHIPLAQQQLMKFENIHTNNKPGLLGEPPAVVLQTALGIGSVLPLKKELGHHHGEAHKTSSLIPTQTTITAGMGMLPFFPNQHIAGQAGPGHSNTQEKQPATVGMAEGNFSGSQPYLQSFPNLAAGSLLVGHHKQQQSQPKGTEISSGAASKNQTSLLGEPPKEIRLSKNPYLNLASVLPSVCLSSPASKTTLHKTGIASSILDAISQGSESQHALEKCIAYSPPFGDYAQVSSLRNEKRGSSYLISAPEGGSVECVDQHSQGTGAYYMETYLKKKRVY

SEQ ID NO: 3254 - protein, 333 aa, Homo sapiens
MVIAGASWMLGRAAASPTQTPPTTSTIRVARRSRVALVAMVIAAAGSGGPGRAEPQLSQPSLDCGRMRSSLTPLGPPVSRDRVIASFPKWYTPEACLQLREHFHGQVSAACQRRNTGTVGLKLSKVVVVGDLYVGKTSLIHRFCKNVFDRDYKATIGVDFEIERFEIAGIPYSLQIWDTAGQEKFKCIASAYYRGAQVIITAFDLTDVQTLEHTRQWLEDALRENEAGSCFIFLVGTKKDLLSGAACEQAEADAVHLAREMQAEYWSVSAKTGENVKAFFSRVAALAFEQSVLQDLERQSSARLQVGNGDLIQMEGSPPETQESKRPSSLGCC

SEQ ID NO: 3255 - protein, 311 aa, Homo sapiens
MVIAGASWMLGRAAASPTQTPPTTSTIRVARRSRVALVAMVIAAAGSGGPGRAEPQLSQPSLDCGRMRSSLTPLGPPVSRDRVIASFPKWYTPEACLQLREHFHGQVSAACQRRNTGTVGFCKNVFDRDYKATIGVDFEIERFEIAGIPYSLQIWDTAGQEKFKCIASAYYRGAQVIITAFDLTDVQTLEHTRQWLEDALRENEAGSCFIFLVGTKKDLLSGAACEQAEADAVHLAREMQAEYWSVSAKTGENVKAFFSRVAALAFEQSVLQDLERQSSARLQVGNGDLIQMEGSPPETQESKRPSSLGCC

SEQ ID NO: 3256 - protein, 212 aa, Homo sapiens
MAYAYLFKYIIIGDTGVGKSCLLLQFTDKRFQPVHDLTIGVEFGARMITIDGKQIKLQIWDTAGQESFRSITRSYYRGAAGALLVYDITRRDTFNHLTTWLEDARQHSNSNMVIMLIGNKSDLESRREVKKEEGEAFAREHGLIFMETSAKTASNVEEAFINTAKEIYEKIQEGVFDINNEANGIKIGPQHAATNATHAGNQGGQQAGGGCC

SEQ ID NO: 3257 - protein, 188 aa, Homo sapiens
MAYAYLFKYIIIGDTGVEFGARMITIDGKQIKLQIWDTAGQESFRSITRSYYRGAAGALLVYDITRRDTFNHLTTWLEDARQHSNSNMVIMLIGNKSDLESRREVKKEEGEAFAREHGLIFMETSAKTASNVEEAFINTAKEIYEKIQEGVFDINNEANGIKIGPQHAATNATHAGNQGGQQAGGGCC

SEQ ID NO: 3258 - protein, 557 aa, Homo sapiens
MPERDSEPFSNPLAPDGHDVDDPHSFHQSKLTNEDFRKLLMTPRAAPTSAPPSKSRHHEMPREYNEDEDPAARRRKKKSYYAKLRQQEIERERELAEKYRDRAKERRDGVNKDYEETELISTTANYRAVGPTAEADKSAAEKRRQLIQESKFLGGDMEHTHLVKGLDFALLQKVRAEIASKEKEEEELMEKPQKETKKDEDPENKIEFKTRLGRNVYRMLFKSKAYERNELFLPGRMAYVVDLDDEYADTDIPTTLIRSKADCPTMEAQTTLTTNDIVISKLTQILSYLRQGTRNKKLKKKDKGKLEEKKPPEADMNIFEDIGDYVPSTTKTPRDKERERYRERERDRERDRDRDRERERERDRERERERDREREEEKKRHSYFEKPKVDDEPMDVDKGPGSTKELIKSINEKFAGSAGWEGTESLKKPEDKKQLGDFFGMSNSYAECYPATMDDMAVDSDEEVDYSKMDQGNKKGPLGRWDFDTQEEYSEYMNNKEALPKAAFQYGIKMSEGRKTRRFKETNDKAELDRQWKKISAIIEKRKKMEADGVEVKRPKY

SEQ ID NO: 3259 - protein, 166 aa, Homo sapiens
MAQTSSYFMLISCLMFLSQSQGQEAQTELPQARISCPEGTNAYRSYCYYFNEDRETWVDADLYCQNMNSGNLVSVLTQAEGAFVASLIKESGTDDFNVWIGLHDPKKNRRWHWSSGSLVSYKSWGIGAPSSVNPGYCVSLTSSTGFQKWKDVPCEDKFSFVCKFKN

SEQ ID NO: 3260 - protein, 185 aa, Homo sapiens
MPRLFFFHLLGVCLLLNQFSRAVADSWMEEVIKLCGRELVRAQIAICGMSTWSKRSLSQEDAPQTPRPVAEIVPSFINKDTETINMMSEFVANLPQELKLTLSEMQPALPQLQQHVPVLKDSSLLFEEFKKLIRNRQSEAADSSPSELKYLGLDTHSRKKRQLYSALANKCCHVGCTKRSLARFC

SEQ ID NO: 3261 - protein, 117 aa, Homo sapiens
MPRLFFFHLLGVCLLLNQFSRAVADSWMEEVIKLCGRELVRAQIAICGMSTWSKRSLSQEDAPQTPRPVAGDFIQTVSLGISPDGGKALRTGSCFTREFLGALSKLCHPSSTKIQKP

SEQ ID NO: 3262 - protein, 3130 aa, Homo sapiens
MFSVRIVTADYYMASPLQGLDTCQSPLTQAPVKKVPVVRVFGATPAGQKTCLHLHGIFPYLYVPYDGYGQQPESYLSQMAFSIDRALNVALGNPSSTAQHVFKVSLVSGMPFYGYHEKERHFMKIYLYNPTMVKRICELLQSGAIMNKFYQPHEAHIPYLLQLFIDYNLYGMNLINLAAVKFRKARRKSNTLHATGSCKNHLSGNSLADTLFRWEQDEIPSSLILEGVEPQSTCELEVDAVAADILNRLDIEAQIGGNPGLQAIWEDEKQRRRNRNETSQMSQPESQDHRFVPATESEKKFQKRLQEILKQNDFSVTLSGSVDYSDGSQEFSAELTLHSEVLSPEMLQCTPANMVEVHKDKESSKGHTRHKVEEALINEEAILNLMENSQTFQPLTQRLSESPVFMDSSPDEALVHLLAGLESDGYRGERNRMPSPCRSFGNNKYPQNSDDEENEPQIEKEEMELSLVMSQRWDSNIEEHCAKKRSLCRNTHRSSTEDDDSSSGEEMEWSDNSLLLASLSIPQLDGTADENSDNPLNNENSRTHSSVIATSKLSVKPSIFHKDAATLEPSSSAKITFQCKHTSALSSHVLNKEDLIEDLSQTNKNTEKGLDNSVTSFTNESTYSMKYPGSLSSTVHSENSHKENSKKEILPVSSCESSIFDYEEDIPSVTRQVPSRKYTNIRKIEKDSPFIHMHRHPNENTLGKNSFNFSDLNHSKNKVSSEGNEKGNSTALSSLFPSSFTENCELLSCSGENRTMVHSLNSTADESGLNKLKIRYEEFQEHKTEKPSLSQQAAHYMFFPSVVLSNCLTRPQKLSPVTYKLQPGNKPSRLKLNKRKLAGHQETSTKSSETGSTKDNFIQNNPCNSNPEKDNALASDLTKTTRGAFENKTPTDGFIDCHFGDGTLETEQSFGLYGNKYTLRAKRKVNYETEDSESSFVTHNSKISLPHPMEIGESLDGTLKSRKRRKMSKKLPPVIIKYIIINRFRGRKNMLVKLGKIDSKEKQVILTEEKMELYKKLAPLKDFWPKVPDSPATKYPIYPLTPKKSHRRKSKHKSAKKKTGKQQRTNNENIKRTLSFRKKRSHAILSPPSPSYNAETEDCDLNYSDVMSKLGFLSERSTSPINSSPPRCWSPTDPRAEEIMAAAEKEAMLFKGPNVYKKTVNSRIGKTSRARAQIKKSKAKLANPSIVTKKRNKRNQTNKLVDDGKKKPRAKQKTNEKGTSRKHTTLKDEKIKSQSGAEVKFVLKHQNVSEFASSSGGSQLLFKQKDMPLMGSAVDHPLSASLPTGINAQQKLSGCFSSFLESKKSVDLQTFPSSRDDLHPSVVCNSIGPGVSKINVQRPHNQSAMFTLKESTLIQKNIFDLSNHLSQVAQNTQISSGMSSKIEDNANNIQRNYLSSIGKLSEYRNSLESKLDQAYTPNFLHCKDSQQQIVCIAEQSKHSETCSPGNTASEESQMPNNCFVTSLRSPIKQIAWEQKQRGFILDMSNFKPERVKPRSLSEAISQTKALSQCKNRNVSTPSAFGEGQSGLAVLKELLQKRQQKAQNANTTQDPLSNKHQPNKNISGSLEHNKANKRTRSVTSPRKPRTPRSTKQKEKIPKLLKVDSLNLQNSSQLDNSVSDDSPIFFSDPGFESCYSLEDSLSPEHNYNFDINTIGQTGFCSFYSGSQFVPADQNLPQKFLSDAVQDLFPGQAIEKNEFLSHDNQKCDEDKHHTTDSASWIRSGTLSPEIFEKSTIDSNENRRHNQWKNSFHPLTTRSNSIMDSFCVQQAEDCLSEKSRLNRSSVSKEVFLSLPQPNNSDWIQGHTRKEMGQSLDSANTSFTAILSSPDGELVDVACEDLELYVSRNNDMLTPTPDSSPRSTSSPSQSKNGSFTPRTANILKPLMSPPSREEIMATLLDHDLSETIYQEPFCSNPSDVPEKPREIGGRLLMVETRLANDLAEFEGDFSLEGLRLWKTAFSAMTQNPRPGSPLRSGQGVVNKGSSNSPKMVEDKKIVIMPCKCAPSRQLVQVWLQAKEEYERSKKLPKTKPTGVVKSAENFSSSVNPDDKPVVPPKMDVSPCILPTTAHTKEDVDNSQIALQAPTTGCSQTASESQMLPPVASASDPEKDEDDDDNYYISYSSPDSPVIPPWQQPISPDSKALNGDDRPSSPVEELPSLAFENFLKPIKDGIQKSPCSEPQEPLVISPINTRARTGKCESLCFHSTPIIQRKLLERLPEAPGLSPLSTEPKTQKLSNKKGSNTDTLRRVLLTQAKNQFAAVNTPQKETSQIDGPSLNNTYGFKVSIQNLQEAKALHEIQNLTLISVELHARTRRDLEPDPEFDPICALFYCISSDTPLPDTEKTELTGVIVIDKDKTVFSQDIRYQTPLLIRSGITGLEVTYAADEKALFHEIANIIKRYDPDILLGYEIQMHSWGYLLQRAAALSIDLCRMISRVPDDKIENRFAAERDEYGSYTMSEINIVGRITLNLWRIMRNEVALTNYTFENVSFHVLHQRFPLFTFRVLSDWFDNKTDLYRWKMVDHYVSRVRGNLQMLEQLDLIGKTSEMARLFGIQFLHVLTRGSQYRVESMMLRIAKPMNYIPVTPSVQQRSQMRAPQCVPLIMEPESRFYSNSVLVLDFQSLYPSIVIAYNYCFSTCLGHVENLGKYDEFKFGCTSLRVPPDLLYQVRHDITVSPNGVAFVKPSVRKGVLPRMLEEILKTRFMVKQSMKAYKQDRALSRMLDARQLGLKLIANVTFGYTSANFSGRMPCIEVGDSIVHKARETLERAIKLVNDTKKWGARVVYGDTDSMFVLLKGATKEQSFKIGQEIAEAVTATNPKPVKLKFEKVYLPCVLQTKKRYVGYMYETLDQKDPVFDAKGIETVRRDSCPAVSKILERSLKLLFETRDISLIKQYVQRQCMKLLEGKASIQDFIFAKEYRGSFSYKPGACVPALELTRKMLTYDRRSEPQVGERVPYVIIYGTPGVPLIQLVRRPVEVLQDPTLRLNATYYITKQILPPLARIFSLIGIDVFSWYHELPRIHKATSSSRSEPEGRKGTISQYFTTLHCPVCDDLTQHGICSKCRSQPQHVAVILNQEIRELERQQEQLVKICKNCTGCFDRHIPCVSLNCPVLFKLSRVNRELSKAPYLRQLLDQF

SEQ ID NO: 3263 - protein, 3052 aa, Homo sapiens
MAFSIDRALNVALGNPSSTAQHVFKVSLVSGMPFYGYHEKERHFMKIYLYNPTMVKRICELLQSGAIMNKFYQPHEAHIPYLLQLFIDYNLYGMNLINLAAVKFRKARRKSNTLHATGSCKNHLSGNSLADTLFRWEQDEIPSSLILEGVEPQSTCELEVDAVAADILNRLDIEAQIGGNPGLQAIWEDEKQRRRNRNETSQMSQPESQDHRFVPATESEKKFQKRLQEILKQNDFSVTLSGSVDYSDGSQEFSAELTLHSEVLSPEMLQCTPANMVEVHKDKESSKGHTRHKVEEALINEEAILNLMENSQTFQPLTQRLSESPVFMDSSPDEALVHLLAGLESDGYRGERNRMPSPCRSFGNNKYPQNSDDEENEPQIEKEEMELSLVMSQRWDSNIEEHCAKKRSLCRNTHRSSTEDDDSSSGEEMEWSDNSLLLASLSIPQLDGTADENSDNPLNNENSRTHSSVIATSKLSVKPSIFHKDAATLEPSSSAKITFQCKHTSALSSHVLNKEDLIEDLSQTNKNTEKGLDNSVTSFTNESTYSMKYPGSLSSTVHSENSHKENSKKEILPVSSCESSIFDYEEDIPSVTRQVPSRKYTNIRKIEKDSPFIHMHRHPNENTLGKNSFNFSDLNHSKNKVSSEGNEKGNSTALSSLFPSSFTENCELLSCSGENRTMVHSLNSTADESGLNKLKIRYEEFQEHKTEKPSLSQQAAHYMFFPSVVLSNCLTRPQKLSPVTYKLQPGNKPSRLKLNKRKLAGHQETSTKSSETGSTKDNFIQNNPCNSNPEKDNALASDLTKTTRGAFENKTPTDGFIDCHFGDGTLETEQSFGLYGNKYTLRAKRKVNYETEDSESSFVTHNSKISLPHPMEIGESLDGTLKSRKRRKMSKKLPPVIIKYIIINRFRGRKNMLVKLGKIDSKEKQVILTEEKMELYKKLAPLKDFWPKVPDSPATKYPIYPLTPKKSHRRKSKHKSAKKKTGKQQRTNNENIKRTLSFRKKRSHAILSPPSPSYNAETEDCDLNYSDVMSKLGFLSERSTSPINSSPPRCWSPTDPRAEEIMAAAEKEAMLFKGPNVYKKTVNSRIGKTSRARAQIKKSKAKLANPSIVTKKRNKRNQTNKLVDDGKKKPRAKQKTNEKGTSRKHTTLKDEKIKSQSGAEVKFVLKHQNVSEFASSSGGSQLLFKQKDMPLMGSAVDHPLSASLPTGINAQQKLSGCFSSFLESKKSVDLQTFPSSRDDLHPSVVCNSIGPGVSKINVQRPHNQSAMFTLKESTLIQKNIFDLSNHLSQVAQNTQISSGMSSKIEDNANNIQRNYLSSIGKLSEYRNSLESKLDQAYTPNFLHCKDSQQQIVCIAEQSKHSETCSPGNTASEESQMPNNCFVTSLRSPIKQIAWEQKQRGFILDMSNFKPERVKPRSLSEAISQTKALSQCKNRNVSTPSAFGEGQSGLAVLKELLQKRQQKAQNANTTQDPLSNKHQPNKNISGSLEHNKANKRTRSVTSPRKPRTPRSTKQKEKIPKLLKVDSLNLQNSSQLDNSVSDDSPIFFSDPGFESCYSLEDSLSPEHNYNFDINTIGQTGFCSFYSGSQFVPADQNLPQKFLSDAVQDLFPGQAIEKNEFLSHDNQKCDEDKHHTTDSASWIRSGTLSPEIFEKSTIDSNENRRHNQWKNSFHPLTTRSNSIMDSFCVQQAEDCLSEKSRLNRSSVSKEVFLSLPQPNNSDWIQGHTRKEMGQSLDSANTSFTAILSSPDGELVDVACEDLELYVSRNNDMLTPTPDSSPRSTSSPSQSKNGSFTPRTANILKPLMSPPSREEIMATLLDHDLSETIYQEPFCSNPSDVPEKPREIGGRLLMVETRLANDLAEFEGDFSLEGLRLWKTAFSAMTQNPRPGSPLRSGQGVVNKGSSNSPKMVEDKKIVIMPCKCAPSRQLVQVWLQAKEEYERSKKLPKTKPTGVVKSAENFSSSVNPDDKPVVPPKMDVSPCILPTTAHTKEDVDNSQIALQAPTTGCSQTASESQMLPPVASASDPEKDEDDDDNYYISYSSPDSPVIPPWQQPISPDSKALNGDDRPSSPVEELPSLAFENFLKPIKDGIQKSPCSEPQEPLVISPINTRARTGKCESLCFHSTPIIQRKLLERLPEAPGLSPLSTEPKTQKLSNKKGSNTDTLRRVLLTQAKNQFAAVNTPQKETSQIDGPSLNNTYGFKVSIQNLQEAKALHEIQNLTLISVELHARTRRDLEPDPEFDPICALFYCISSDTPLPDTEKTELTGVIVIDKDKTVFSQDIRYQTPLLIRSGITGLEVTYAADEKALFHEIANIIKRYDPDILLGYEIQMHSWGYLLQRAAALSIDLCRMISRVPDDKIENRFAAERDEYGSYTMSEINIVGRITLNLWRIMRNEVALTNYTFENVSFHVLHQRFPLFTFRVLSDWFDNKTDLYRWKMVDHYVSRVRGNLQMLEQLDLIGKTSEMARLFGIQFLHVLTRGSQYRVESMMLRIAKPMNYIPVTPSVQQRSQMRAPQCVPLIMEPESRFYSNSVLVLDFQSLYPSIVIAYNYCFSTCLGHVENLGKYDEFKFGCTSLRVPPDLLYQVRHDITVSPNGVAFVKPSVRKGVLPRMLEEILKTRFMVKQSMKAYKQDRALSRMLDARQLGLKLIANVTFGYTSANFSGRMPCIEVGDSIVHKARETLERAIKLVNDTKKWGARVVYGDTDSMFVLLKGATKEQSFKIGQEIAEAVTATNPKPVKLKFEKVYLPCVLQTKKRYVGYMYETLDQKDPVFDAKGIETVRRDSCPAVSKILERSLKLLFETRDISLIKQYVQRQCMKLLEGKASIQDFIFAKEYRGSFSYKPGACVPALELTRKMLTYDRRSEPQVGERVPYVIIYGTPGVPLIQLVRRPVEVLQDPTLRLNATYYITKQILPPLARIFSLIGIDVFSWYHELPRIHKATSSSRSEPEGRKGTISQYFTTLHCPVCDDLTQHGICSKCRSQPQHVAVILNQEIRELERQQEQLVKICKNCTGCFDRHIPCVSLNCPVLFKLSRVNRELSKAPYLRQLLDQF

SEQ ID NO: 3264 - protein, 472 aa, Homo sapiens
MAQGSGDQRAVGVADPEESSPNMIVYCKIEDIITKMQDDKTGGVPIRTVKSFLSKIPSVVTGTDIVQWLMKNLSIEDPVEAIHLGSLIAAQGYIFPISDHVLTMKDDGTFYRFQAPYFWPSNCWEPENTDYAIYLCKRTMQNKARLELADYEAENLARLQRAFARKWEFIFMQAEAQVKIDRKKDKTERKILDSQERAFWDVHRPVPGCVNTTEMDIRKCRRLKNPQKVKKSVYGVTEESQAQSPVHVLSQPIRKTTKEDIRKQITFLNAQIDRHCLKMSKVAESLIAYTEQYVEYDPLITPAEPSNPWISDDVALWDIEMSKEPSQQRVKRWGFSFDEILKDQVGRDQFLRFLESEFSSENLRFWLAVQDLKKQPLQDVAKRVEEIWQEFLAPGAPSAINLDSHSYEITSQNVKDGGRYTFEDAQEHIYKLMKSDSYARFLRSNAYQDLLLAKKKGKSLAGKRLTGLMQSS

SEQ ID NO: 3265 - protein, 485 aa, Homo sapiens
MAQGSGDQRAVGVADPEESSPNMIVYCKIEDIITKMQDDKTGGVPIRTVKSFLSKIPSVVTGTDIVQWLMKNLSIEDPVEAIHLGSLIAAQGYIFPISDHVLTMKDDGTFYRFQAPYFWPSNCWEPENTDYAIYLCKRTMQNKARLELADYEAENLARLQRAFARKWEFIFMQAEAQVKIDRKKDKTERKILDSQERAFWDVHRPVPGCVNTTEMDIRKCRRLKNPQKVKKSVYGVTEESQAQSPVHVLSQPIRKTTKEDIRKQITFLNAQIDRHCLKMSKVAESLIAYTEQYVEYDPLITPAEPSNPWISDDVALWDIEMSKEPSQQRVKRWGFSFDEILKDQVGRDQFLRFLESEFSSENLRFWLAVQDLKKQPLQDVAKRVEEIWQEFLAPGAPSAINLDSHSYEITSQNVKDGGRYTFEDAQEHIYKLMKSDSYARFLRSNAYQDLLLAKKKPESEQGRRTSLEKFTRSVLYSNTPLAKRP

SEQ ID NO: 3266 - protein, 490 aa, Homo sapiens
MAQGSGDQRAVGVADPEESSPNMIVYCKIEDIITKMQDDKTGGVPIRTVKSFLSKIPSVVTGTDIVQWLMKNLSIEDPVEAIHLGSLIAAQGYIFPISDHVLTMKDDGTFYRFQAPYFWPSNCWEPENTDYAIYLCKRTMQNKARLELADYEAENLARLQRAFARKWEFIFMQAEAQVKIDRKKDKTERKILDSQERAFWDVHRPVPGCVNTTEMDIRKCRRLKNPQKVKKSVYGVTEESQAQSPVHVLSQPIRKTTKEDIRKQITFLNAQIDRHCLKMSKVAESLIAYTEQYVEYDPLITPAEPSNPWISDDVALWDIEMSKEPSQQRVKRWGFSFDEILKDQVGRDQFLRFLESEFSSENLRFWLAVQDLKKQPLQDVAKRVEEIWQEFLAPGAPSAINLDSHSYEITSQNVKDGGRYTFEDAQEHIYKLMKSDSYARFLRSNAYQDLLLAKKKPESEQGRRTSLEKFTRSVGKSLAGKRLTGLMQSS

SEQ ID NO: 3267 - protein, 465 aa, Homo sapiens
MAQGSGDQRAVGVADPEESSPNMIVYCKIEDIITKMQDDKTGGVPIRTVKSFLSKIPSVVTGTDIVQWLMKNLSIEDPVEAIHLGSLIAAQGYIFPISDHVLTMKDDGTFYRFQAPYFWPSNCWEPENTDYAIYLCKRTMQNKARLELADYEAENLARLQRAFARKWEFIFMQAEAQVKIDRKKDKTERKILDSQERAFWDVHRPVPGCVNTTEMDIRKCRRLKNPQKVKKSVYGVTEESQAQSPVHVLSQPIRKTTKEDIRKQITFLNAQIDRHCLKMSKVAESLIAYTEQYVEYDPLITPAEPSNPWISDDVALWDIEMSKEPSQQRVKRWGFSFDEILKDQVGRDQFLRFLESEFSSENLRFWLAVQDLKKQPLQDVAKRVEEIWQEFLAPGAPSAINLDSHSYEITSQNVKDGGRYTFEDAQEHIYKLMKSDSYARFLRSNAYQDLLLAKKKKVSKVVELP

SEQ ID NO: 3268 - protein, 428 aa, Homo sapiens
MAQGSGDQRAVGVADPEESSPNMIVYCKIEDIITKMQDDKTGGVPIRTVKSFLSKIPSVVTGTDIVQWLMKNLSIEDPVEAIHLGSLIAAQGYIFPISDHVLTMKDDGTFYRFQAPYFWPSNCWEPENTDYAIYLCKRTMQNKARLELADYEAENLARLQRAFARKWEFIFMQAEAQVKIDRKKDKTERKILDSQERAFWDVHRPVPGCVNTTEMDIRKCRRLKNPQKVKKSVYGVTEESQAQSPVHVLSQPIRKTTKEDIRKQITFLNAQIDRHCLKMSKVAESKEPSQQRVKRWGFSFDEILKDQVGRDQFLRFLESEFSSENLRFWLAVQDLKKQPLQDVAKRVEEIWQEFLAPGAPSAINLDSHSYEITSQNVKDGGRYTFEDAQEHIYKLMKSDSYARFLRSNAYQDLLLAKKKKVSKVVELP

SEQ ID NO: 3269 - protein, 435 aa, Homo sapiens
MAQGSGDQRAVGVADPEESSPNMIVYCKIEDIITKMQDDKTGGVPIRTVKSFLSKIPSVVTGTDIVQWLMKNLSIEDPVEAIHLGSLIAAQGYIFPISDHVLTMKDDGTFYRFQAPYFWPSNCWEPENTDYAIYLCKRTMQNKARLELADYEAENLARLQRAFARKWEFIFMQAEAQVKIDRKKDKTERKILDSQERAFWDVHRPVPGCVNTTEMDIRKCRRLKNPQKVKKSVYGVTEESQAQSPVHVLSQPIRKTTKEDIRKQITFLNAQIDRHCLKMSKVAESKEPSQQRVKRWGFSFDEILKDQVGRDQFLRFLESEFSSENLRFWLAVQDLKKQPLQDVAKRVEEIWQEFLAPGAPSAINLDSHSYEITSQNVKDGGRYTFEDAQEHIYKLMKSDSYARFLRSNAYQDLLLAKKKGKSLAGKRLTGLMQSS

SEQ ID NO: 3270 - protein, 467 aa, Homo sapiens
MAQGSGDQRAVGVADPEESSPNMIVYCKIEDIITKMQDDKTGGVPIRTVKSFLSKIPSVVTGTDIVQWLMKNLSIEDPVEAIHLGSLIAAQGYIFPISDHVLTMKDDGTFYRFQAPYFWPSNCWEPENTDYAIYLCKRTMQNKARLELADYEAENLARLQRAFARKWEFIFMQAEAQVKIDRKKDKTERKILDSQERAFWDVHRPVPGCVNTTEMDIRKCRRLKNPQKVKKSVYGVTEESQAQSPVHVLSQPIRKTTKEDIRKQITFLNAQIDRHCLKMSKVAESLIAYTEQYVEYDPLITPAEPSNPWISDDVALWDIEMSKEPSQQRVKRWGFSFDEILKDQVGRDQFLRFLESEFSSENLRFWLAVQDLKKQPLQDVAKRVEEIWQEFLAPGAPSAINLDSHSYEITSQNVKDGGRYTFEDAQEHIYKLMKSDSYARFLRSNAYQDLLLAKKKLYSNTPLAKRP

SEQ ID NO: 3271 - protein, 453 aa, Homo sapiens
MAQGSGDQRAVGVADPEESSPNMIVYCKIEDIITKMQDDKTGGVPIRTVKSFLSKIPSVVTGTDIVQWLMKNLSIEDPVEAIHLGSLIAAQGYIFPISDHVLTMKDDGTFYRFQAPYFWPSNCWEPENTDYAIYLCKRTMQNKARLELADYEAENLARLQRAFARKWEFIFMQAEAQVKIDRKKDKTERKILDSQERAFWDVHRPVPGCVNTTEMDIRKCRRLKNPQKVKKSVYGVTEESQAQSPVHVLSQPIRKTTKEDIRKQITFLNAQIDRHCLKMSKVAESKEPSQQRVKRWGFSFDEILKDQVGRDQFLRFLESEFSSENLRFWLAVQDLKKQPLQDVAKRVEEIWQEFLAPGAPSAINLDSHSYEITSQNVKDGGRYTFEDAQEHIYKLMKSDSYARFLRSNAYQDLLLAKKKPESEQGRRTSLEKFTRSVGKSLAGKRLTGLMQSS

SEQ ID NO: 3272 - protein, 448 aa, Homo sapiens
MAQGSGDQRAVGVADPEESSPNMIVYCKIEDIITKMQDDKTGGVPIRTVKSFLSKIPSVVTGTDIVQWLMKNLSIEDPVEAIHLGSLIAAQGYIFPISDHVLTMKDDGTFYRFQAPYFWPSNCWEPENTDYAIYLCKRTMQNKARLELADYEAENLARLQRAFARKWEFIFMQAEAQVKIDRKKDKTERKILDSQERAFWDVHRPVPGCVNTTEMDIRKCRRLKNPQKVKKSVYGVTEESQAQSPVHVLSQPIRKTTKEDIRKQITFLNAQIDRHCLKMSKVAESKEPSQQRVKRWGFSFDEILKDQVGRDQFLRFLESEFSSENLRFWLAVQDLKKQPLQDVAKRVEEIWQEFLAPGAPSAINLDSHSYEITSQNVKDGGRYTFEDAQEHIYKLMKSDSYARFLRSNAYQDLLLAKKKPESEQGRRTSLEKFTRSVLYSNTPLAKRP

SEQ ID NO: 3273 - protein, 430 aa, Homo sapiens
MAQGSGDQRAVGVADPEESSPNMIVYCKIEDIITKMQDDKTGGVPIRTVKSFLSKIPSVVTGTDIVQWLMKNLSIEDPVEAIHLGSLIAAQGYIFPISDHVLTMKDDGTFYRFQAPYFWPSNCWEPENTDYAIYLCKRTMQNKARLELADYEAENLARLQRAFARKWEFIFMQAEAQVKIDRKKDKTERKILDSQERAFWDVHRPVPGCVNTTEMDIRKCRRLKNPQKVKKSVYGVTEESQAQSPVHVLSQPIRKTTKEDIRKQITFLNAQIDRHCLKMSKVAESKEPSQQRVKRWGFSFDEILKDQVGRDQFLRFLESEFSSENLRFWLAVQDLKKQPLQDVAKRVEEIWQEFLAPGAPSAINLDSHSYEITSQNVKDGGRYTFEDAQEHIYKLMKSDSYARFLRSNAYQDLLLAKKKLYSNTPLAKRP

SEQ ID NO: 3274 - protein, 346 aa, Homo sapiens
MQNKARLELADYEAENLARLQRAFARKWEFIFMQAEAQVKIDRKKDKTERKILDSQERAFWDVHRPVPGCVNTTEMDIRKCRRLKNPQKVKKSVYGVTEESQAQSPVHVLSQPIRKTTKEDIRKQITFLNAQIDRHCLKMSKVAESLIAYTEQYVEYDPLITPAEPSNPWISDDVALWDIEMSKEPSQQRVKRWGFSFDEILKDQVGRDQFLRFLESEFSSENLRFWLAVQDLKKQPLQDVAKRVEEIWQEFLAPGAPSAINLDSHSYEITSQNVKDGGRYTFEDAQEHIYKLMKSDSYARFLRSNAYQDLLLAKKKPESEQGRRTSLEKFTRSVLYSNTPLAKRP

SEQ ID NO: 3275 - protein, 475 aa, Homo sapiens
MAQGSGDQRAVGVADPEESSPNMIVYCKIEDIITKMQDDKTGGVPIRTVKSFLSKIPSVVTGTDIVQWLMKNLSIEDPVEAIHLGSLIAAQGYIFPISDHVLTMKDDGTFYRFQAPYFWPSNCWEPENTDYAIYLCKRTMQNKARLELADYEAENLARLQRAFARKWEFIFMQAEAQVKIDRKKDKTERKILDSQERAFWDVHRPVPGCVNTTEMDIRKCRRLKNPQKVKKSVYGVTEESQAQSPVHVLSQPIRKTTKEDIRKQITFLNAQIDRHCLKMSKVAESLIAYTEQYVEYDPLITPAEPSNPWISDDVALWDIEMSKEPSQQRVKRWGFSFDEILKDQVGRDQFLRFLESEFSSENLRFWLAVQDLKKQPLQDVAKRVEEIWQEFLAPGAPSAINLDSHSYEITSQNVKDGGRYTFEDAQEHIYKLMKSDSYARFLRSNAYQDLLLAKKKPESEQGRRTSLEKFTRSVG

SEQ ID NO: 3276 - protein, 477 aa, Homo sapiens
MAQGSGDQRAVGVADPEESSPNMIVYCKIEDIITKMQDDKTGGVPIRTVKSFLSKIPSVVTGTDIVQWLMKNLSIEDPVEAIHLGSLIAAQGYIFPISDHVLTMKDDGTFYRFQAPYFWPSNCWEPENTDYAIYLCKRTMQNKARLELADYEAENLARLQRAFARKWEFIFMQAEAQVKIDRKKDKTERKILDSQERAFWDVHRPVPGCVNTTEMDIRKCRRLKNPQKVKKSVYGVTEESQAQSPVHVLSQPIRKTTKEDIRKQITFLNAQIDRHCLKMSKVAESLIAYTEQYVEYDPLITPAEPSNPWISDDVALWDIEMSKEPSQQRVKRWGFSFDEILKDQVGRDQFLRFLESEFSSENLRFWLAVQDLKKQPLQDVAKRVEEIWQEFLAPGAPSAINLDSHSYEITSQNVKDGGRYTFEDAQEHIYKLMKSDSYARFLRSNAYQDLLLAKKKPESEQGRRTSLEKFTRSVLLF

SEQ ID NO: 3277 - protein, 480 aa, Homo sapiens
MAQGSGDQRAVGVADPEESSPNMIVYCKIEDIITKMQDDKTGGVPIRTVKSFLSKIPSVVTGTDIVQWLMKNLSIEDPVEAIHLGSLIAAQGYIFPISDHVLTMKDDGTFYRFQAPYFWPSNCWEPENTDYAIYLCKRTMQNKARLELADYEAENLARLQRAFARKWEFIFMQAEAQVKIDRKKDKTERKILDSQERAFWDVHRPVPGCVNTTEMDIRKCRRLKNPQKVKKSVYGVTEESQAQSPVHVLSQPIRKTTKEDIRKQITFLNAQIDRHCLKMSKVAESLIAYTEQYVEYDPLITPAEPSNPWISDDVALWDIEMSKEPSQQRVKRWGFSFDEILKDQVGRDQFLRFLESEFSSENLRFWLAVQDLKKQPLQDVAKRVEEIWQEFLAPGAPSAINLDSHSYEITSQNVKDGGRYTFEDAQEHIYKLMKSDSYARFLRSNAYQDLLLAKKKPESEQGRRTSLEKFTRSVCLQLLF

SEQ ID NO: 3278 - protein, 460 aa, Homo sapiens
MAQGSGDQRAVGVADPEESSPNMIVYCKIEDIITKMQDDKTGGVPIRTVKSFLSKIPSVVTGTDIVQWLMKNLSIEDPVEAIHLGSLIAAQGYIFPISDHVLTMKDDGTFYRFQAPYFWPSNCWEPENTDYAIYLCKRTMQNKARLELADYEAENLARLQRAFARKWEFIFMQAEAQVKIDRKKDKTERKILDSQERAFWDVHRPVPGCVNTTEMDIRKCRRLKNPQKVKKSVYGVTEESQAQSPVHVLSQPIRKTTKEDIRKQITFLNAQIDRHCLKMSKVAESLIAYTEQYVEYDPLITPAEPSNPWISDDVALWDIEMSKEPSQQRVKRWGFSFDEILKDQVGRDQFLRFLESEFSSENLRFWLAVQDLKKQPLQDVAKRVEEIWQEFLAPGAPSAINLDSHSYEITSQNVKDGGRYTFEDAQEHIYKLMKSDSYARFLRSNAYQDLLLAKKKVWLL

SEQ ID NO: 3279 - protein, 748 aa, Homo sapiens
MEENNDSTENPQQGQGRQNAIKCGWLRKQGGFVKTWHTRWFVLKGDQLYYFKDEDETKPLGTIFLPGNKVSEHPCNEENPGKFLFEVVPGGDRDRMTANHESYLLMASTQNDMEDWVKSIRRVIWGPFGGGIFGQKLEDTVRYEKRYGNRLAPMLVEQCVDFIRQRGLKEEGLFRLPGQANLVKELQDAFDCGEKPSFDSNTDVHTVASLLKLYLRELPEPVIPYAKYEDFLSCAKLLSKEEEAGVKELAKQVKSLPVVNYNLLKYICRFLDEVQSYSGVNKMSVQNLATVFGPNILRPKVEDPLTIMEGTVVVQQLMSVMISKHDCLFPKDAELQSKPQDGVSNNNEIQKKATMGQLQNKENNNTKDSPSRQCSWDKSESPQRSSMNNGSPTALSGSKTNSPKNSVHKLDVSRSPPLMVKKNPAFNKGSGIVTNGSFSSSNAEGLEKTQTTPNGSLQARRSSSLKVSGTKMGTHSVQNGTVRMGILNSDTLGNPTNVRNMSWLPNGYVTLRDNKQKEQAGELGQHNRLSTYDNVHQQFSMMNLDDKQSIDSATWSTSSCEISLPENSNSCRSSTTTCPEQDFFGGNFEDPVLDGPPQDDLSHPRDYESKSDHRSVGGRSSRATSSSDNSETFVGNSSSNHSALHSLVSSLKQEMTKQKIEYESRIKSLEQRNLTLETEMMSLHDELDQERKKFTMIEIKMRNAERAKEDAEKRNDMLQKEMEQFFSTFGELTVEPRRTERGNTIWIQ

SEQ ID NO: 3280 - protein, 655 aa, Homo sapiens
MPEDRNSGGCPAGALASTPFIPKTTYRRIKRCFSFRKGIFGQKLEDTVRYEKRYGNRLAPMLVEQCVDFIRQRGLKEEGLFRLPGQANLVKELQDAFDCGEKPSFDSNTDVHTVASLLKLYLRELPEPVIPYAKYEDFLSCAKLLSKEEEAGVKELAKQVKSLPVVNYNLLKYICRFLDEVQSYSGVNKMSVQNLATVFGPNILRPKVEDPLTIMEGTVVVQQLMSVMISKHDCLFPKDAELQSKPQDGVSNNNEIQKKATMGQLQNKENNNTKDSPSRQCSWDKSESPQRSSMNNGSPTALSGSKTNSPKNSVHKLDVSRSPPLMVKKNPAFNKGSGIVTNGSFSSSNAEGLEKTQTTPNGSLQARRSSSLKVSGTKMGTHSVQNGTVRMGILNSDTLGNPTNVRNMSWLPNGYVTLRDNKQKEQAGELGQHNRLSTYDNVHQQFSMMNLDDKQSIDSATWSTSSCEISLPENSNSCRSSTTTCPEQDFFGGNFEDPVLDGPPQDDLSHPRDYESKSDHRSVGGRSSRATSSSDNSETFVGNSSSNHSALHSLVSSLKQEMTKQKIEYESRIKSLEQRNLTLETEMMSLHDELDQERKKFTMIEIKMRNAERAKEDAEKRNDMLQKEMEQFFSTFGELTVEPRRTERGNTIWIQ

SEQ ID NO: 3281 - protein, 653 aa, Homo sapiens
MTANHESYLLMASTQNDMEDWVKSIRRVIWGPFGGGIFGQKLEDTVRYEKRYGNRLAPMLVEQCVDFIRQRGLKEEGLFRLPGQANLVKELQDAFDCGEKPSFDSNTDVHTVASLLKLYLRELPEPVIPYAKYEDFLSCAKLLSKEEEAGVKELAKQVKSLPVVNYNLLKYICRFLDEVQSYSGVNKMSVQNLATVFGPNILRPKVEDPLTIMEGTVVVQQLMSVMISKHDCLFPKDAELQSKPQDGVSNNNEIQKKATMGQLQNKENNNTKDSPSRQCSWDKSESPQRSSMNNGSPTALSGSKTNSPKNSVHKLDVSRSPPLMVKKNPAFNKGSGIVTNGSFSSSNAEGLEKTQTTPNGSLQARRSSSLKVSGTKMGTHSVQNGTVRMGILNSDTLGNPTNVRNMSWLPNGYVTLRDNKQKEQAGELGQHNRLSTYDNVHQQFSMMNLDDKQSIDSATWSTSSCEISLPENSNSCRSSTTTCPEQDFFGGNFEDPVLDGPPQDDLSHPRDYESKSDHRSVGGRSSRATSSSDNSETFVGNSSSNHSALHSLVSSLKQEMTKQKIEYESRIKSLEQRNLTLETEMMSLHDELDQERKKFTMIEIKMRNAERAKEDAEKRNDMLQKEMEQFFSTFGELTVEPRRTERGNTIWIQ

SEQ ID NO: 3282 - protein, 246 aa, Homo sapiens
MEENNDSTENPQQGQGRQNAIKCGWLRKQGGFVKTWHTRWFVLKGDQLYYFKDEDETKPLGTIFLPGNKVSEHPCNEENPGKFLFEVVPGGDRDRMTANHESYLLMASTQNDMEDWVKSIRRVIWGPFGGGIFGQKLEDTVRYEKRYGNRLAPMLVEQCVDFIRQRGLKEEGLFRLPGQANLVKELQDAFDCGEKPSFDSNTDVHTVASLLKLYLRELPEPVIPYAKYEDFLSCAKLLSKEEEAVS

SEQ ID NO: 3283 - protein, 239 aa, Homo sapiens
MWLRKKDWQIFNEQFLKKEHAVGFCFSKCVLVEFSLKCFKKIKSSYWNNDALAFLGKKFLREKNKMTKKQTRNRQNKFPPKPALRSSPVHRVQHFPLLWKVKEPHYHLFFFAFSYCWSWEPFPSEQQPCPASVLSSQQGKSISLIMEENNDSTENPQQGQGRQNAIKCGWLRKQGGFVKTWHTRWFVLKGDQLYYFKDEDETKPLGTIFLPGNKVSEHPCNEENPGKFLFEVVPGKIFS

SEQ ID NO: 3284 - protein, 1857 aa, Homo sapiens
MEQLTTLPRPGDPGAMEPWALPTWHSWTPGRGGEPSSAAPSIADTPPAALQLQELRSEESSKPKGDGSSRPVGGTDPEGAEACLPSLGQQASSSGPACQRPEDEEVEAFLKAKLNMSFGDRPNLELLRALGELRQRCAILKEENQMLRKSSFPETEEKVRRLKRKNAELAVIAKRLEERARKLQETNLRVVSAPLPRPGTSLELCRKALARQRARDLSETASALLAKDKQIAALQRECRELQARLTLVGKEGPQWLHVRDFDRLLRESQREVLRLQRQIALRNQRETLPLPPSWPPGPALQARAGAPAPGAPGEATPQEDADNLPVILGEPEKEQRVQQLESELSKKRKKCESLEQEARKKQRRCEELELQLRQAQNENARLVEENSRLSGRATEKEQVEWENAELRGQLLGVTQERDSALRKSQGLQSKLESLEQVLKHMREVAQRRQQLEVEHEQARLSLREKQEEVRRLQQAQAEAQREHEGAVQLLESTLDSMQARVRELEEQCRSQTEQFSLLAQELQAFRLHPGPLDLLTSALDCGSLGDCPPPPCCCSIPQPCRGSGPKDLDLPPGSPGRCTPKSSEPAPATLTGVPRRTAKKAESLSNSSHSESIHNSPKSCPTPEVDTASEVEELEADSVSLLPAAPEGSRGGARIQVFLARYSYNPFEGPNENPEAELPLTAGEYIYIYGNMDEDGFFEGELMDGRRGLVPSNFVERVSDDDLLTSLPPELADLSHSSGPELSFLSVGGGGSSSGGQSSVGRSQPRPEEEDAGDELSLSPSPEGLGEPPAVPYPRRLVVLKQLAHSVVLAWEPPPEQVELHGFHICVNGELRQALGPGAPPKAVLENLDLWAGPLHISVQALTSRGSSDPLRCCLAVGARAGVVPSQLRVHRLTATSAEITWVPGNSNLAHAIYLNGEECPPASPSTYWATFCHLRPGTPYQAQVEAQLPPQGPWEPGWERLEQRAATLQFTTLPAGPPDAPLDVQIEPGPSPGILIISWLPVTIDAAGTSNGVRVTGYAIYADGQKIMEVASPTAGSVLVELSQLQLLQVCREVVVRTMSPHGESADSIPAPITPALAPASLPARVSCPSPHPSPEARAPLASASPGPGDPSSPLQHPAPLGTQEPPGAPPASPSREMAKGSHEDPPAPCSQEEAGAAVLGTSEERTASTSTLGEKDPGPAAPSLAKQEAEWTAGEACPASSSTQGARAQQAPNTEMCQGGDPGSGLRPRAEKEDTAELGVHLVNSLVDHGRNSDLSDIQEEEEEEEEEEEEELGSRTCSFQKQVAGNSIRENGAKSQPDPFCETDSDEEILEQILELPLQQFCSKKLFSIPEEEEEEEEDEEEEKSGAGCSSRDPGPPEPALLGLGCDSGQPRRPGQCPLSPESSRAGDCLEDMPGLVGGSSRRRGGGSPEKPPSRRRPPDPREHCSRLLSNNGPQASGRLGPTRERGGLPVIEGPRTGLEASGRGRLGPSRRCSRGRALEPGLASCLSPKCLEISIEYDSEDEQEAGSGGISITSSCYPGDGEAWGTATVGRPRGPPKANSGPKPYPRLPAWEKGEPERRGRSATGRAKEPLSRATETGEARGQDGSGRRGPQKRGVRVLRPSTAELVPARSPSETLAYQHLPVRIFVALFDYDPVSMSPNPDAGEEELPFREGQILKVFGDKDADGFYQGEGGGRTGYIPCNMVAEVAVDSPAGRQQLLQRGYLSPDILLEGSGNGPFVYSTAHTTGPPPKPRRSKKAESEGPAQPCPGPPKLVPSADLKAPHSMVAAFDYNPQESSPNMDVEAELPFRAGDVITVFGGMDDDGFYYGELNGQRGLVPSNFLEGPGPEAGGLDREPRTPQAESQRTRRRRVQC

SEQ ID NO: 3285 - protein, 1797 aa, Homo sapiens
MEQLTTLPRPGDPGAMEPWALPTWHSWTPGRGGEPSSAAPSIADTPPAALQLQELRSEESSKPKGDGSSRPVGGTDPEGAEACLPSLGQQASSSGPACQRPEDEEVEAFLKAKLNMSFGDRPNLELLRALGELRQRCAILKEENQMLRKSSFPETEEKVRRLKRKNAELAVIAKRLEERARKLQETNLRVEGPQWLHVRDFDRLLRESQREVLRLQRQIALRNQRETLPLPPSWPPGPALQARAGAPAPGAPGEATPQEDADNLPVILGEPEKEQRVQQLESELSKKRKKCESLEQEARKKQRRCEELELQLRQAQNENARLVEENSRLSGRATEKEQVEWENAELRGQLLGVTQERDSALRKSQGLQSKLESLEQVLKHMREVAQRRQQLEVEHEQARLSLREKQEEVRRLQQAQAEAQREHEGAVQLLESTLDSMQARVRELEEQCRSQTEQFSLLAQELQAFRLHPGPLDLLTSALDCGSLGDCPPPPCCCSIPQPCRGSGPKDLDLPPGSPGRCTPKSSEPAPATLTGVPRRTAKKAESLSNSSHSESIHNSPKSCPTPEVDTASEVEELEADSVSLLPAAPEGSRGGARIQVFLARYSYNPFEGPNENPEAELPLTAGEYIYIYGNMDEDGFFEGELMDGRRGLVPSNFVERVSDDDLLTSLPPELADLSHSSGPELSFLSVGGGGSSSGGQSSVGRSQPRPEEEDAGDELSLSPSPEGLGEPPAVPYPRRLVVLKQLAHSVVLAWEPPPEQVELHGFHICVNGELRQALGPGAPPKAVLENLDLWAGPLHISVQALTSRGSSDPLRCCLAVGARAGVVPSQLRVHRLTATSAEITWVPGNSNLAHAIYLNGEECPPASPSTYWATFCHLRPGTPYQAQVEAQLPPQGPWEPGWERLEQRAATLQFTTLPAGPPDAPLDVQIEPGPSPGILIISWLPVTIDAAGTSNGVRVTGYAIYADGQKIMEVASPTAGSVLVELSQLQLLQVCREVVVRTMSPHGESADSIPAPITPALAPASLPARVSCPSPHPSPEARAPLASASPGPGDPSSPLQHPAPLGTQEPPGAPPASPSREMAKGSHEDPPAPCSQEEAGAAVLGTSEERTASTSTLGEKDPGPAAPSLAKQEAEWTAGEACPASSSTQGARAQQAPNTEMCQGGDPGSGLRPRAEKEDTAELGVHLVNSLVDHGRNSDLSDIQEEEEEEEEEEEEELGSRTCSFQKQVAGNSIRENGAKSQPDPFCETDSDEEILEQILELPLQQFCSKKLFSIPEEEEEEEEDEEEEKSGAGCSSRDPGPPEPALLGLGCDSGQPRRPGQCPLSPESSRAGDCLEDMPGLVGGSSRRRGGGSPEKPPSRRRPPDPREHCSRLLSNNGPQASGRLGPTRERGGLPVIEGPRTGLEASGRGRLGPSRRCSRGRALEPGLASCLSPKCLEISIEYDSEDEQEAGSGGISITSSCYPGDGEAWGTATVGRPRGPPKANSGPKPYPRLPAWEKGEPERRGRSATGRAKEPLSRATETGEARGQDGSGRRGPQKRGVRVLRPSTAELVPARSPSETLAYQHLPVRIFVALFDYDPVSMSPNPDAGEEELPFREGQILKVFGDKDADGFYQGEGGGRTGYIPCNMVAEVAVDSPAGRQQLLQRGYLSPDILLEGSGNGPFVYSTAHTTGPPPKPRRSKKAESEGPAQPCPGPPKLVPSADLKAPHSMVAAFDYNPQESSPNMDVEAELPFRAGDVITVFGGMDDDGFYYGELNGQRGLVPSNFLEGPGPEAGGLDREPRTPQAESQRTRRRRVQC

SEQ ID NO: 3286 - protein, 1907 aa, Homo sapiens
MEQLTTLPRPGDPGAMEPWALPTWHSWTPGRGGEPSSAAPSIADTPPAALQLQELRSEESSKPKGDGSSRPVGGTDPEGAEACLPSLGQQASSSGPACQRPEDEEVEAFLKAKLNMSFGDRPNLELLRALGELRQRCAILKEENQMLRKSSFPETEEKVRRLKRKNAELAVIAKRLEERARKLQETNLRVVSAPLPRPGTSLELCRKALARQRARDLSETASALLAKDKQIAALQRECRELQARLTLVGKEGPQWLHVRDFDRLLRESQREVLRLQRQIALRNQRETLPLPPSWPPGPALQARAGAPAPGAPGEATPQEDADNLPVILGEPEKEQRVQQLESELSKKRKKCESLEQEARKKQRRCEELELQLRQAQNENARLVEENSRLSGRATEKEQVEWENAELRGQLLGVTQERDSALRKSQGLQSKLESLEQVLKHMREVAQRRQQLEVEHEQARLSLREKQEEVRRLQQAQAEAQREHEGAVQLLESTLDSMQARVRELEEQCRSQTEQFSLLAQELQAFRLHPGPLDLLTSALDCGSLGDCPPPPCCCSIPQPCRGSGPKDLDLPPGSPGRCTPKSSEPAPATLTGVPRRTAKKAESLSNSSHSESIHNSPKSCPTPEVDTASEVEELEADSVSLLPAAPEGSRGGARIQVFLARYSYNPFEGPNENPEAELPLTAGEYIYIYGNMDEDGFFEGELMDGRRGLVPSNFVERVSDDDLLTSLPPELADLSHSSGPELSFLSVGGGGSSSGGQSSVGRSQPRPEEEDAGDELSLSPSPEGLGEPPAVPYPRRLVVLKQLAHSVVLAWEPPPEQVELHGFHICVNGELRQALGPGAPPKAVLENLDLWAGPLHISVQALTSRGSSDPLRCCLAVGARAGVVPSQLRVHRLTATSAEITWVPGNSNLAHAIYLNGEECPPASPSTYWATFCHLRPGTPYQAQVEAQLPPQGPWEPGWERLEQRAATLQFTTLPAGPPDAPLDVQIEPGPSPGILIISWLPVTIDAAGTSNGVRVTGYAIYADGQKIMEVASPTAGSVLVELSQLQLLQVCREVVVRTMSPHGESADSIPAPITPALAPASLPARVSCPSPHPSPEARAPLASASPGPGDPSSPLQHPAPLGTQEPPGAPPASPSREMAKGSHEDPPAPCSQEEAGAAVLGTSEERTASTSTLGEKDPGPAAPSLAKQEAEWTAGEACPASSSTQGARAQQAPNTEMCQGGDPGSGLRPRAEKEDTAELGVHLVNSLVDHGRNSDLSDIQEEEEEEEEEEEEELGSRTCSFQKQVAGNSIRENGAKSQPDPFCETDSDEEILEQILELPLQQFCSKKLFSIPEEEEEEEEDEEEEKSGAGCSSRDPGPPEPALLGLGCDSGQPRRPGQCPLSPESSRAGDCLEDMPGLVGGSSRRRGGGSPEKPPSRRRPPDPREHCSRLLSNNGPQASGRLGPTRERGGLPVIEGPRTGLEASGRGRLGPSRRCSRGRALEPGLASCLSPKCLEISIEYDSEDEQEAGSGGISITSSCYPGDGEAWGTATVGRPRGPPKANSGPKPYPRLPAWEKGEPERRGRSATGRAKEPLSRATETGEARGQDGSGRRGPQKRGVRVLRPSTAELVPARSPSETLAYQHLPVRIFVALFDYDPVSMSPNPDAGEEELPFREGQILKVFGDKDADGFYQGEGGGRTGYIPCNMVAEVAVDSPAGRQQLLQRGYLSPDILLEGSGNGPFVYSTAHTTGPPPKPRRSKKAESEGPAQPCPGPPKLVPSADLKAPHSMVAAFDYNPQESSPNMDVEAELPFRAGDVITVFGGMDDDGFYYGELNGQRGLVPSNFLEGPGPEAGGLDREPRTPQAESQDWGCTTQGSPGPPGGPCTPSSGSAPRIERGEPQGRSEKVWGFFSKGKQLLRRLGSGKKE

SEQ ID NO: 3287 - protein, 196 aa, Homo sapiens
MSEGDSVGESVHGKPSVVYRFFTRLGQIYQSWLDKSTPYTAVRWVVTLGLSFVYMIRVYLLQGWYIVTYALGIYHLNLFIAFLSPKVDPSLMEDSDDGPSLPTKQNEEFRPFIRRLPEFKFWHAATKGILVAMVCTFFDAFNVPVFWPILVMYFIMLFCITMKRQIKHMIKYRYIPFTHGKRRYRGKEDAGKAFAS

SEQ ID NO: 3288 - protein, 1261 aa, Homo sapiens
MIAHKQKKTKKKRAWASGQLSTDITTSEMGLKSLSSNSIFDPDYIKELVNDIRKFSHMLLYLKEAIFSDCFKEVIHIRLEELLRVLKSIMNKHQNLNSVDLQNAAEMLTAKVKAVNFTEVNEENKNDLFQEVFSSIETLAFTFGNILTNFLMGDVGNDSLLRLPVSRETKSFENVSVESVDSSSEKGNFSPLELDNVLLKNTDSIELALSYAKTWSKYTKNIVSWVEKKLNLELESTRNMVKLAEATRTNIGIQEFMPLQSLFTNALLNDIESSHLLQQTIAALQANKFVQPLLGRKNEMEKQRKEIKELWKQEQNKMLEAENALKKAKLLCMQRQDEYEKAKSSMFRAEEEHLSSSGGLAKNLNKQLEKKRRLEEEALQKVEEANELYKVCVTNVEERRNDLENTKREILAQLRTLVFQCDLTLKAVTVNLFHMQHLQAASLADSLQSLCDSAKLYDPGQEYSEFVKATNSTEEEKVDGNVNKHLNSSQPSGFGPANSLEDVVRLPDSSNKIEEDRCSNSADITGPSFIRSWTFGMFSDSESTGGSSESRSLDSESISPGDFHRKLPRTPSSGTMSSADDLDEREPPSPSETGPNSLGTFKKTLMSKAALTHKFRKLRSPTKCRDCEGIVVFQGVECEECLLVCHRKCLENLVIICGHQKLPGKIHLFGAEFTQVAKKEPDGIPFILKICASEIENRALCLQGIYRVCGNKIKTEKLCQALENGMHLVDISEFSSHDICDVLKLYLRQLPEPFILFRLYKEFIDLAKEIQHVNEEQETKKNSLEDKKWPNMCIEINRILLKSKDLLRQLPASNFNSLHFLIVHLKRVVDHAEENKMNSKNLGVIFGPSLIRPRPTTAPITISSLAEYSNQARLVEFLITYSQKIFDGSLQPQDVMCSIGVVDQGCFPKPLLSPEERDIERSMKSLFFSSKEDIHTSESESKIFERATSFEESERKQNALGKCDACLSDKAQLLLDQEAESASQKIEDGKTPKPLSLKSDRSTNNVERHTPRTKIRPVSLPVDRLLLASPPNERNGRNMGNVNLDKFCKNPAFEGVNRKDAATTVCSKFNGFDQQTLQKIQDKQYEQNSLTAKTTMIMPSALQEKGVTTSLQISGDHSINATQPSKPYAEPVRSVREASERRSSDSYPLAPVRAPRTLQPQHWTTFYKPHAPIISIRGNEEKPASPSAAVPPGTDHDPHGLVVKSMPDPDKASACPGQATGQPKEDSEELGLPDVNPMCQRPRLKRMQQFEDLEGEIPQFV

SEQ ID NO: 3289 - protein, 393 aa, Homo sapiens
MIAHKQKKTKKKRAWASGQLSTDITTSEMGLKSLSSNSIFDPDYIKELVNDIRKFSHMLLYLKEAIFSDCFKEVIHIRLEELLRVLKSIMNKHQNLNSVDLQNAAEMLTAKVKAVNFTEVNEENKNDLFQEVFSSIETLAFTFGNILTNFLMGDVGNDSLLRLPVSRETKSFENVSVESVDSSSEKGNFSPLELDNVLLKNTDSIELALSYAKTWSKYTKNIVSWVEKKLNLELESTRNMVKLAEATRTNIGIQEFMPLQSLFTNALLNDIESSHLLQQTIAALQANKFVQPLLGRKNEMEKQRKEIKELWKQEQNKMLEAENALKKAKLLCMQRQDEYEKAKSSMFRAEEEHLSSSGGLAKNLNKQLEKKRRLEEEALQKVTIFFFFICKLN

SEQ ID NO: 3290 - protein, 1076 aa, Homo sapiens
MSSAEIIGSTNLIILLEDEVFADFFNTFLSLPVFGQTPFYTVENSQWSLWPEIPCNLIAKYKGLLTWLEKCRLPFFCKTNLCFHYILCQEFISFIKSPEGGEELVDFWILAENILSIDEMDLEVRDYYLSLLLMLRATHLQEGSRVVTLCNMNIKSLLNLSIWHPNQSTTRREILSHMQKVALFKLQSYWLPNFYTHTKMTMAKEEACHGLMQEYETRLYSVCYTHIGGLPLNMSIKKCHHFQKRYSSRKAKRKMWQLVDPDSWSLEMDLKPDAIGMPLQETCPQEKVVIQMPSLKMASSKETRISSLEKDMHYAKISSMENKAKSHLHMEAPFETKVSTHLRTVIPIVNHSSKMTIQKAIKQSFSLGYIHLALCADACAGNPFRDHLKKLNLKVEIQLLDLWQDLQHFLSVLLNNKKNGNAIFRHLLGDRICELYLNEQIGPCLPLKSQTIQGLKELLPSGDVIPWIPKAQKEICKMLSPWYDEFLDEEDYWFLLFTTQNRFISSRQHKREFIGKEENILLYKRIQQSLELSQALADMKEMDYRQWRKIATEDLKQGGSLQVELTSPVFLTDITKMSFEELCYKNPKMAIQKISDDYKIYCEKAPKIDFKMEIIKETKTVSRSNRKMSLLKRTLVRKPSMRPRNLTEVLLNTQHLEFFREFLKERKAKIPLQFLTAVQKISIETNEKICKSLIENVIKTFFQGQLSPEEMLQCDAPIIKEIASMRHVTTSTLLTLQGHVMKSIEEKWFKDYQDLFPPHHQEVEVQSEVQISSRKPSKIVSTYLQESQKKGWMRMISFIRSFCKYRRFMLNPSKRQEFEDYLHQEMQNSKENFTTAHNTSGRSAPPSTNVRSADQENGEITLVKRRIFGHRIITVNFAINDLYFFSEMEKFNDLVSSAHMLQVNRAYNENDVILMRSKMNIIQKLFLNSDIPPKLRVNVPEFQKDAILAAITEGYLDRSVFHGAIMSVFPVVMYFWKRFCFWKATRSYLQYRGKKFKDRKSPPKSTDKYPFSSGGDNAILRFTLLRGIEWLQPQREAISSVQNSSSSKLTQPRLVVSAMQLHPVQGQKLSYIKKEK

SEQ ID NO: 3291 - protein, 599 aa, Homo sapiens
MLSPWYDEFLDEEDYWFLLFTTQNRFISSRQHKREFIGKEENILLYKRIQQSLELSQALADMKEMDYRQWRKIATEDLKQGGSLQVELTSPVFLTDITKMSFEELCYKNPKMAIQKISDDYKIYCEKAPKIDFKMEIIKETKTVSRSNRKMSLLKRTLVRKPSMRPRNLTEVLLNTQHLEFFREFLKERKAKIPLQFLTAVQKISIETNEKICKSLIENVIKTFFQGQLSPEEMLQCDAPIIKEIASMRHVTTSTLLTLQGHVMKSIEEKWFKDYQDLFPPHHQEVEVQSEVQISSRKPSKIVSTYLQESQKKGWMRMISFIRSFCKYRRFMLNPSKRQEFEDYLHQEMQNSKENFTTAHNTSGRSAPPSTNVRSADQENGEITLVKRRIFGHRIITVNFAINDLYFFSEMEKFNDLVSSAHMLQVNRAYNENDVILMRSKMNIIQKLFLNSDIPPKLRVNVPEFQKDAILAAITEGYLDRSVFHGAIMSVFPVVMYFWKRFCFWKATRSYLQYRGKKFKDRKSPPKSTDKYPFSSGGDNAILRFTLLRGIEWLQPQREAISSVQNSSSSKLTQPRLVVSAMQLHPVQGQKLSYIKKEK

SEQ ID NO: 3292 - protein, 500 aa, Homo sapiens
MSFEELCYKNPKMAIQKISDDYKIYCEKAPKIDFKMEIIKETKTVSRSNRKMSLLKRTLVRKPSMRPRNLTEVLLNTQHLEFFREFLKERKAKIPLQFLTAVQKISIETNEKICKSLIENVIKTFFQGQLSPEEMLQCDAPIIKEIASMRHVTTSTLLTLQGHVMKSIEEKWFKDYQDLFPPHHQEVEVQSEVQISSRKPSKIVSTYLQESQKKGWMRMISFIRSFCKYRRFMLNPSKRQEFEDYLHQEMQNSKENFTTAHNTSGRSAPPSTNVRSADQENGEITLVKRRIFGHRIITVNFAINDLYFFSEMEKFNDLVSSAHMLQVNRAYNENDVILMRSKMNIIQKLFLNSDIPPKLRVNVPEFQKDAILAAITEGYLDRSVFHGAIMSVFPVVMYFWKRFCFWKATRSYLQYRGKKFKDRKSPPKSTDKYPFSSGGDNAILRFTLLRGIEWLQPQREAISSVQNSSSSKLTQPRLVVSAMQLHPVQGQKLSYIKKEK

SEQ ID NO: 3293 - protein, 402 aa, Homo sapiens
MSFEELCYKNPKMAIQKISDDYKIYCEKAPKIDFKMEIIKETKTVSRSNRKMSLLKRTLVRKPSMRPRNLTEVLLNTQHLEFFREFLKERKAKIPLQFLTAVQKISIETNEKICKSLIENVIKTFFQGQLSPEEMLQCDAPIIKEIASMRHVTTSTLLTLQGHVMKSIEEKWFKDYQDLFPPHHQEVEVQSEVQISSRKPSKIVSTYLQESQKKGWMRMISFIRSFCKYRRFMLNPSKRQEFEDYLHQEMQNSKENFTTAHNTSGRSAPPSTNVRSADQENGEITLVKRRIFGHRIITVNFAINDLYFFSEMEKFNDLVSSAHMLQVNRAYNENDVILMRSKMNIIQKLFLNSDIPPKLRVNVPEFQKDAILAAITEGYLDRSVFHGAIMSVFPVVMYFWKR

SEQ ID NO: 3294 - protein, 472 aa, Homo sapiens
MLSPWYDEFLDEEDYWFLLFTTQNRFISSRQHKREFIGKEENILLYKRIQQSLELSQALADMKEMDYRQWRKIATEDLKQGGSLQVELTSPVFLTDITKMSFEELCYKNPKMAIQKISDDYKIYCEKAPKIDFKMEIIKETKTVSRSNRKMSLLKRTLVRKPSMRPRNLTEVLLNTQHLEFFREFLKERKAKIPLQFLTAVQKISIETNEKICKSLIENVIKTFFQGQLSPEEMLQCDAPIIKEIASMRHVTTSTLLTLQGHVMKSIEEKWFKDYQDLFPPHHQEVEVQSEVQISSRKPSKIVSTYLQESQKKGWMRMISFIRSFCKYRRFMLNPSKRQEFEDYLHQEMQNSKENFTTAHNTSGRSAPPSTNVRSADQENGEITLVKRRIFGHRIITVNFAINDLYFFSEMEKFNDLVSSAHMLQVNRAYNENDVILMRSKMNIIQKLFLNSDIPPKLRVLFLEGNPLLLTV

SEQ ID NO: 3295 - protein, 539 aa, Homo sapiens
MSSAEIIGSTNLIILLEDEVFADFFNTFLSLPVFGQTPFYTVENSQWSLWPEIPCNLIAKYKGLLTWLEKCRLPFFCKTNLCFHYILCQEFISFIKSPEGAKMMRWKKADQWLLQKCIGGVRGMWRFYSYLTGSAGEELVDFWILAENILSIDEMDLEVRDYYLSLLLMLRATHLQEGSRVVTLCNMNIKSLLNLSIWHPNQSTTRREILSHMQKVALFKLQSYWLPNFYTHTKMTMAKEEACHGLMQEYETRLYSVCYTHIGGLPLNMSIKKCHHFQKRYSSRKAKRKMWQLVDPDSWSLEMDLKPDAIGMPLQETCPQEKVVIQMPSLKMASSKETRISSLEKDMHYAKISSMENKAKSHLHMEAPFETKVSTHLRTVIPIVNHSSKMTIQKAIKQSFSLGYIHLALCADACAGNPFRDHLKKLNLKVEIQLLDLWQDLQHFLSVLLNNKKNGNAIFRHLLGDRICELYLNEQIGPCLPLKSQTIQGLKELLPSGDVIPWIPKAQKEICKMLSPWYDEFLDEEDYWFLLFTVGRTLG

SEQ ID NO: 3296 - protein, 1216 aa, Homo sapiens
MAAMAPGGSGSGGGVNPFLSDSDEDDDEVAATEERRAVLRLGAGSGLDPGSAGSLSPQDPVALGSSARPGLPGEASAAAVALGGTGETPARLSIDAIAAQLLRDQYLLTALELHTELLESGRELPRLRDYFSNPGNFERQSGTPPGMGAPGVPGAAGVGGAGGREPSTASGGGQLNRAGSISTLDSLDFARYSDDGNRETDEKVAVLEFELRKAKETIQALRANLTKAAEHEVPLQERKNYKSSPEIQEPIKPLEKRALNFLVNEFLLKNNYKLTSITFSDENDDQDFELWDDVGLNIPKPPDLLQLYRDFGNHQVTGKDLVDVASGVEEDELEALTPIISNLPPTLETPQPAENSMLVQKLEDKISLLNSEKWSLMEQIRRLKSEMDFLKNEHFAIPAVCDSVQPPLDQLPHKDSEDSGQHPDVNSSDKGKNTDIHLSISDEADSTIPKENSPNSFPRREREGMPPSSLSSKKTVHFDKPNRKLSPAFHQALLSFCRMSADSRLGYEVSRIADSEKSVMLMLGRCLPHIVPNVLLAKREELIPLILCTACLHPEPKERDQLLHILFNLIKRPDDEQRQMILTGCVAFARHVGPTRVEAELLPQCWEQINHKYPERRLLVAESCGALAPYLPKEIRSSLVLSMLQQMLMEDKADLVREAVIKSLGIIMGYIDDPDKYHQGFELLLSALGDPSERVVSATHQVFLPAYAAWTTELGNLQSHLILTLLNKIEKLLREGEHGLDEHKLHMYLSALQSLIPSLFALVLQNAPFSSKAKLHGEVPQIEVTRFPRPMSPLQDVSTIIGSREQLAVLLQLYDYQLEQEGTTGWESLLWVVNQLLPQLIEIVGKINVTSTACVHEFSRFFWRLCRTFGKIFTNTKVKPQFQEILRLSEENIDSSAGNGVLTKATVPIYATGVLTCYIQEEDRKLLVGFLEDVMTLLSLSHAPLDSLKASFVELGANPAYHELLLTVLWYGVVHTSALVRCTAARMFELTLRGMSEALVDKRVAPALVTLSSDPEFSVRIATIPAFGTIMETVIQRELLERVKMQLASFLEDPQYQDQHSLHTEIIKTFGRVGPNAEPRFRDEFVIPHLHKLALVNNLQIVDSKRLDIATHLFEAYSALSCCFISEDLMVNHFLPGLRCLRTDMEHLSPEHEVILSSMIKECEQKVENKTVQEPQGSMSIAASLVSEDTKTKFLNKMGQLTTSGAMLANVFQRKK

SEQ ID NO: 3297 - protein, 1250 aa, Homo sapiens
MAAMAPGGSGSGGGVNPFLSDSDEDDDEVAATEERRAVLRLGAGSGLDPGSAGSLSPQDPVALGSSARPGLPGEASAAAVALGGTGETPARLSIDAIAAQLLRDQYLLTALELHTELLESGRELPRLRDYFSNPGNFERQSGTPPGMGAPGVPGAAGVGGAGGREPSTASGGGQLNRAGSISTLDSLDFARYSDDGNRETDEKVAVLEFELRKAKETIQALRANLTKAAEHEVPLQERKNYKSSPEIQEPIKPLEKRALNFLVNEFLLKNNYKLTSITFSDENDDQDFELWDDVGLNIPKPPDLLQLYRDFGNHQVTGKDLVDVASGVEEDELEALTPIISNLPPTLETPQPAENSMLVQKLEDKISLLNSEKWSLMEQIRRLKSEMDFLKNEHFAIPAVCDSVQPPLDQLPHKDSEDSGQHPDVNSSDKGKNTDIHLSISDEADSTIPKENSPNSFPRREREGMPPSSLSSKKTVHFDKPNRKLSPAFHQALLSFCRMSADSRLGYEVSRIADSEKSVMLMLGRCLPHIVPNVLLAKREELIPLILCTACLHPEPKERDQLLHILFNLIKRPDDEQRQMILTGCVAFARHVGPTRVEAELLPQCWEQINHKYPERRLLVAESCGALAPYLPKEIRSSLVLSMLQQMLMEDKADLVREAVIKSLGIIMGYIDDPDKYHQGFELLLSALGDPSERVVSATHQVFLPAYAAWTTELGNLQSHLILTLLNKIEKLLREGEHGLDEHKLHMYLSALQSLIPSLFALVLQNAPFSSKAKLHGEVPQIEVTRFPRPMSPLQDVSTIIGSREQLAVLLQLYDYQLEQEGTTGWESLLWVVNQLLPQLIEIVGKINVTSTACVHEFSRFFWRLCRTFGKIFTNTKVKPQFQEILRLSEENIDSSAGNGVLTKATVPIYATGVLTCYIQIKEYLHIHNEISWEWDPSLNTKCVSYTHYTHSLKEEDRKLLVGFLEDVMTLLSLSHAPLDSLKASFVELGANPAYHELLLTVLWYGVVHTSALVRCTAARMFELLVKGVNETLVAQRVVPALITLSSDPEISVRIATIPAFGTIMETVIQRELLERVKMQLASFLEDPQYQDQHSLHTEIIKTFGRVGPNAEPRFRDEFVIPHLHKLALVNNLQIVDSKRLDIATHLFEAYSALSCCFISEDLMVNHFLPGLRCLRTDMEHLSPEHEVILSSMIKECEQKVENKTVQEPQGSMSIAASLVSEDTKTKFLNKMGQLTTSGAMLANVFQRKK

SEQ ID NO: 3298 - protein, 260 aa, Homo sapiens
MELTQPAEDLIQTQQTPASELGDPEDPGEEAADGSDTVVLSLFPCTPEPVNPEPDASVSSPQAGSSLKHSTTLTNRQRGNEVSALPATLDSLSIHQLAAQGELDQLKEHLRKGDNLVNKPDERGFTPLIWASAFGEIETVRFLLEWGADPHILAKERESALSLASTGGYTDIVGLLLERDVDINIYDWNGGTPLLYAVRGNHVKCVEALLARGADLTTEADSGYTPMDLAVALGYRKVQQVIENHILKLFQSNLVPADPE

SEQ ID NO: 3299 - protein, 223 aa, Homo sapiens
MELTQPAEDLIQTQQTPASELGDPEDPGEEAADGSDTVVLSLFPCTPEPVNPEPDASVSSPQGSSLKHSTTLTNRQRGNEVSALPATLDCDNLVNKPDERGFTPLIWASAFGEIETVRFLLEWGADPHILAKEREVGLLLERDVDINIYDWNGGTPLLYAVRGNHVKCVEALLARGADLTTEADSGYTPMDLAVALGYRKVQQVIENHILKLFQSNLVPADPE

SEQ ID NO: 3300 - protein, 238 aa, Homo sapiens
MELTQPAEDLIQTQQTPASELGDPEDPGEEAADGSDTVVLSLFPCTPEPVNPEPDASVSSPQAGSSLKHSTTLTNRQRGNEVSALPATLDCDNLVNKPDERGFTPLIWASAFGEIETVRFLLEWGADPHILAKERESALSLASTGGYTDIVGLLLERDVDINIYDWNGGTPLLYAVRGNHVKCVEALLARGADLTTEADSGYTPMDLAVALGYRKVQQVIENHILKLFQSNLVPADPE

SEQ ID NO: 3301 - protein, 519 aa, Homo sapiens
MDLVGVASPEPGTAAAWGPSKCPWAIPQNTISCSLADVMSEQLAKELQLEEEAAVFPEVAVAEGPFITGENIDTSSDLMLAQMLQMEYDREYDAQLRREEKKFNGDSKVSISFENYRKVHPYEDSDSSEDEVDWQDTRDDPYRPAKPVPTPKKGFIGKGKDITTKHDEVVCGRKNTARMENFAPEFQVGDGIGMDLKLSNHVFNALKQHAYSEERRSARLHEKKEHSTAEKAVDPKTRLLMYKMVNSGMLETITGCISTGKESVVFHAYGGSMEDEKEDSKVIPTECAIKVFKTTLNEFKNRDKYIKDDFRFKDRFSKLNPRKIIRMWAEKEMHNLARMQRAGIPCPTVVLLKKHILVMSFIGHDQVPAPKLKEVKLNSEEMKEAYYQTLHLMRQLYHECTLVHADLSEYNMLWHAGKVWLIDVSQSVEPTHPHGLEFLFRDCRNVSQFFQKGGVKEALSERELFNAVSGLNITADNEADFLAEIEALEKMNEDHVQKNGRKAASFLKDDGDPPLLYDE

SEQ ID NO: 3302 - protein, 516 aa, Homo sapiens
MDLVGVASPEPGTAAAWGPSKCPWAIPQNTISCSLADVMSEQLAKELQLEEEAAVFPEVAVAEGPFITGENIDTSSDLMLAQMLQMEYDREYDAQLRREEKKFNGDSKVSISFENYRKVHPYEDSDSSEDEVDWQDTRDDPYRPAKPVPTPKKGFIGKGKDITTKHDEVVCGRKNTARMENFAPEFQVGDGIGMDLKLSNHVFNALKQHAYSEERRSARLHEKKEHSTAEKAVDPKTRLLMYKMVNSGMLETITGCISTGKESVVFHAYGGSMEDEKEDSKVIPTECAIKVFKTTLNEFKNRDKYIKDDFRFKDRFSKLNPRKIIRMWAEKEMHNLARMQRAGIPCPTVVLLKKHILVMSFIGHDQVPAPKLKEVKLNSEEMKEAYYQTLHLMRQLYHECTLVHADLSEYNMLWHAGKVWLIDVSQSVEPTHPHGLEFLFRDCRNVSQKGGVKEALSERELFNAVSGLNITADNEADFLAEIEALEKMNEDHVQKNGRKAASFLKDDGDPPLLYDE

SEQ ID NO: 3303 - protein, 426 aa, Homo sapiens
MGEPGQSPSPRSSHGSPPTLSTLTLLLLLCGHAHSQCKILRCNAEYVSSTLSLRGGGSSGALRGGGGGGRGGGVGSGGLCRALRSYALCTRRTARTCRGDLAFHSAVHGIEDLMIQHNCSRQGPTAPPPPRGPALPGAGSGLPAPDPCDYEGRFSRLHGRPPGFLHCASFGDPHVRSFHHHFHTCRVQGAWPLLDNDFLFVQATSSPMALGANATATRKLTIIFKNMQECIDQKVYQAEVDNLPVAFEDGSINGGDRPGGSSLSIQTANPGNHVEIQAAYIGTTIIIRQTAGQLSFSIKVAEDVAMAFSAEQDLQLCVGGCPPSQRLSRSERNRRGAITIDTARRLCKEGLPVEDAYFHSCVFDVLISGDPNFTVAAQAALEDARAFLPDLEKLHLFPSDAGVPLSSATLLAPLLSGLFVLWLCIQ

SEQ ID NO: 3304 - protein, 313 aa, Homo sapiens
MIQHNCSRQGPTAPPPPRGPALPGAGSGLPAPDPCDYEGRFSRLHGRPPGFLHCASFGDPHVRSFHHHFHTCRVQGAWPLLDNDFLFVQATSSPMALGANATATRKLTIIFKNMQECIDQKVYQAEVDNLPVAFEDGSINGGDRPGGSSLSIQTANPGNHVEIQAAYIGTTIIIRQTAGQLSFSIKVAEDVAMAFSAEQDLQLCVGGCPPSQRLSRSERNRRGAITIDTARRLCKEGLPVEDAYFHSCVFDVLISGDPNFTVAAQAALEDARAFLPDLEKLHLFPSDAGVPLSSATLLAPLLSGLFVLWLCIQ

SEQ ID NO: 3305 - protein, 200 aa, Homo sapiens
MQECIDQKVYQAEVDNLPVAFEDGSINGGDRPGGSSLSIQTANPGNHVEIQAAYIGTTIIIRQTAGQLSFSIKVAEDVAMAFSAEQDLQLCVGGCPPSQRLSRSERNRRGAITIDTARRLCKEGLPVEDAYFHSCVFDVLISGDPNFTVAAQAALEDARAFLPDLEKLHLFPSDAGVPLSSATLLAPLLSGLFVLWLCIQ

SEQ ID NO: 3306 - protein, 540 aa, Homo sapiens
MNGEAICSALPTIPYHKLADLRYLSRGASGTVSSARHADWRVQVAVKHLHIHTPLLDSERKDVLREAEILHKARFSYILPILGICNEPEFLGIVTEYMPNGSLNELLHRKTEYPDVAWPLRFRILHEIALGVNYLHNMTPPLLHHDLKTQNILLDNEFHVKIADFGLSKWRMMSLSQSRSSKSAPEGGTIIYMPPENYEPGQKSRASIKHDIYSYAVITWEVLSRKQPFEDVTNPLQIMYSVSQGHRPVINEESLPYDIPHRARMISLIESGWAQNPDERPSFLKCLIELEPVLRTFEEITFLEAVIQLKKTKLQSVSSAIHLCDKKKMELSLNIPVNHGPQEESCGSSQLHENSGSPETSRSLPAPQDNDFLSRKAQDCYFMKLHHCPGNHSWDSTISGSQRAAFCDHKTTPCSSAIINPLSTAGNSERLQPGIAQQWIQSKREDIVNQMTEACLNQSLDALLSRDLIMKEDYELVSTKPTRTSKVRQLLDTTDIQGEEFAKVIVQKLKDNKQMGLQPYPEILVVSRSPSLNLLQNKSM

SEQ ID NO: 3307 - protein, 403 aa, Homo sapiens
MTPPLLHHDLKTQNILLDNEFHVKIADFGLSKWRMMSLSQSRSSKSAPEGGTIIYMPPENYEPGQKSRASIKHDIYSYAVITWEVLSRKQPFEDVTNPLQIMYSVSQGHRPVINEESLPYDIPHRARMISLIESGWAQNPDERPSFLKCLIELEPVLRTFEEITFLEAVIQLKKTKLQSVSSAIHLCDKKKMELSLNIPVNHGPQEESCGSSQLHENSGSPETSRSLPAPQDNDFLSRKAQDCYFMKLHHCPGNHSWDSTISGSQRAAFCDHKTTPCSSAIINPLSTAGNSERLQPGIAQQWIQSKREDIVNQMTEACLNQSLDALLSRDLIMKEDYELVSTKPTRTSKVRQLLDTTDIQGEEFAKVIVQKLKDNKQMGLQPYPEILVVSRSPSLNLLQNKSM

SEQ ID NO: 3308 - protein, 832 aa, Homo sapiens
MEGDGGTPWALALLRTFDAGEFTGWEKVGSGGFGQVYKVRHVHWKTWLAIKCSPSLHVDDRERMELLEEAKKMEMAKFRYILPVYGICREPVGLVMEYMETGSLEKLLASEPLPWDLRFRIIHETAVGMNFLHCMAPPLLHLDLKPANILLDAHYHVKISDFGLAKCNGLSHSHDLSMDGLFGTIAYLPPERIREKSRLFDTKHDVYSFAIVIWGVLTQKKPFADEKNILHIMVKVVKGHRPELPPVCRARPRACSHLIRLMQRCWQGDPRVRPTFQGNGLNGELIRQVLAALLPVTGRWRSPGEGFRLESEVIIRVTCPLSSPQEITSETEDLCEKPDDEVKETAHDLDVKSPPEPRSEVVPARLKRASAPTFDNDYSLSELLSQLDSGVSQAVEGPEELSRSSSESKLPSSGSGKRLSGVSSVDSAFSSRGSLSLSFEREPSTSDLGTTDVQKKKLVDAIVSGDTSKLMKILQPQDVDLALDSGASLLHLAVEAGQEECAKWLLLNNANPNLSNRRGSTPLHMAVERRVRGVVELLLARKISVNAKDEDQWTALHFAAQNGDESSTRLLLEKNASVNEVDFEGRTPMHVACQHGQENIVRILLRRGVDVSLQGKDAWLPLHYAAWQGHLPIVKLLAKQPGVSVNAQTLDGRTPLHLAAQRGHYRVARILIDLCSDVNVCSLLAQTPLHVAAETGHTSTARLLLHRGAGKEAMTSDGYTALHLAARNGHLATVKLLVEEKADVLARGPLNQTALHLAAAHGHSEVVEELVSADVIDLFDEQGLSALHLAAQGRHAQTVETLLRHGAHINLQSLKFQGGHGPAATLLRRSKT

SEQ ID NO: 3309 - protein, 784 aa, Homo sapiens
MEGDGGTPWALALLRTFDAGEFTGWEKVGSGGFGQVYKVRHVHWKTWLAIKCSPSLHVDDRERMELLEEAKKMEMAKFRYILPVYGICREPVGLVMEYMETGSLEKLLASEPLPWDLRFRIIHETAVGMNFLHCMAPPLLHLDLKPANILLDAHYHVKISDFGLAKCNGLSHSHDLSMDGLFGTIAYLPPERIREKSRLFDTKHDVYSFAIVIWGVLTQKKPFADEKNILHIMVKVVKGHRPELPPVCRARPRACSHLIRLMQRCWQGDPRVRPTFQEITSETEDLCEKPDDEVKETAHDLDVKSPPEPRSEVVPARLKRASAPTFDNDYSLSELLSQLDSGVSQAVEGPEELSRSSSESKLPSSGSGKRLSGVSSVDSAFSSRGSLSLSFEREPSTSDLGTTDVQKKKLVDAIVSGDTSKLMKILQPQDVDLALDSGASLLHLAVEAGQEECAKWLLLNNANPNLSNRRGSTPLHMAVERRVRGVVELLLARKISVNAKDEDQWTALHFAAQNGDESSTRLLLEKNASVNEVDFEGRTPMHVACQHGQENIVRILLRRGVDVSLQGKDAWLPLHYAAWQGHLPIVKLLAKQPGVSVNAQTLDGRTPLHLAAQRGHYRVARILIDLCSDVNVCSLLAQTPLHVAAETGHTSTARLLLHRGAGKEAMTSDGYTALHLAARNGHLATVKLLVEEKADVLARGPLNQTALHLAAAHGHSEVVEELVSADVIDLFDEQGLSALHLAAQGRHAQTVETLLRHGAHINLQSLKFQGGHGPAATLLRRSKT

SEQ ID NO: 3310 - protein, 92 aa, Homo sapiens [sequence omitted]

SEQ ID NO: 3311 - protein, 297 aa, Homo sapiens [sequence omitted]

SEQ ID NO: 3312 - protein, 423 aa, Homo sapiens
MSAQCCAGQLACCCGSAGCSLCCDCCPRIRQSLSTRFMYALYFILVVVLCCIMMSTTVAHKMKEHIPFFEDMCKGIKAGDTCEKLVGYSAVYRVCFGMACFFFIFCLLTLKINNSKSCRAHIHNGFWFFKLLLLGAMCSGAFFIPDQDTFLNAWRYVGAVGGFLFIGIQLLLLVEFAHKWNKNWTAGTASNKLWYASLALVTLIMYSIATGGLVLMAVFYTQKDSCMENKILLGVNGGLCLLISLVAISPWVQNRQPHSGLLQSGVISCYVTYLTFSALSSKPAEVVLDEHGKNVTICVPDFGQDLYRDENLVTILGTSLLIGCILYSCLTSTTRSSSDALQGRYAAPELEIARCCFCFSPGGEDTEEQQPGKEGPRVIYDEKKGTVYIYSYFHFVFFLASLYVMMTVTNWFNHVRSAFHLLP

SEQ ID NO: 3313 - protein, 420 aa, Homo sapiens
MSAQCCAGQLACCCGSAGCSLCCDCCPRIRQSLSTRFMYALYFILVVVLCCIMMSTTVAHKMKEHIPFFEDMCKGIKAGDTCEKLVGYSAVYRVCFGMACFFFIFCLLTLKINNSKSCRAHIHNGFWFFKLLLLGAMCSGAFFIPDQDTFLNAWRYVGAVGGFLFIGIQLLLLVEFAHKWNKNWTAGTASNKLWYASLALVTLIMYSIATGGLVLMAVFYTQKDSCMENKILLGVNGGLCLLISLVAISPWVQNRQPHSGLLQSGVISCYVTYLTFSALSSKPAEVVLDEHGKNVTICVPDFGQDLYRDENLVTILGTSLLIGCILYSCLTSTTRSSSDALQGRYAAPELEIARCCFCFSPGGEDTEEQQPGKEGPRVIYDEKKGTVYIYSYFHFVFFLASLYVMMTVTNWFKSAFHLLP

SEQ ID NO: 3314 - protein, 417 aa, Homo sapiens
MSAQCCAGQLACCCGSAGCSLCCDCCPRIRQSLSTRFMYALYFILVVVLCCIMMSTTVAHKMKEHIPFFEDMCKGIKAGDTCEKLVGYSAVYRVCFGMACFFFIFCLLTLKINNSKSCRAHIHNGFWFFKLLLLGAMCSGAFFIPDQDTFLNAWRYVGAVGGFLFIGIQLLLLVEFAHKWNKNWTAGTASNKLWYASLALVTLIMYSIATGGLVLMAVFYTQKDSCMENKILLGVNGGLCLLISLVAISPWVQNRQPHSGLLQSGVISCYVTYLTFSALSSKPAEVVLDEHGKNVTICVPDFGQDLYRDENLVTILGTSLLIGCILYSCLTSTTRSSSDALQGRYAAPELEIARCCFCFSPGGEDTEEQQPGKEGPRVIYDEKKGTVYIYSYFHFVFFLASLYVMMTVTNWFKNYQC

SEQ ID NO: 3315 - protein, 461 aa, Homo sapiens
MSAQCCAGQLACCCGSAGCSLCCDCCPRIRQSLSTRFMYALYFILVVVLCCIMMSTTVAHKMKEHIPFFEDMCKGIKAGDTCEKLVGYSAVYRVCFGMACFFFIFCLLTLKINNSKSCRAHIHNGFWFFKLLLLGAMCSGAFFIPDQDTFLNAWRYVGAVGGFLFIGIQLLLLVEFAHKWNKNWTAGTASNKLWYASLALVTLIMYSIATGGLVLMAVFYTQKDSCMENKILLGVNGGLCLLISLVAISPWVQNRQPHSGLLQSGVISCYVTYLTFSALSSKPAEVVLDEHGKNVTICVPDFGQDLYRDENLVTILGTSLLIGCILYSCLTSTTRSSSDALQGRYAAPELEIARCCFCFSPGGEDTEEQQPGKEGPRVIYDEKKGTVYIYSYFHFVFFLASLYVMMTVTNWFNYESANIESFFSGSWSIFWVKMASCWICVLLYLCTLVAPLCCPTREFSV

SEQ ID NO: 3316 - protein, 432 aa, Homo sapiens
MSDKLPYKVADIGLAAWGRKALDIAENEMPGLMRMRERYSASKPLKGARIAGCLHMTVETAVLIETLVTLGAEVQWSSCNIFSTQDHAAAAIAKAGIPVYAWKGETDEEYLWCIEQTLYFKDGPLNMILDDGGDLTNLIHTKYPQLLPGIRGISEETTTGVHNLYKMMANGILKVPAINVNDSVTKSKFDNLYGCRESLIDGIKRATDVMIAGKVAVVAGYGDVGKGCAQALRGFGARVIITEIDPINALQAAMEGYEVTTMDEACQEGNIFVTTTGCIDIILGRHFEQMKDDAIVCNIGHFDVEIDVKWLNENAVEKVNIKPQVDRYRLKNGRRIILLAEGRLVNLGCAMGHPSFVMSNSFTNQVMAQIELWTHPDKYPVGVHFLPKKLDEAVAEAHLGKLNVKLTKLTEKQAQYLGMSCDGPFKPDHYRY

SEQ ID NO: 3317 - protein, 404 aa, Homo sapiens
MPGLMRMRERYSASKPLKGARIAGCLHMTVETAVLIETLVTLGAEVQWSSCNIFSTQDHAAAAIAKAGIPVYAWKGETDEEYLWCIEQTLYFKDGPLNMILDDGGDLTNLIHTKYPQLLPGIRGISEETTTGVHNLYKMMANGILKVPAINVNDSVTKSKFDNLYGCRESLIDGIKRATDVMIAGKVAVVAGYGDVGKGCAQALRGFGARVIITEIDPINALQAAMEGYEVTTMDEACQEGNIFVTTTGCIDIILGRHFEQMKDDAIVCNIGHFDVEIDVKWLNENAVEKVNIKPQVDRYRLKNGRRIILLAEGRLVNLGCAMGHPSFVMSNSFTNQVMAQIELWTHPDKYPVGVHFLPKKLDEAVAEAHLGKLNVKLTKLTEKQAQYLGMSCDGPFKPDHYRY

SEQ ID NO: 3318 - protein, 643 aa, Homo sapiens
MEAVETGERPTFGAWDYGVFALMLLVSTGIGLWVGLARGGQRSAEDFFTGGRRLAALPVGLSLSASFMSAVQVLGVPSEAYRYGLKFLWMCLGQLLNSVLTALLFMPVFYRLGLTSTYEYLEMRFSRAVRLCGTLQYIVATMLYTGIVIYAPALILNQVTGLDIWASLLSTGIICTFYTAVGGMKAVVWTDVFQVVVMLSGFWVVLARGVMLVGGPRQVLTLAQNHSRINLMDFNPDPRSRYTFWTFVVGGTLVWLSMYGVNQAQVQRYVACRTEKQAKLALLINQVGLFLIVSSAACCGIVMFVFYTDCDPLLLGRISAPDQYMPLLVLDIFEDLPGVPGLFLACAYSGTLSTASTSINAMAAVTVEDLIKPRLRSLAPRKLVIISKGLSLIYGSACLTVAALSSLLGGGVLQGSFTVMGVISGPLLGAFILGMFLPACNTPGVLAGLGAGLALSLWVALGATLYPPSEQTMRVLPSSAARCVALSVNASGLLDPALLPANDSSRAPSSGMDASRPALADSFYAISYLYYGALGTLTTVLCGALISCLTGPTKRSTLAPGLLWWDLARQTASVAPKEEVAILDDNLVKGPEELPTGNKKPPGFLPTNEDRLFFLGQKELEGAGSWTPCVGHDGGRDQQETNL

SEQ ID NO: 3319 - protein, 370 aa, Homo sapiens
MDAPRQVVNFGPGPAKLPHSVLLEIQKELLDYKGVGISVLEMSHRSSDFAKIINNTENLVRELLAVPDNYKVIFLQGGGCGQFSAVPLNLIGLKAGRCADYVVTGAWSAKAAEEAKKFGTINIVHPKLGSYTKIPDPSTWNLNPDASYVYYCANETVHGVEFDFIPDVKGAVLVCDMSSNFLSKPVDVSKFGVIFAGAQKNVGSAGVTVVIVRDDLLGFALRECPSVLEYKVQAGNSSLYNTPPCFSIYVMGLVLEWIKNNGGAAAMEKLSSIKSQTIYEIIDNSQGFYVCPVEPQNRSKMNIPFRIGNAKGDDALEKRFLDKALELNMLSLKGHRSVGGIRASLYNAVTIEDVQKLAAFMKKFLEMHQL

SEQ ID NO: 3320 - protein, 324 aa, Homo sapiens
MDAPRQVVNFGPGPAKLPHSVLLEIQKELLDYKGVGISVLEMSHRSSDFAKIINNTENLVRELLAVPDNYKVIFLQGGGCGQFSAVPLNLIGLKAGRCADYVVTGAWSAKAAEEAKKFGTINIVHPKLGSYTKIPDPSTWNLNPDASYVYYCANETVHGVEFDFIPDVKGAVLVCDMSSNFLSKPVDVSKFGVIFAGAQKNVGSAGVTVVIVRDDLLGFALRECPSVLEYKVQAGNSSLYNTPPCFSIYVMGLVLEWIKNNGGAAAMEKLSSIKSQTIYEIIDNSQGFYVSVGGIRASLYNAVTIEDVQKLAAFMKKFLEMHQL

SEQ ID NO: 3321 - protein, 408 aa, Homo sapiens
MIPPEQPQQQLQPPSPAPPNHVVTTIENLPAEGSGGGGSLSASSRAGVRQRIRKVLNREMLISVALGQVLSLLICGIGLTSKYLSEDFHANTPVFQSFLNYILLFLVYTTTLAVRQGEENLLAILRRRWWKYMILGLIDLEANYLVVKAYQYTTLTSIQLLDCFVIPVVILLSWFFLLIRYKAVHFIGIVVCILGMGCMVGADVLVGRHQGAGENKLVGDLLVLGGATLYGISNVWEEYIIRTLSRVEFLGMIGLFGAFFSGIQLAIMEHKELLKVPWDWQIGLLYVGFSACMFGLYSFMPVVIKKTSATSVNLSLLTADLYSLFCGLFLFHYKFSGLYLLSFFTILIGLVLYSSTSTYIAQDPRVYKQFRNPSGPVVDLPTTAQVEPSVTYTSLGQETEEEPHVRVA

SEQ ID NO: 3322 - protein, 349 aa, Homo sapiens
MLISVALGQVLSLLICGIGLTSKYLSEDFHANTPVFQSFLNYILLFLVYTTTLAVRQGEENLLAILRRRWWKYMILGLIDLEANYLVVKAYQYTTLTSIQLLDCFVIPVVILLSWFFLLIRYKAVHFIGIVVCILGMGCMVGADVLVGRHQGAGENKLVGDLLVLGGATLYGISNVWEEYIIRTLSRVEFLGMIGLFGAFFSGIQLAIMEHKELLKVPWDWQIGLLYVGFSACMFGLYSFMPVVIKKTSATSVNLSLLTADLYSLFCGLFLFHYKFSGLYLLSFFTILIGLVLYSSTSTYIAQDPRVYKQFRNPSGPVVDLPTTAQVEPSVTYTSLGQETEEEPHVRVA

SEQ ID NO: 3323 - protein, 504 aa, Homo sapiens
MEAPLQTEMVELVPNGKHSEGLLPVITPMAGNQRVEDPARSCMEGKSFLQKSPSKEPHFTDFEGKTSFGMSVFNLSNAIMGSGILGLAYAMANTGIILFLFLLTAVALLSSYSIHLLLKSSGVVGIRAYEQLGYRAFGTPGKLAAALAITLQNIGAMSSYLYIIKSELPLVIQTFLNLEEKTSDWYMNGNYLVILVSVTIILPLALMRQLGYLGYSSGFSLSCMVFFLIAVIYKKFHVPCPLPPNFNNTTGNFSHVEIVKEKVQLQVEPEASAFCTPSYFTLNSQTAYTIPIMAFAFVCHPEVLPIYTELKDPSKKKMQHISNLSIAVMYIMYFLAALFGYLTFYNGVESELLHTYSKVDPFDVLILCVRVAVLTAVTLTVPIVLFPVRRAIQQMLFPNQEFSWLRHVLIAVGLLTCINLLVIFAPNILGIFGVIGATSAPFLIFIFPAIFYFRIMPTEKEPARSTPKILALCFAMLGFLLMTMSLSFIIIDWASGTSRHGGNH

SEQ ID NO: 3324 - protein, 509 aa, Homo sapiens
MAKWLNKYFSLGNSKTKSPPQPPRPDYREQRRRGERPSQPPQAVPQASSAASASCGPATASCFSASSGSLPDDSGSTSDLIRAYRAQKERDFEDPYNGPGSSLRKLRAMCRLDYCGGSGEPGGVQRAFSASSASGAAGCCCASSGAGAAASSSSSSGSPHLYRSSSERRPATPAEVRYISPKHRLIKVESAAGGGAGDPLGGACAGGRTWSPTACGGKKLLNKCAASAAEESGAGKKDKVTIADDYSDPFDAKNDLKSKAGKGESAGYMEPYEAQRIMTEFQRQESVRSQHKGIQLYDTPYEPEGQSVDSDSESTVSPRLRESKLPQDDDRPADEYDQPWEWNRVTIPALAAQFNGNEKRQSSPSPSRDRRRQLRAPGGGFKPIKHGSPEFCGILGERVDPAVPLEKQIWYHGAISRGDAENLLRLCKECSYLVRNSQTSKHDYSLSLRSNQGFMHMKLAKTKEKYVLGQNSPPFDSVPEVIHYYTTRKLPIKGAEHLSLLYPVAVRTL

SEQ ID NO: 3325 - protein, 297 aa, Homo sapiens
MAKWLNKYFSLGNSKTKSPPQPPRPDYREQRRRGERPSQPPQAVPQASSAASASCGPATASCFSASSGSLPDDSGSTSDLIRAYRAQKERDFEDPYNGPGSSLRKLRAMCRLDYCGGSGEPGGVQRAFSASSASGAAGCCCASSGAGAAASSSSSSGSPHLYRSSSERRPATPAEVRYISPKHRLIKVESAAGGGAGDPLGGACAGGRTWSPTACGGKKLLNKCAASAAEESGAGKKDKVTIADDYSDPFDAKNDLKSKAGKGESAGYMEPYEAQRIMTGLQEAWRHSPSGCFPVGP

SEQ ID NO: 3326 - protein, 417 aa, Homo sapiens
MASYLYGVLFAVGLCAPIYCVSPANAPSAYPRPSSTKSTPASQVYSLNTDFAFRLYRRLVLETPSQNIFFSPVSVSTSLAMLSLGAHSVTKTQILQGLGFNLTHTPESAIHQGFQHLVHSLTVPSKDLTLKMGSALFVKKELQLQANFLGNVKRLYEAEVFSTDFSNPSIAQARINSHVKKKTQGKVVDIIQGLDLLTAMVLVNHIFFKAKWEKPFHPEYTRKNFPFLVGEQVTVHVPMMHQKEQFAFGVDTELNCFVLQMDYKGDAVAFFVLPSKGKMRQLEQALSARTLRKWSHSLQKRWIEVFIPRFSISASYNLETILPKMGIQNVFDKNADFSGIAKRDSLQVSKATHKAVLDVSEEGTEATAATTTKFIVRSKDGPSYFTVSFNRTFLMMITNKATDGILFLGKVENPTKS

SEQ ID NO: 3327 - protein, 335 aa, Homo sapiens
MQGQGRRRGTCKDIFCSKMASYLYGVLFAVGLCAPIYCVSPANAPSAYPRPSSTKSTPASQVYSLNTDFAFRLYRRLVLETPSQNIFFSPARINSHVKKKTQGKVVDIIQGLDLLTAMVLVNHIFFKAKWEKPFHPEYTRKNFPFLVGEQVTVHVPMMHQKEQFAFGVDTELNCFVLQMDYKGDAVAFFVLPSKGKMRQLEQALSARTLRKWSHSLQKRWIEVFIPRFSISASYNLETILPKMGIQNVFDKNADFSGIAKRDSLQVSKATHKAVLDVSEEGTEATAATTTKFIVRSKDGPSYFTVSFNRTFLMMITNKATDGILFLGKVENPTKS

SEQ ID NO: 3328 - protein, 201 aa, Homo sapiens
MRSAGGRGEIKVRRELQPSKQVSGLTNHARTGQEKRNLQRHILFQNGILPLWSTLCCWPLCSNLLCVPGQCPQCIPPPFLHKEHPCLTGVFPQHRLCLPPIPQAGFGDPESEHLLLPCECLHFPGHALPWGPLSHQDPDSPGPGLQPHTHTRVCHPPGLPAPGSLTDCSQQRPDLEDGKCPLRQEGAAAAGKFLGQCQEAV

SEQ ID NO: 3329 - protein, 334 aa, Homo sapiens
MRSAGGRGEIKVRRELQPSKQVSGLTNHARTGQEKRNLQRLVLETPSQNIFFSPVSVSTSLAMLSLGAHSVTKTQILQGLGFNLTHTPESAIHQGFQHLVHSLTVPSKDLTLKMGSALFVKKELQLQANFLGNVKRLYEAEVFSTDFSNPSIAQARINSHVKKKTQGKVVDIIQGLDLLTAMVLVNHIFFKAKWEKPFHPEYTRKNFPFLVGEQVTVHVPMMHQKEQFAFGVDTELNCFVLQMDYKGDAVAFFVLPSKGKMRQLEQALSARTLRKWSHSLQKRWIEVFIPRFSISASYNLETILPKMGIQNVFDKNADFSGIAKRDSLQVSKVS

SEQ ID NO: 3330 - protein, 286 aa, Homo sapiens
MGSALFVKKELQLQANFLGNVKRLYEAEVFSTDFSNPSIAQARINSHVKKKTQGKVVDIIQGLDLLTAMVLVNHIFFKAKWEKPFHPEYTRKNFPFLVGEQVTVHVPMMHQKEQFAFGVDTELNCFVLQMDYKGDAVAFFVLPSKGKMRQLEQALSARTLRKWSHSLQKRWIEVFIPRFSISASYNLETILPKMGIQNVFDKNADFSGIAKRDSLQVSKATHKAVLDVSEEGTEATAATTTKFIVRSKDGPSYFTVSFNRTFLMMITNKATDGILFLGKVENPTKS

SEQ ID NO: 3331 - protein, 337 aa, Homo sapiens
MLSLGAHSVTKTQILQGLGFNLTHTPESAIHQGFQHLVHSLTVPSKDLTLKMGSALFVKKELQLQANFLGNVKRLYEAEVFSTDFSNPSIAQARINSHVKKKTQGKVVDIIQGLDLLTAMVLVNHIFFKAKWEKPFHPEYTRKNFPFLVGEQVTVHVPMMHQKEQFAFGVDTELNCFVLQMDYKGDAVAFFVLPSKGKMRQLEQALSARTLRKWSHSLQKRWIEVFIPRFSISASYNLETILPKMGIQNVFDKNADFSGIAKRDSLQVSKATHKAVLDVSEEGTEATAATTTKFIVRSKDGPSYFTVSFNRTFLMMITNKATDGILFLGKVENPTKS

SEQ ID NO: 3332 - protein, 435 aa, Homo sapiens
MQGQGRRRGTCKDIFCSKMASYLYGVLFAVGLCAPIYCVSPANAPSAYPRPSSTKSTPASQVYSLNTDFAFRLYRRLVLETPSQNIFFSPVSVSTSLAMLSLGAHSVTKTQILQGLGFNLTHTPESAIHQGFQHLVHSLTVPSKDLTLKMGSALFVKKELQLQANFLGNVKRLYEAEVFSTDFSNPSIAQARINSHVKKKTQGKVVDIIQGLDLLTAMVLVNHIFFKAKWEKPFHPEYTRKNFPFLVGEQVTVHVPMMHQKEQFAFGVDTELNCFVLQMDYKGDAVAFFVLPSKGKMRQLEQALSARTLRKWSHSLQKRWIEVFIPRFSISASYNLETILPKMGIQNVFDKNADFSGIAKRDSLQVSKATHKAVLDVSEEGTEATAATTTKFIVRSKDGPSYFTVSFNRTFLMMITNKATDGILFLGKVENPTKS

SEQ ID NO: 3333 - protein, 224 aa, Homo sapiens
MESGAYGAAKAGGSFDLRRFLTQPQVVARAVCLVFALIVFSCIYGEGYSNAHESKQMYCVFNRNEDACRYGSAIGVLAFLASAFFLVVDAYFPQISNATDRKYLVIGDLLFSALWTFLWFVGFCFLTNQWAVTNPKDVLVGADSVRAAITFSFFSIFSWGVLASLAYQRYKAGVDDFIQNYVDPTPDPNTAYASYPGASVDNYQQPPFTQNAETTEGYQPPPVY

SEQ ID NO: 3334 - protein, 275 aa, Homo sapiens
MESGAYGAAKAGGSFDLRRFLTQPQVVARAVCLVFALIVFSCIYGEGYSNAHESKQMYCVFNRNEDACRYGSAIGVLAFLASAFFLVVDAYFPQISNATDRKYLVIGDLLFSALWTFLWFVGFCFLTNQWAVTNPKDVLVGADSVRAAITFSFFSIFSWVGWPGAGSWVKGGGGWGPPPTCTLLCSPCRVCWPPWPTSATRLAWTTSSRITLTPLRTPTLPTPPTQVHLWTTTNSHPSPRTRRPPRATSRPLCTERRLAWEGGQRGPSPLPWTFP

SEQ ID NO: 3335 - protein, 894 aa, Homo sapiens
MESTLSASNMQDPSSSPLEKCLGSANGNGDLDSEEGSSLEETGFNWGEYLEETGASAAPHTSFKHVEISIQSNFQPGMKLEVANKNNPDTYWVATIITTCGQLLLLRYCGYGEDRRADFWCDVVIADLHPVGWCTQNNKVLMPPDAIKEKYTDWTEFLIRDLTGSRTAPANLLEGPLRGKGPIDLITVGSLIELQDSQNPFQYWIVSVIENVGGRLRLRYVGLEDTESYDQWLFYLDYRLRPVGWCQENKYRMDPPSEIYPLKMASEWKCTLEKSLIDAAKFPLPMEVFKDHADLRSHFFTVGMKLETVNMCEPFYISPASVTKVFNNHFFQVTIDDLRPEPSKLSMLCHADSLGILPVQWCLKNGVSLTPPKGYSGQDFDWADYHKQHGAQEAPPFCFRNTSFSRGFTKNMKLEAVNPRNPGELCVASVVSVKGRLMWLHLEGLQTPVPEVIVDVESMDIFPVGWCEANSYPLTAPHKTVSQKKRKIAVVQPEKQLPPTVPVKKIPHDLCLFPHLDTTGTVNGKYCCPQLFINHRCFSGPYLNKGRIAELPQSVGPGKCVLVLKEVLSMIINAAYKPGRVLRELQLVEDPHWNFQEETLKAKYRGKTYRAVVKIVRTSDQVANFCRRVCAKLECCPNLFSPVLISENCPENCSIHTKTKYTYYYGKRKKISKPPIGESNPDSGHPKPARRRKRRKSIFVQKKRRSSAVDFTAGSGEESEEEDADAMDDDTASEETGSELRDDQTDTSSAEVPSARPRRAVTLRSGSEPVRRPPPERTRRGRGAPAASSAEEGEKCPPTKPEGTEDTKQEEEERLVLESNPLEWTVTDVVRFIKLTDCAPLAKIFQEQDIDGQALLLLTLPTVQECMELKLGPAIKLCHQIERVKVAFYAQYAN

SEQ ID NO: 3336 - protein, 265 aa, Homo sapiens; identical to SEQ ID NO: 1791

SEQ ID NO: 3337 - protein, 291 aa, Homo sapiens
MVREQYTTATEGICIERPENQYVYKIGIYGWRKRCLYLFVLLLLIILVVNLALTIWILKVMWFSPAGMGHLCVTKDGLRLEGESEFLFPLYAKEIHSRVDSSLLLQSTQNVTVNARNSEGEVTGRLKVGPKMVEVQNQQFQINSNDGKPLFTVDEKEVVVGTDKLRVTGPEGALFEHSVETPLVRADPFQDLRLESPTRSLSMDAPRGVHIQAHAGKIEALSQMDILFHSSDGMLVLDAETVCLPKLVQGTWGPSGSSQSLYEICVCPDGKLYLSVAGVSTTCQEHNHICL

SEQ ID NO: 3338 - protein, 226 aa, Homo sapiens
MDAGKAGQTLKTHCSAQRPDVCRWLSPFILSCCVYFCLWIPEDQLSWFAALVKCLPVLCLAGFLWVMSPSGGYTQLLQGALVCSAVGDACLIWPAAFVPGMAAFATAHLLYVWAFGFSPLQPGLLLLIILAPGPYLSLVLQHLEPDMVLPVAAYGLILMAMLWRGLAQGGSAGWGALLFTLSDGVLAWDTFAQPLPHAHLVIMTTYYAAQLLITLSALRSPVPKTD

SEQ ID NO: 3339 - protein, 276 aa, Homo sapiens
MGCGPSQPAEDRRRVRAPKKGWKEEFKADVSVPHTGENCSPRMEAALTKNTVDIAEGLEQVQMGSLPGTISENSPSPSERNRRVNSDLVTNGLINKPQSLESRERQKSSDILEELIVQGIIQSHSKVFRNGESYDVTLTTTEKPLRKPPSRLKKLKIKKQVKDFTMKDIEEKMEAAEERRKTKEEEIRKRLRSDRLLPSANHSDSAELDGAEVAFAKGLQRVRSAGFEPSDLQGGKPLKRKKSKCDATLIDRNESDESFGVVESDMSYNQADDIVY

SEQ ID NO: 3340 - protein, 302 aa, Homo sapiens
MALHDMEDFTFDGTKRLSVNYVKGILQPTDTCDIWDKIWNFQAKPDDLLISTYPKAGTTWTQEIVELIQNEGDVEKSKRAPTHQRFPFLEMKIPSLGSGLEQAHAMPSPRILKTHLPFHLLPPSLLEKNCKIIYVARNPKDNMVSYYHFQRMNKALPAPGTWEEYFETFLAGKVCWGSWHEHVKGWWEAKDKHRILYLFYEDMKKNPKHEIQKLAEFIGKKLDDKVLDKIVHYTSFDVMKQNPMANYSSIPAEIMDHSISPFMRKGAVGDWKKHFTVAQNERFDEDYKKKMTDTRLTFHFQF

SEQ ID NO: 3341 - protein, 227 aa, Homo sapiens
MALHDMEDFTFDGTKRLSVNYVKGILQPTDTCDIWDKIWNFQAKPDDLLISTYPKAGTTWTQEIVELIQNEGDVEKSKRAPTHQRFPFLEMKIPSLGSVCWGSWHEHVKGWWEAKDKHRILYLFYEDMKKNPKHEIQKLAEFIGKKLDDKVLDKIVHYTSFDVMKQNPMANYSSIPAEIMDHSISPFMRKGAVGDWKKHFTVAQNERFDEDYKKKMTDTRLTFHFQF

SEQ ID NO: 3342 - protein, 224 aa, Homo sapiens
MPRPGSAQRWAAVAGRWGCRLLALLLLVPGPGGASEITFELPDNAKQCFYEDIAQGTKCTLEFQVITGGHYDVDCRLEDPDGKVLYKEMKKQYDSFTFTASKNGTYKFCFSNEFSTFTHKTVYFDFQVGEDPPLFPSENRVSALTQMESACVSIHEALKSVIDYQTHFRLREAQGRSRAEDLNTRVAYWSVGEALILLVVSIGQVFLLKSFFSDKRTTTTRVGS

SEQ ID NO: 3343 - protein, 188 aa, Homo sapiens
MPRPGSAQRWAAVAGRWGCRLLALLLLVPGPGGASEITFELPDNAKQCFYEDIAQGTKCTLEFQVITGGHYDVDCRLEDPDGKVLYKEMKKQYDSFTFTASKNGTYKFCFSNEFSTFTHKTVYFDFQVGEDPPLFPSENRVSALTQMESACVSIHEALKSVIDYQTHFRLREAQGRSRAEDLNTRVAY

SEQ ID NO: 3344 - protein, 1254 aa, Homo sapiens
MKKHRRALALVSCLFLCSLVWLPSWRVCCKESSSASASSYYSQDDNCALENEDVQFQKKDEREGPINAESLGKSGSNLPISPKEHKLKDDSIVDVQNTESKKLSPPVVETLPTVDLHEESSNAVVDSETVENISSSSTSEITPISKLDEIEKSGTIPIAKPSETEQSETDCDVGEALDASAPIEQPSFVSPPDSLVGQHIENVSSSHGKGKITKSEFESKVSASEQGGGDPKSALNASDNLKNESSDYTKPGDIDPTSVASPKDPEDIPTFDEWKKKVMEVEKEKSQSMHASSNGGSHATKKVQKNRNNYASVECGAKILAANPEAKSTSAILIENMDLYMLNPCSTKIWFVIELCEPIQVKQLDIANYELFSSTPKDFLVSISDRYPTNKWIKLGTFHGRDERNVQSFPLDEQMYAKYVKMFIKYIKVELLSHFGSEHFCPLSLIRVFGTSMVEEYEEIADSQYHSERQELFDEDYDYPLDYNTGEDKSSKNLLGSATNAILNMVNIAANILGAKTEDLTEGNKSISENATATAAPKMPESTPVSTPVPSPEYVTTEVHTHDMEPSTPDTPKESPIVQLVQEEEEEASPSTVTLLGSGEQEDESSPWFESETQIFCSELTTICCISSFSEYIYKWCSVRVALYRQRSRTALSKGKDYLVLAQPPLLLPAESVDVSVLQPLSGELENTNIEREAETVVLGDLSSSMHQDDLVNHTVDAVELEPSHSQTLSQSLLLDITPEINPLPKIEVSESVEYEAGHIPSPVIPQESSVEIDNETEQKSESFSSIEKPSITYETNKVNELMDNIIKEDVNSMQIFTKLSETIVPPINTATVPDNEDGEAKMNIADTAKQTLISVVDSSSLPEVKEEEQSPEDALLRGLQRTATDFYAELQNSTDLGYANGNLVHGSNQKESVFMRLNNRIKALEVNMSLSGRYLEELSQRYRKQMEEMQKAFNKTIVKLQNTSRIAEEQDQRQTEAIQLLQAQLTNMTQLVSNLSATVAELKREVSDRQSYLVISLVLCVVLGLMLCMQRCRNTSQFDGDYISKLPKSNQYPSPKRCFSSYDDMNLKRRTSFPLMRSKSLQLTGKEVDPNDLYIVEPLKFSPEKKKKRCKYKIEKIETIKPEEPLHPIANGDIKGRKPFTNQRDFSNMGEVYHSSYKGPPSEGSSETSSQSEESYFCGISACTSLCNGQSQKTKTEKRALKRRRSKVQDQGKLIKTLIQTKSGSLPSLHDIIKGNKEITVGTFGVTAVSGHI

SEQ ID NO: 3345 - protein, 1405 aa, Homo sapiens
MRGFLARPFLSTNQHLAQWGSPLPQGKGLVQLPSQHTRHSRPFHELCSKEENSATVPKLISLVVSSETIDFSNKTMDSRRDWEREKRILEGKLQLPKALARTQRARDEGRAWTSRWLQRRRSPESCEAPLSAPLWGPQRGLPGREPLRSRSASAIALRTIGHILALLLRLLHLGLGSGGCREDVPPSGRGKKEEKMKKHRRALALVSCLFLCSLVWLPSWRVCCKESSSASASSYYSQDDNCALENEDVQFQKKNTESKKLSPPVVETLPTVDLHEESSNAVVDSETVENISSSSTSEITPISKLDEIEKSGTIPIAKPSETEQSETDCDVGEALDASAPIEQPSFVSPPDSLVGQHIENVSSSHGKGKITKSEFESKVSASEQGGGDPKSALNASDNLKNESSDYTKPGDIDPTSVASPKDPEDIPTFDEWKKKVMEVEKEKSQSMHASSNGGSHATKKVQKNRNNYASVECGAKILAANPEAKSTSAILIENMDLYMLNPCSTKIWFVIELCEPIQVKQLDIANYELFSSTPKDFLVSISDRYPTNKWIKLGTFHGRDERNVQSFPLDEQMYAKYVKVELLSHFGSEHFCPLSLIRVFGTSMVEEYEEIADSQYHSERQELFDEDYDYPLDYNTGEDKSSKNLLGSATNAILNMVNIAANILGAKTEDLTEGNKSISENATATAAPKMPESTPVSTPVPSPEYVTTEVHTHDMEPSTPDTPKESPIVQLVQEEEEEASPSTVTLLGSGEQEDESSPWFESETQIFCSELTTICCISSFSEYIYKWCSVRVALYRQRSRTALSKGKDYLVLAQPPLLLPAESVDVSVLQPLSGELENTNIEREAETVVLGDLSSSMHQDDLVNHTVDAVELEPSHSQTLSQSLLLDITPEINPLPKIEVSESVEYEAGHIPSPVIPQESSVEIDNETEQKSESFSSIEKPSITYETNKVNELMDNIIKEDVNSMQIFTKLSETIVPPINTATVPDNEDGEAKMNIADTAKQTLISVVDSSSLPEVKEEEQSPEDALLRGLQRTATDFYAELQNSTDLGYANGNLVHGSNQKESVFMRLNNRIKALEVNMSLSGRYLEELSQRYRKQMEEMQKAFNKTIVKLQNTSRIAEEQDQRQTEAIQLLQAQLTNMTQLVSNLSATVAELKREVSDRQSYLVISLVLCVVLGLMLCMQRCRNTSQFDGDYISKLPKSNQYPSPKRCFSSYDDMNLKRRTSFPLMRSKSLQLTGKEVDPNDLYIVEPLKFSPEKKKKRCKYKIEKIETIKPEEPLHPIANGDIKGRKPFTNQRDFSNMGEVYHSSYKGPPSEGSSETSSQSEESYFCGISACTSLCNGQSQKTKTEKRALKRRRSKVQDQGKLIKTLIQTKSGSLPSLHDIIKGNKEITVGTFGVTAVSGHI

SEQ ID NO: 3346 - protein, 870 aa, Homo sapiens
MGPPSLVLCLLSATVFSLLGGSSAFLSHHRLKGRFQRDRRNIRPNIILVLTDDQDVELGSMQVMNKTRRIMEQGGAHFINAFVTTPMCCPSRSSILTGKYVHNHNTYTNNENCSSPSWQAQHESRTFAVYLNSTGYRTAFFGKYLNEYNGSYVPPGWKEWVGLLKNSRFYNYTLCRNGVKEKHGSDYSKDYLTDLITNDSVSFFRTSKKMYPHRPVLMVISHAAPHGPEDSAPQYSRLFPNASQHITPSYNYAPNPDKHWIMRYTGPMKPIHMEFTNMLQRKRLQTLMSVDDSMETIYNMLVETGELDNTYIVYTADHGYHIGQFGLVKGKSMPYEFDIRVPFYVRGPNVEAGCLNPHIVLNIDLAPTILDIAGLDIPADMDGKSILKLLDTERPVNRFHLKKKMRVWRDSFLVERGKLLHKRDNDKVDAQEENFLPKYQRVKDLCQRAEYQTACEQLGQKWQCVEDATGKLKLHKCKGPMRLGGSRALSNLVPKYYGQGSEACTCDSGDYKLSLAGRRKKLFKKKYKASYVRSRSIRSVAIEVDGRVYHVGLGDAAQPRNLTKRHWPGAPEDQDDKDGGDFSGTGGLPDYSAANPIKVTHRCYILENDTVQCDLDLYKSLQAWKDHKLHIDHEIETLQNKIKNLREVRGHLKKKRPEECDCHKISYHTQHKGRLKHRGSSLHPFRKGLQEKDKVWLLREQKRKKKLRKLLKRLQNNDTCSMPGLTCFTHDNQHWQTAPFWTLGPFCACTSANNNTYWCMRTINETHNFLFCEFATGFLEYFDLNTDPYQLMNAVNTLDRDVLNQLHVQLMELRSCKGYKQCNPRTRNMDLGLKDGGSYEQYRQFQRRKWPEMKRPSSKSLGQLWEGWEG

SEQ ID NO: 3347 - protein, 867 aa, Homo sapiens
MGPPSLVLCLLSATVFSLLGGSSAFLSHHRLKGRFQRDRRNIRPNIILVLTDDQDVELGSMQVMNKTRRIMEQGGAHFINAFVTTPMCCPSRSSILTGKYVHNHNTYTNNENCSSPSWQAQHESRTFAVYLNSTGYRTAFFGKYLNEYNGSYVPPGWKEWVGLLKNSRFYNYTLCRNGVKEKHGSDYSKDYLTDLITNDSVSFFRTSKKMYPHRPVLMVISHAAPHGPEDSAPQYSRLFPNASQHITPSYNYAPNPDKHWIMRYTGPMKPIHMEFTNMLQRKRLQTLMSVDDSMETIYNMLVETGELDNTYIVYTADHGYHIGQFGLVKGKSMPYEFDIRVPFYVRGPNVEAGCLNPHIVLNIDLAPTILDIAGLDIPADMDGKSILKLLDTERPVNRFHLKKKMRVWRDSFLVERGKLLHKRDNDKVDAQEENFLPKYQRVKDLCQRAEYQTACEQLGQKWQCVEDATGKLKLHKCKGPMRLGGSRALSNLVPKYYGQGSEACTCDSGDYKLSLAGRRKKLFKKKYKASYVRSRSIRSVAIEVDGRVYHVGLGDAAQPRNLTKRHWPGAPEDQDDKDGGDFSGTGGLPDYSAANPIKVTHRCYILENDTVQCDLDLYKSLQAWKDHKLHIDHEIETLQNKIKNLREVRGHLKKKRPEECDCHKISYHTQHKGRLKHRGSSLHPFRKGLQEKDKVWLLREQKRKKKLRKLLKRLQNNDTCSMPGLTCFTHDNQHWQTAPFWTLGPFCACTSANNNTYWCMRTINETHNFLFCEFATGFLEYFDLNTDPYQLMNAVNTLDRDVLNQLHVQLMELRSCKGYKQCNPRTRNMDLDGGSYEQYRQFQRRKWPEMKRPSSKSLGQLWEGWEG

SEQ ID NO: 3348 - protein, 575 aa, Homo sapiens
MADRGGVGEAAAVGASPASVPGLNPTLGWRERLRAGLAGTGASLWFVAGLGLLYALRIPLRLCENLAAVTVFLNSLTPKFYVALTGTSSLISGLIFIFEWWYFHKHGTSFIEQVSVSHLQPLMGGTESSISEPGSPSRNRENETSRQNLSECKVWRNPLNLFRGAEYRRYTWVTGKEPLTYYDMNLSAQDHQTFFTCDTDFLRPSDTVMQKAWRERNPPARIKAAYQALELNNDCATAYVLLAEEEATTIVDAERLFKQALKAGETIYRQSQQCQHQSPQHEAQLRRDTNVLVYIKRRLAMCARKLGRIREAVKIMRDLMKEFPPLTMLNIHENLLESLLELQAYPDVQAVLAKYDDISLPKSAAICYTAALLKTRTVSEKFSPETASRRGLSTAEINAVEAIHRAVEFNPHVPKYLLEMKSLILPPEHILKRGDSEAIAYAFFHLQHWKRIEGALNLLQCTWEGTFRMIPYPLEKGHLFYPYPSCTETADRELLPTFHHVSVYPKKELPLFIHFTAGFCSSTAMIAILTHQFPEIMGIFAKAVLGLWCPQPWASSGFEENTQDLKSEDLGLSSG

SEQ ID NO: 3349 - protein, 544 aa, Homo sapiens
MADRGGVGEAAAVGASPASVPGLNPTLGWRERLRAGLAGTGASLWFVAGLGLLYALRIPLRLCENLAAVTVFLNSLTPKFYVALTGTSSLISGLIFIFEWWYFHKHGTSFIEQVSVSHLQPLMGGTESSISEPGSPSRNRENETSRQNLSECKVWRNPLNLFRGAEYRRYTWVTGKEPLTYYDMNLSAQDHQTFFTCDTDFLRPSDTVMQKAWRERNPPARIKAAYQALELNNDCATAYVLLAEEEATTIVDAERLFKQALKAGETIYRQSQQCQHQSPQHEAQLRRDTNVLVYIKRRLAMCARKLGRIREAVKIMRDLMKEFPPLTMLNIHENLLESLLELQAYPDVQAVLAKYDDISLPKSAAICYTAALLKTRTVSEKFSPETASRRGLSTAEINAVEAIHRAVEFNPHVPKYLLEMKSLILPPEHILKRGDSEAIAYAFFHLQHWKRIEGALNLLQCTWEGTFHHVSVYPKKELPLFIHFTAGFCSSTAMIAILTHQFPEIMGIFAKAVLGLWCPQPWASSGFEENTQDLKSEDLGLSSG

SEQ ID NO: 3350 - protein, 558 aa, Homo sapiens
MADRGGVGEAAAVGASPASVPGLNPTLGWRERLRAGLAGTGASLWFVAGLGLLYALRIPLRLCENLAAGTSSLISGLIFIFEWWYFHKHGTSFIEQVSVSHLQPLMGGTESSISEPGSPSRNRENETSRQNLSECKVWRNPLNLFRGAEYRRYTWVTGKEPLTYYDMNLSAQDHQTFFTCDTDFLRPSDTVMQKAWRERNPPARIKAAYQALELNNDCATAYVLLAEEEATTIVDAERLFKQALKAGETIYRQSQQCQHQSPQHEAQLRRDTNVLVYIKRRLAMCARKLGRIREAVKIMRDLMKEFPPLTMLNIHENLLESLLELQAYPDVQAVLAKYDDISLPKSAAICYTAALLKTRTVSEKFSPETASRRGLSTAEINAVEAIHRAVEFNPHVPKYLLEMKSLILPPEHILKRGDSEAIAYAFFHLQHWKRIEGALNLLQCTWEGTFRMIPYPLEKGHLFYPYPSCTETADRELLPTFHHVSVYPKKELPLFIHFTAGFCSSTAMIAILTHQFPEIMGIFAKAVLGLWCPQPWASSGFEENTQDLKSEDLGLSSG

SEQ ID NO: 3351 - protein, 392 aa, Homo sapiens
MNLSAQDHQTFFTCDTDFLRPSDTVMQKAWRERNPPARIKAAYQALELNNDCATAYVLLAEEEATTIVDAERLFKQALKAGETIYRQSQQCQHQSPQHEAQLRRDTNVLVYIKRRLAMCARKLGRIREAVKIMRDLMKEFPPLTMLNIHENLLESLLELQAYPDVQAVLAKYDDISLPKSAAICYTAALLKTRTVSEKFSPETASRRGLSTAEINAVEAIHRAVEFNPHVPKYLLEMKSLILPPEHILKRGDSEAIAYAFFHLQHWKRIEGALNLLQCTWEGTFRMIPYPLEKGHLFYPYPSCTETADRELLPTFHHVSVYPKKELPLFIHFTAGFCSSTAMIAILTHQFPEIMGIFAKAVLGLWCPQPWASSGFEENTQDLKSEDLGLSSG

SEQ ID NO: 3352 - protein, 555 aa, Homo sapiens
MADRGGVGEAAAVGASPASVPGLNPTLGWRERLRAGLAGTGASLWFVAGLGLLYALRIPLRLCENLAAVTVFLNSLTPKFYVALTGTSSLISGLIFIFEWWYFHKHGTSFIEQVSVSHLQPLMGGTESSISEPGSPSRNRENETSRQNLSECKVWRNPLNLFRGAEYRRYTWVTGKEPLTYYDMNLSAQDHQTFFTCDTDFLRPSDTVMQKAWRERNPPARIKAAYQALELNNDCATAYVLLAEEEATTIVDAERLFKQALKAGETIYRQSQQCQHQSPQHEAQLRRDTNVLVYIKRRLAMCARKLGRIREAVKIMRDLMKEFPPLTMLNIHENLLESLLELQAYPDVQAVLAKYDDISLPKSAAICYTAALLKTRTVSEKFSPETASRRGLSTAEINAVEAIHRAVEFNPHVPKYLLEMKSLILPPEHILKRGDSEAIAYAFFHLQHWKRIEGALNLLQCTWEGTFRMIPYPLEKGHLFYPYPSCTETADRELLPTFHHVSVYPKKELPLFIHFTAGFCSSTAMIAILTHQFPEIMGIFAKAVSMISRTCVDYL

SEQ ID NO: 3353 - protein, 538 aa, Homo sapiens
MADRGGVGEAAAVGASPASVPGLNPTLGWRERLRAGLAGTGASLWFVAGLGLLYALRIPLRLCENLAAGTSSLISGLIFIFEWWYFHKHGTSFIEQVSVSHLQPLMGGTESSISEPGSPSRNRENETSRQNLSECKVWRNPLNLFRGAEYRRYTWVTGKEPLTYYDMNLSAQDHQTFFTCDTDFLRPSDTVMQKAWRERNPPARIKAAYQALELNNDCATAYVLLAEEEATTIVDAERLFKQALKAGETIYRQSQQCQHQSPQHEAQLRRDTNVLVYIKRRLAMCARKLGRIREAVKIMRDLMKEFPPLTMLNIHENLLESLLELQAYPDVQAVLAKYDDISLPKSAAICYTAALLKTRTVSEKFSPETASRRGLSTAEINAVEAIHRAVEFNPHVPKYLLEMKSLILPPEHILKRGDSEAIAYAFFHLQHWKRIEGALNLLQCTWEGTFRMIPYPLEKGHLFYPYPSCTETADRELLPTFHHVSVYPKKELPLFIHFTAGFCSSTAMIAILTHQFPEIMGIFAKAVSMISRTCVDYL

SEQ ID NO: 3354 - protein, 555 aa, Homo sapiens
MADRGGVGEAAAVGASPASVPGLNPTLGWRERLRAGLAGTGASLWFVAGLGLLYALRIPLRLCENLAAVTVFLNSLTPKFYVALTGTSSLISGLIFIFEWWYFHKHGTSFIEQVSVSHLQPLMGGTESSISEPGSPSRNRENETSRQNLSECKVWRNPLNLFRGAEYRRYTWVTGKEPLTYYDMNLSAQDHQTFFTCDTDFLRPSDTVMQKAWRERNPPARIKAAYQALELNNDCATAYVLLAEEEATTIVDAERLFKQALKAGETIYRQSQQCQHQSPQHEAQLRRDTNVLVYIKRRLAMCARKLGRIREAVKIMRDLMKEFPPLTMLNIHENLLESLLELQAYPDVQAVLAKYDDISLPKSAAICYTAALLKTRTVSEKFSPETASRRGLSTAEINAVEAIHRAVEFNPHVPKYLLEMKSLILPPEHILKRGDSEAIAYAFFHLQHWKRIEGALNLLQCTWEGTFRMIPYPLEKGHLFYPYPSCTETADRELLPTFHHVSVYPKKELPLFIHFTAGFCSSTAMIAILTHQFPEIMGIFAKAVVGVKTQKENAD

SEQ ID NO: 3355 - protein, 321 aa, Homo sapiens
MGGTESSISEPGSPSRNRENETSRQNLSECKVWRNPLNLFRGAEYRRYTWVTGKEPLTYYDMNLSAQDHQTFFTCDTDFLRPSDTVMQKAWRERNPPARIKAAYQALELNNDCATAYVLLAEEEATTIVDAERLFKQALKAGETIYRQSQQCQHQSPQHEAQLRRDTNVLVYIKRRLAMCARKLGRIREAVKIMRDLMKEFPPLTMLNIHENLLESLLELQAYPDVQAVLAKYDDISLPKSAAICYTAALLKTRTVSEKFSPETASRRGLSTAEINAVEAIHRAVEFNPHVPKVEIYPFSPQLNIKAVDNSAISKYPANIY

SEQ ID NO: 3356 - protein, 138 aa, Homo sapiens
MDTQTHSLPITHTQLHSNSQPQSRTCTRHCQTFSQSCRQSHRGSRSQSSSQSPASHRNPTGAHSSSGHQSQSPNTSPPPKRHKKTMNSHHSPMRPTILHCRCPKNRKNLEGKLKKKKMAKRIQQVYKTKTRSSGWKSN

SEQ ID NO: 3357 - protein, 464 aa, Homo sapiens
MAMTAGTTTTFPMSNHTRERVTVAKLTLENFYSNLILQHEERETRQKKLEVAMEEEGLADEEKKLRRSQHARKETEFLRLKRTRLGLDDFESLKVIGRGAFGEVRLVQKKDTGHIYAMKILRKSDMLEKEQVAHIRAERDILVEADGAWVVKMFYSFQDKRNLYLIMEFLPGGDMMTLLMKKDTLTEEETQFYISETVLAIDAIHQLGFIHRDIKPDNLLLDAKGHVKLSDFGLCTGLKKAHRTEFYRNLTHNPPSDFSFQNMNSKRKAETWKKNRRQLAYSTVGTPDYIAPEVFMQTGYNKLCDWWSLGVIMYEMLIGYPPFCSETPQETYRKVMNWKETLVFPPEVPISEKAKDLILRFCIDSENRIGNSGVEEIKGHPFFEGVDWEHIRERPAAIPIEIKSIDDTSNFDDFPESDILQPVPNTTEPDYKSKDWVFLNYTYKRFEGLTQRGSIPTYMKAGKL

SEQ ID NO: 3358 - protein, 371 aa, Homo sapiens
MEEEGLADEEVRLVQKKDTGHIYAMKILRKSDMLEKEQVAHIRAERDILVEADGAWVVKMFYSFQDKRNLYLIMEFLPGGDMMTLLMKKDTLTEEETQFYISETVLAIDAIHQLGFIHRDIKPDNLLLDAKGHVKLSDFGLCTGLKKAHRTEFYRNLTHNPPSDFSFQNMNSKRKAETWKKNRRQLAYSTVGTPDYIAPEVFMQTGYNKLCDWWSLGVIMYEMLIGYPPFCSETPQETYRKVMNWKETLVFPPEVPISEKAKDLILRFCIDSENRIGNSGVEEIKGHPFFEGVDWEHIRERPAAIPIEIKSIDDTSNFDDFPESDILQPVPNTTEPDYKSKDWVFLNYTYKRFEGLTQRGSIPTYMKAGKL

SEQ ID NO: 3359 - protein, 353 aa, Homo sapiens
MAASAAVFSRLRSGLRLGSRGLCTRLATPPRRAPDQAAEIGSRGSTKAQGPQQQPGSEGPSYAKKVALWLAGLLGAGGTVSVVYIFGNNPVDENGAKIPDEFDNDPILVQQLRRTYKYFKDYRQMIIEPTSPCLLPDPLQEPYYQPPYTLVLELTGVLLHPEWSLATGWRFKKRPGIETLFQQLAPLYEIVIFTSETGMTAFPLIDSVDPHGFISYRLFRDATRYMDGHHVKDISCLNRDPARVVVVDCKKEAFRLQPYNGVALRPWDGNSDDRVLLDLSAFLKTIALNGVEDVRTVLEHYALEDDPLAAFKQRQSRLEQEEQQRLAELSKSNKQNLFLGSLTSRLWPRSKQP

SEQ ID NO: 3360 - protein, 456 aa, Homo sapiens
MASALSLGNKCDPFLRCVLCRGGGALQGPRGRGPDDFESQLSPPGSARRLVRSKRACGNPPDAFGLSRASVHPPLPRVSIGCSSGPGRAKRERVGGAAWRQRKMAASAAVFSRLRSGLRLGSRGLCTRLATPPRRAPDQAAEIGSRGSTKAQGPQQQPGSEGPSYAKKVALWLAGLLGAGGTVSVVYIFGNNPVDENGAKIPDEFDNDPILVQQLRRTYKYFKDYRQMIIEPTSPCLLPDPLQEPYYQPPYTLVLELTGVLLHPEWSLATGWRFKKRPGIETLFQQLAPLYEIVIFTSETGMTAFPLIDSVDPHGFISYRLFRDATRYMDGHHVKDISCLNRDPARVVVVDCKKEAFRLQPYNGVALRPWDGNSDDRVLLDLSAFLKTIALNGVEDVRTVLEHYALEDDPLAAFKQRQSRLEQEEQQRLAELSKSNKQNLFLGSLTSRLWPRSKQP

SEQ ID NO: 3361 - protein, 240 aa, Homo sapiens
MVPRFLMSSTMMIIEPTSPCLLPDPLQEPYYQPPYTLVLELTGVLLHPEWSLATGWRFKKRPGIETLFQQLAPLYEIVIFTSETGMTAFPLIDSVDPHGFISYRLFRDATRYMDGHHVKDISCLNRDPARVVVVDCKKEAFRLQPYNGVALRPWDGNSDDRVLLDLSAFLKTIALNGVEDVRTVLEHYALEDDPLAAFKQRQSRLEQEEQQRLAELSKSNKQNLFLGSLTSRLWPRSKQP

SEQ ID NO: 3362 - protein, 334 aa, Homo sapiens
MDNSAQKNERTGKHPRRASEVQKGFTAAYPTQSSIPFKSQASVIPESEKKGFNSQAKRFPHKKNDIPGPGFYNVIHQSPVSNSVSLSKKGTCMFPSMCARLDTIISKYPAANAYTIPSDFISKRDFSNSCSSMFQLPSFMKALKFETPAPNYYNASVSCCKQRNNVCTRAGFMSKTQRGSFAFADKGPPPGHYDINESLVKQSPNTLMSCFKSKTNRGLKLTSTGPGPGYYNPSDCTKVPKKTLFPKNPILNFSAQPSPLPPKPPFPGPGQYEIVDYLGPRKHFISSASFVSNTSRWTAAPPQPGLPGPATYKPELPGKQSFLYNEDKKWIPVL

SEQ ID NO: 3363 - protein, 242 aa, Homo sapiens
MFPSMCARLDTIISKYPAANAYTIPSDFISKRDFSNSCSSMFQLPSFMKALKFETPAPNYYNASVSCCKQRNNVCTRAGFMSKTQRGSFAFADKGPPPGHYDINESLVKQSPNTLMSCFKSKTNRGLKLTSTGPGPGYYNPSDCTKVPKKTLFPKNPILNFSAQPSPLPPKPPFPGPGQYEIVDYLGPRKHFISSASFVSNTSRWTAAPPQPGLPGPATYKPELPGKQSFLYNEDKKWIPVL

SEQ ID NO: 3364 - protein, 287 aa, Homo sapiens
MNALANIPDVPVKYRKNDIPGPGFYNVIHQSPVSNSVSLSKKGTCMFPSMCARLDTIISKYPAANAYTIPSDFISKRDFSNSCSSMFQLPSFMKALKFETPAPNYYNASVSCCKQRNNVCTRAGFMSKTQRGSFAFADKGPPPGHYDINESLVKQSPNTLMSCFKSKTNRGLKLTSTGPGPGYYNPSDCTKVPKKTLFPKNPILNFSAQPSPLPPKPPFPGPGQYEIVDYLGPRKHFISSASFVSNTSRWTAAPPQPGLPGPATYKPELPGKQSFLYNEDKKWIPVL

SEQ ID NO: 3365 - protein, 989 aa, Homo sapiens
MARPVQLAPGSLALVLCRLEAQKAAGAAEEPGGRAVFRAFRRANARCFWNARLARAASRLAFQGWLRRGVLLVRAPPACLQVLRDAWRRRALRPPRGFRIRAVGDVFPVQMNPITQSQFVPLGEVLCCAISDMNTAQIVVTQESLLERLMKHYPGIAIPSEDILYTTLGTLIKERKIYHTGEGYFIVTPQTYFITNTTTQENKRMLPSDESRLMPASMTYLVSMESCAESAQENAAPISHCQSCQCFRDMHTQDVQEAPVAAEVTRKSHRGLGESVSWVQNGAVSVSAEHHICESTKPLPYTRDKEKGKKFGFSLLWRSLSRKEKPKTEHSSFSAQFPPEEWPVRDEDDLDNIPRDVEHEIIKRINPILTVDNLIKHTVLMQKYEEQKKYNSQGTSTDMLTIGHKYPSKEGVKKRQGLSAKPQGQGHSRRDRHKARNQGSEFQPGSIRLEKHPKLPATQPIPRIKSPNEMVGQKPLGEITTVLGSHLIYKKRISNPFQGLSHRGSTISKGHKIQKTSDLKPSQTGPKEKPFQKPRSLDSSRIFDGKAKEPYAEQPNDKMEAESIYINDPTVKPINDDFRGHLFSHPQQSMLQNDGKCCPFMESMLRYEVYGGENEVIPEVLRKSHSHFDKLGETKQTPHSLPSRGASFSDRTPSACRLVDNTIHQFQNLGLLDYPVGVNPLRQAARQDKDSEELLRKGFVQDAETTSLENEQLSNDDQALYQNEVEDDDGACSSLYLEEDDISENDDLRQMLPGHSQYSFTGGSQGNHLGKQKVIERSLTEYNSTMERVESQVLKRNECYKPTGLHATPGESQEPNLSAESCGLNSGAQFGFNYEEEPSVAKCVQASAPADERIFDYYSARKASFEAEVIQDTIGDTGKKPASWSQSPQNQEMRKHFPQKFQLFNTSHMPVLAQDVQYEHSHLEGTENHSMAGDSGIDSPRTQSLGSNNSVILDGLKRRQNFLQNVEGTKSSQPLTSNSLLPLTPVINV

SEQ ID NO: 3366 - protein, 227 aa, Homo sapiens
MARPVQLAPGSLALVLCRLEAQKAAGAAEEPGGRAVFRAFRRANARCFWNARLARAASRLAFQGWLRRGVLLVRAPPACLQVLRDAWRRRALRPPRGFRIRAVGDVFPVQMNPITQSQFVPLGEVLCCAISDMNTAQIVVTQESLLERLMKHYPGIAIPSEDILYTTLGTLIKERKIYHTGEGYFIVTPQTYFITNTTTQENKRMLPSDESRLMPASMTYLDTESGI

SEQ ID NO: 3367 - protein, 169 aa, Homo sapiens
MARPVQLAPGSLALVLCRLEAQKAAGAAEEPGGRAVFRAFRRANARCFWNARLARAASRLAFQGWLRRGVLLVRAPPACLQVLRDAWRRRALRPPRGFRIRAVGDVFPVQMNPITQSQFVPLGEVLCCAISDMNTAQIVVTQESLLERLMKHYPGHRVWDLIIQSFWMD

SEQ ID NO: 3368 - protein, 545 aa, Homo sapiens
MAEPSGSPVHVQLPQQAAPVTAAAAAAPAAATAAPAPAAPAAPAPAPAPAAQAVGWPICRDAYELQEVIGSGATAVVQAALCKPRQERVAIKRINLEKCQTSMDELLKEIQAMSQCSHPNVVTYYTSFVVKDELWLVMKLLSGGSMLDIIKYIVNRGEHKNGVLEEAIIATILKEVLEGLDYLHRNGQIHRDLKAGNILLGEDGSVQIADFGVSAFLATGGDVTRNKVRKTFVGTPCWMAPEVMEQVRGYDFKADMWSFGITAIELATGAAPYHKYPPMKVLMLTLQNDPPTLETGVEDKEMMKKYGKSFRKLLSLCLQKDPSKRPTAAELLKCKFFQKAKNREYLIEKLLTRTPDIAQRAKKVRRVPGSSGHLHKTEDGDWEWSDDEMDEKSEEGKAAFSQEKSRRVKEENPEIAVSASTIPEQIQSLSVHDSQGPPNANEDYREASSCAVNLVLRLRNSRKELNDIRFEFTPGRDTADGVSQELFSAGLVDGHDVVIVAANLQKIVDDPKALKTLTFKLASGCDGSEIPDEVKLIGFAQLSVS

SEQ ID NO: 3369 - protein, 526 aa, Homo sapiens
MAEPSGSPVHVQLPQQAAPVTAAAAAAPAPAAQAVGWPICRDAYELQEVIGSGATAVVQAALCKPRQERVAIKRINLEKCQTSMDELLKEIQAMSQCSHPNVVTYYTSFVVKDELWLVMKLLSGGSMLDIIKYIVNRGEHKNGVLEEAIIATILKEVLEGLDYLHRNGQIHRDLKAGNILLGEDGSVQIADFGVSAFLATGGDVTRNKVRKTFVGTPCWMAPEVMEQVRGYDFKADMWSFGITAIELATGAAPYHKYPPMKVLMLTLQNDPPTLETGVEDKEMMKKYGKSFRKLLSLCLQKDPSKRPTAAELLKCKFFQKAKNREYLIEKLLTRTPDIAQRAKKVRRVPGSSGHLHKTEDGDWEWSDDEMDEKSEEGKAAFSQEKSRRVKEENPEIAVSASTIPEQIQSLSVHDSQGPPNANEDYREASSCAVNLVLRLRNSRKELNDIRFEFTPGRDTADGVSQELFSAGLVDGHDVVIVAANLQKIVDDPKALKTLTFKLASGCDGSEIPDEVKLIGFAQLSVS

SEQ ID NO: 3370 - protein, 534 aa, Homo sapiens [sequence omitted]

SEQ ID NO: 3371 - protein, 357 aa, Homo sapiens
MSGKTKARRAAMFFRRCSEDASGSASGNALLSEDENPDANGVTRSWKIILSTMLTLTFLLVGLLNHQWLKETDVPQKSRQLYAIIAEYGSRLYKYQARLRMPKEQLELLKKESQNLENNFRQILFLIEQIDVLKALLRDMKDGMDNNHNWNTHGDPVEDPDHTEEVSNLVNYVLKKLREDQVEMADYALKSAGASIIEAGTSESYKNNKAKLYWHGIGFLNHEMPPDIILQPDVYPGKCWAFPGSQGHTLIKLATKIIPTAVTMEHISEKVSPSGNISSAPKEFSVYGITKKCEGEEIFLGQFIYNKTGTTVQTFELQHAVSEYLLCVKLNIFSNWGHPKYTCLYRFRVHGTPGKHI

SEQ ID NO: 3372 - protein, 269 aa, Homo sapiens
MPKEQLELLKKESQNLENNFRQILFLIEQIDVLKALLRDMKDGMDNNHNWNTHGDPVEDPDHTEEVSNLVNYVLKKLREDQVEMADYALKSAGASIIEAGTSESYKNNKAKLYWHGIGFLNHEMPPDIILQPDVYPGKCWAFPGSQGHTLIKLATKIIPTAVTMEHISEKVSPSGNISSAPKEFSVYVQRYMCRFVIQAGITKKCEGEEIFLGQFIYNKTGTTVQTFELQHAVSEYLLCVKLNIFSNWGHPKYTCLYRFRVHGTPGKHI

SEQ ID NO: 3373 - protein, 345 aa, Homo sapiens
MEDYSKYNAYTDFSSCRLECSGAILAHCNLHLLGSSISPASASRVAGTTGLLNHQWLKETDVPQKSRQLYAIIAEYGSRLYKYQARLRMPKEQLELLKKESQNLENNFRQILFLIEQIDVLKALLRDMKDGMDNNHNWNTHGDPVEDPDHTEEVSNLVNYVLKKLREDQVEMADYALKSAGASIIEAGTSESYKNNKAKLYWHGIGFLNHEMPPDIILQPDVYPGKCWAFPGSQGHTLIKLATKIIPTAVTMEHISEKVSPSGNISSAPKEFSVYGITKKCEGEEIFLGQFIYNKTGTTVQTFELQHAVSEYLLCVKLNIFSNWGHPKYTCLYRFRVHGTPGKHI

SEQ ID NO: 3374 - protein, 148 aa, Homo sapiens
MFRRPVLQVLRQFVRHESETTTSLVLERSLNRVHLLGRVGQDPVLRQVEGKNPVTIFSLATNEMWRSGDSEVYQLGDVSQKTTWHRISVFRPGLRDVAYQYVKKGSRIYLEGKIDYGEYMDKNNVRRQATTIIADNIIFLSDQTKEKE

SEQ ID NO: 3375 - protein, 368 aa, Homo sapiens
MQKWFSAFDDAIIQRQWRANPSRGGGGVSFTKEVDTNVATGAPPRRQRVPGRACPWREPIRGRRGARPGGGDAGGTPGETVRHCSAPEDPIFRFSSLHSYPFPGTIKSRDMSWKRHHLIPETFGVKRRRKRGPVESDPLRGEPGSARAAVSELMQLFPRGLFEDALPPIVLRSQVYSLVPDRTVADRQLKELQEQGEIRIVQLGFDLDAHGIIFTEDYRTRVCDCVLKACDGRPYAGAVQKFLASVLPACGDLSFQQDQMTQTFGFRDSEITHLVNAGVLTVRDAGSWWLAVPGAGRFIKYFVKGRQAVLSMVRKAKYRELLLSELLGRRAPVVVRLGLTYHVHDLIGAQLVDCISTTSGTLLRLPET

SEQ ID NO: 3376 - protein, 364 aa, Homo sapiens
MQKWFSAFDDAIIQRQWRANPSRGGGGVSFTKEVDTNVATGAPPRRQRVPGRACPWREPIRGRRGARPGGGDAGGTPGETVRHCSAPEDPIFRFSSLHSYPFPGTIKSRDMSWKRHHLIPETFGVKRRRKRGPVESDPLRGEPGSARAAVSELMQLFPRGLFEDALPPIVLRSQVYSLVPDRTVADRQLKELQEQGEIRIVQLGFDLDAHGIIFTEDYRTRVLKACDGRPYAGAVQKFLASVLPACGDLSFQQDQMTQTFGFRDSEITHLVNAGVLTVRDAGSWWLAVPGAGRFIKYFVKGRQAVLSMVRKAKYRELLLSELLGRRAPVVVRLGLTYHVHDLIGAQLVDCISTTSGTLLRLPET

SEQ ID NO: 3377 - protein, 258 aa, Homo sapiens
MSWKRHHLIPETFGVKRRRKRGPVESDPLRGEPGSARAAVSELMQLFPRGLFEDALPPIVLRSQVYSLVPDRTVADRQLKELQEQGEIRIVQLGFDLDAHGIIFTEDYRTRVCDCVLKACDGRPYAGAVQKFLASVLPACGDLSFQQDQMTQTFGFRDSEITHLVNAGVLTVRDAGSWWLAVPGAGRFIKYFVKGRQAVLSMVRKAKYRELLLSELLGRRAPVVVRLGLTYHVHDLIGAQLVDCISTTSGTLLRLPET

SEQ ID NO: 3378 - protein, 254 aa, Homo sapiens
MSWKRHHLIPETFGVKRRRKRGPVESDPLRGEPGSARAAVSELMQLFPRGLFEDALPPIVLRSQVYSLVPDRTVADRQLKELQEQGEIRIVQLGFDLDAHGIIFTEDYRTRVLKACDGRPYAGAVQKFLASVLPACGDLSFQQDQMTQTFGFRDSEITHLVNAGVLTVRDAGSWWLAVPGAGRFIKYFVKGRQAVLSMVRKAKYRELLLSELLGRRAPVVVRLGLTYHVHDLIGAQLVDCISTTSGTLLRLPET

SEQ ID NO: 3379 - protein, 402 aa, Homo sapiens
MIPPSSPREDGVDGLPKEAVGAEQPPSPASTSSQESKLQKLKRSLSFKTKSLRSKSADNFFQRTNSEDMKLQAHMVAEISPSSSPLPAPGSLTSTPARAGLHPGGKAHAFQEYIFKKPTFCDVCNHMIVGTNAKHGLRCKACKMSIHHKCTDGLAPQRCMGKLPKGFRRYYSSPLLIHEQFGCIKEVMPIACGNKVDPVYETLRFGTSLAQRTKKGSSGSGSDSPHRTSTSDLVEVPEEANGPGGGYDLRKRSNSVFTYPENGTDDFRDPAKNINHQGSLSKDPLQMNTYVALYKFVPQENEDLEMRPGDIITLLEDSNEDWWKGKIQDRIGFFPANFVQRLQQNEKIFRCVRTFIGCKEQGQITLKENQICVSSEEEQDGFIRVLSGKKKGLIPLDVLENI

SEQ ID NO: 3380 - protein, 1225 aa, Homo sapiens
MSSPLQRAVGDTKRALSASSSSSASLPFDDRDSNHTSEGNGDSLLADEDTDFEDSLNRNVKKRAAKRPPKTTPVAKHPKKGSRVVHRHSRKQSEPPANDLFNAVKAAKSDMQSLVDEWLDSYKQDQDAGFLELVNFFIQSCGCKGIVTPEMFKKMSNSEIIQHLTEQFNEDSGDYPLIAPGPSWKKFQGSFCEFVRTLVCQCQYSLLYDGFPMDDLISLLTGLSDSQVRAFRHTSTLAAMKLMTSLVKVALQLSVHQDNNQRQYEAERNKGPGQRAPERLESLLEKRKELQEHQEEIEGMMNALFRGVFVHRYRDVLPEIRAICIEEIGCWMQSYSTSFLTDSYLKYIGWTLHDKHREVRLKCVKALKGLYGNRDLTTRLELFTSRFKDRMVSMVMDREYDVAVEAVRLLILILKNMEGVLTDADCESVYPVVYASHRGLASAAGEFLYWKLFYPECEIRMMGGREQRQSPGAQRTFFQLLLSFFVESELHDHAAYLVDSLWDCAGARLKDWEGLTSLLLEKDQNLGDVQESTLIEILVSSARQASEGHPPVGRVTGRKGLTSKERKTQADDRVKLTEHLIPLLPQLLAKFSADAEKVTPLLQLLSCFDLHIYCTGRLEKHLELFLQQLQEVVVKHAEPAVLEAGAHALYLLCNPEFTFFSRADFARSQLVDLLTDRFQQELEELLQSSFLDEDEVYNLAATLKRLSAFYNTHDLTRWELYEPCCQLLQKAVDTGEVPHQVILPALTLVYFSILWTLTHISKSDASQKQLSSLRDRMVAFCELCQSCLSDVDTEIQEQAFVLLSDLLLIFSPQMIVGGRDFLRPLVFFPEATLQSELASFLMDHVFIQPGDLGSGDSQEDHLQIERLHQRRRLLAGFCKLLLYGVLEMDAASDVFKHYNKFYNDYGDIIKETLTRARQIDRSHCSRILLLSLKQLYTELLQEHGPQGLNELPAFIEMRDLARRFALSFGPQQLQNRDLVVMLHKEGIQFSLSELPPAGSSNQPPNLAFLELLSEFSPRLFHQDKQLLLSYLEKCLQHVSQAPGHPWGPVTTYCHSLSPVENTAETSPQVLPSSKRRRVEGPAKPNREDVSSSQEESLQLNSIPPTPTLTSTAVKSRQPLWGLKEMEEEDGSELDFAQGQPVAGTERSRFLGPQYFQTPHNPSGPGLGNQLMRLSLMEEDEEEELEIQDESNEERQDTDMQASSYSSTSERGLDLLDSTELDIEDF

SEQ ID NO: 3381 - protein, 888 aa, Homo sapiens
MSSPLQRAVGDTKRALSASSSSSASLPFDDRDSNHTSEGNGDSLLADEDTDFEDSLNRNVKKRAAKRPPKTTPVAKHPKKGSRVVHRHSRKQSEPPANDLFNAVKAAKSDMQSLVDEWLDSYKQDQDAGFLELVNFFIQSCGCKGIVTPEMFKKMSNSEIIQHLTEQFNEMDDLISLLTGLSDSQVRAFRHTSTLAAMKLMTSLVKVALQLSVHQDNNQRQYEAERNKGPGQRAPERLESLLEKRKELQEHQEEIEGMMNALFRGVFVHRYRDVLPEIRAICIEEIGCWMQSYSTSFLTDSYLKYIGWTLHDKHREVRLKCVKALKGLYGNRDLTTRLELFTSRFKDRMVSMVMDREYDVAVEAVRLLILILKNMEGVLTDADCESVYPVVYASHRGLASAAGEFLYWKLFYPECEIRMMGGREQRQSPGAQRTFFQLLLSFFVESELHDHAAYLVDSLWDCAGARLKDWEGLTSLLLEKDQNLGDVQESTLIEILVSSARQASEGHPPVGRVTGRKGLTSKERKTQADDRVKLTEHLIPLLPQLLAKFSADAEKVTPLLQLLSCFDLHIYCTGRLEKHLELFLQQLQEVVVKHAEPAVLEAGAHALYLLCNPEFTFFSRADFARSQLVDLLTDRFQQELEELLQSSFLDEDEVYNLAATLKRLSAFYNTHDLTRWELYEPCCQLLQKAVDTGEVPHQVILPALTLVYFSILWTLTHSLSPVENTAETSPQVLPSSKRRRVEGPAKPNREDVSSSQEESLQLNSIPPTPTLTSTAVKSRQPLWGLKEMEEEDGSELDFAQGQPVAGTERSRFLGPQYFQTPHNPSGPGLGNQLMRLSLMEEDEEEELEIQDESNEERQDTDMQASSYSSTSERGLDLLDSTELDIEDF

SEQ ID NO: 3382 - protein, 1167 aa, Homo sapiens
MSSPLQRAVGDTKRALSASSSSSASLPFDDRDSNHTSEGNGDSLLADEDTDFEDSLNRNVKKRAAKRPPKTTPVAKHPKKGSRVVHRHSRKQSEPPANDLFNAVKAAKSDMQDSGDYPLIAPGPSWKKFQGSFCEFVRTLVCQCQYSLLYDGFPMDDLISLLTGLSDSQVRAFRHTSTLAAMKLMTSLVKVALQLSVHQDNNQRQYEAERNKGPGQRAPERLESLLEKRKELQEHQEEIEGMMNALFRGVFVHRYRDVLPEIRAICIEEIGCWMQSYSTSFLTDSYLKYIGWTLHDKHREVRLKCVKALKGLYGNRDLTTRLELFTSRFKDRMVSMVMDREYDVAVEAVRLLILILKNMEGVLTDADCESVYPVVYASHRGLASAAGEFLYWKLFYPECEIRMMGGREQRQSPGAQRTFFQLLLSFFVESELHDHAAYLVDSLWDCAGARLKDWEGLTSLLLEKDQNLGDVQESTLIEILVSSARQASEGHPPVGRVTGRKGLTSKERKTQADDRVKLTEHLIPLLPQLLAKFSADAEKVTPLLQLLSCFDLHIYCTGRLEKHLELFLQQLQEVVVKHAEPAVLEAGAHALYLLCNPEFTFFSRADFARSQLVDLLTDRFQQELEELLQSSFLDEDEVYNLAATLKRLSAFYNTHDLTRWELYEPCCQLLQKAVDTGEVPHQVILPALTLVYFSILWTLTHISKSDASQKQLSSLRDRMVAFCELCQSCLSDVDTEIQEQAFVLLSDLLLIFSPQMIVGGRDFLRPLVFFPEATLQSELASFLMDHVFIQPGDLGSGDSQEDHLQIERLHQRRRLLAGFCKLLLYGVLEMDAASDVFKHYNKFYNDYGDIIKETLTRARQIDRSHCSRILLLSLKQLYTELLQEHGPQGLNELPAFIEMRDLARRFALSFGPQQLQNRDLVVMLHKEGIQFSLSELPPAGSSNQPPNLAFLELLSEFSPRLFHQDKQLLLSYLEKCLQHVSQAPGHPWGPVTTYCHSLSPVENTAETSPQVLPSSKRRRVEGPAKPNREDVSSSQEESLQLNSIPPTPTLTSTAVKSRQPLWGLKEMEEEDGSELDFAQGQPVAGTERSRFLGPQYFQTPHNPSGPGLGNQLMRLSLMEEDEEEELEIQDESNEERQDTDMQASSYSSTSERGLDLLDSTELDIEDF

SEQ ID NO: 3383 - protein, 1827 aa, Homo sapiens
MARKKFSGLEISLIVLFVIVTIIAIALIVVLATKTPAVDEISDSTSTPATTRVTTNPSDSGKCPNVLNDPVNVRINCIPEQFPTEGICAQRGCCWRPWNDSLIPWCFFVDNHGYNVQDMTTTSIGVEAKLNRIPSPTLFGNDINSVLFTTQNQTPNRFRFKITDPNNRRYEVPHQYVKEFTGPTVSDTLYDVKVAQNPFSIQVIRKSNGKTLFDTSIGPLVYSDQYLQISTRLPSDYIYGIGEQVHKRFRHDLSWKTWPIFTRDQLPGDNNNNLYGHQTFFMCIEDTSGKSFGVFLMNSNAMEIFIQPTPIVTYRVTGGILDFYILLGDTPEQVVQQYQQLVGLPAMPAYWNLGFQLSRWNYKSLDVVKEVVRRNREAGIPFDTQVTDIDYMEDKKDFTYDQVAFNGLPQFVQDLHDHGQKYVIILDPAISIGRRANGTTYATYERGNTQHVWINESDGSTPIIGEVWPGLTVYPDFTNPNCIDWWANECSIFHQEVQYDGLWIDMNEVSSFIQGSTKGCNVNKLNYPPFTPDILDKLMYSKTICMDAVQNWGKQYDVHSLYGYSMAIATEQAVQKVFPNKRSFILTRSTFAGSGRHAAHWLGDNTASWEQMEWSITGMLEFSLFGIPLVGADICGFVAETTEELCRRWMQLGAFYPFSRNHNSDGYEHQDPAFFGQNSLLVKSSRQYLTIRYTLLPFLYTLFYKAHVFGETVARPVLHEFYEDTNSWIEDTEFLWGPALLITPVLKQGADTVSAYIPDAIWYDYESGAKRPWRKQRVDMYLPADKIGLHLRGGYIIPIQEPDVTTTASRKNPLGLIVALGENNTAKGDFFWDDGETKDTIQNGNYILYTFSVSNNTLDIVCTHSSYQEGTTLAFQTVKILGLTDSVTEVRVAENNQPMNAHSNFTYDASNQVLLIADLKLNLGRNFSVQWNQIFSENERFNCYPDADLATEQKCTQRGCVWRTGSSLSKAPECYFPRQDNSYSVNSARYSSMGITADLQLNTANARIKLPSDPISTLRVEVKYHKNDMLQFKIYDPQKKRYEVPVPLNIPTTPISTYEDRLYDVEIKENPFGIQIRRRSSGRVIWDSWLPGFAFNDQFIQISTRLPSEYIYGFGEVEHTAFKRDLNWNTWGMFTRDQPPGYKLNSYGFHPYYMALEEEGNAHGVFLLNSNAMDVTFQPTPALTYRTVGGILDFYMFLGPTPEVATKQYHEVIGHPVMPAYWALGFQLCRYGYANTSEVRELYDAMVAANIPYDVQYTDIDYMERQLDFTIGEAFQDLPQFVDKIRGEGMRYIIILDPAISGNETKTYPAFERGQQNDVFVKWPNTNDICWAKVWPDLPNITIDKTLTEDEAVNASRAHVAFPDFFRTSTAEWWAREIVDFYNEKMKFDGLWIDMNEPSSFVNGTTTNQCRNDELNYPPYFPELTKRTDGLHFRTICMEAEQILSDGTSVLHYDVHNLYGWSQMKPTHDALQKTTGKRGIVISRSTYPTSGRWGGHWLGDNYARWDNMDKSIIGMMEFSLFGMSYTGADICGFFNNSEYHLCTRWMQLGAFYPYSRNHNIANTRRQDPASWNETFAEMSRNILNIRYTLLPYFYTQMHEIHANGGTVIRPLLHEFFDEKPTWDIFKQFLWGPAFMVTPVLEPYVQTVNAYVPNARWFDYHTGKDIGVRGQFQTFNASYDTINLHVRGGHILPCQEPAQNTFYSRQKHMKLIVAADDNQMAQGSLFWDDGESIDTYERDLYLSVQFNLNQTTLTSTILKRGYINKSETRLGSLHVWGKGTTPVNAVTLTYNGNKNSLPFNEDTTNMILRIDLTTHNVTLEEPIEINWS

SEQ ID NO: 3384 - protein, 220 aa, Homo sapiens
MDFKAIAQQTAQEVLGYNRDTSGWKVVKTSKKITVSSKASRKFHGNLYRVEGIIPESPAKLSDFLYQTGDRITWDKSLQVYNMVHRIDSDTFICHTITQSFAVGSISPRDFIDLVYIKRYEGNMNIISSKSVDFPEYPPSSNYIRGYNHPCGFVCSPMEENPAYSKLVMFVQTEMRGKLSPSIIEKTMPSNLVNFILNAKDGIKAHRTPSRRGFHHNSHS

SEQ ID NO: 3385 - protein, 445 aa, Homo sapiens
MSKLPRELTRDLERSLPAVASLGSSLSHSQSLSSHLLPPPEKRRAISDVRRTFCLFVTFDLLFISLLWIIELNTNTGIRKNLEQEIIQYNFKTSFFDIFVLAFFRFSGLLLGYAVLRLRHWWVIAVTTLVSSAFLIVKVILSELLSKGAFGYLLPIVSFVLAWLETWFLDFKVLPQEAEEERWYLAAQVAVARGPLLFSGALSEGQFYSPPESFAGSDNESDEEVAGKKSFSAQEREYIRQGKEATAVVDQILAQEENWKFEKNNEYGDTVYTIEVPFHGKTFILKTFLPCPAELVYQEVILQPERMVLWNKTVTACQILQRVEDNTLISYDVSAGAAGGVVSPRDFVNVRRIERRRDRYLSSGIATSHSAKPPTHKYVRGENGPGGFIVLKSASNPRVCTFVWILNTDLKGRLPRYLIHQSLAATMFEFAFHLRQRISELGARA

SEQ ID NO: 3386 - protein, 427 aa, Homo sapiens
MSKLPRELTRDLERSLPAVASLGSSLSHSQSLSSHLLPPPEKRRAISDVRRTFCLFVTFDLLFISLLWIIELNTNTGIRKNLEQEIIQYNFKTSFFDIFVLAFFRFSGLLLGYAVLRLRHWWVIALLSKGAFGYLLPIVSFVLAWLETWFLDFKVLPQEAEEERWYLAAQVAVARGPLLFSGALSEGQFYSPPESFAGSDNESDEEVAGKKSFSAQEREYIRQGKEATAVVDQILAQEENWKFEKNNEYGDTVYTIEVPFHGKTFILKTFLPCPAELVYQEVILQPERMVLWNKTVTACQILQRVEDNTLISYDVSAGAAGGVVSPRDFVNVRRIERRRDRYLSSGIATSHSAKPPTHKYVRGENGPGGFIVLKSASNPRVCTFVWILNTDLKGRLPRYLIHQSLAATMFEFAFHLRQRISELGARA

SEQ ID NO: 3387 - protein, 445 aa, Homo sapiens
MSKLPRELTRDLERSLPAVASLGSSLSHSQSLSSHLLPPPEKRRAISDVRRTFCLFVTFDLLFISLLWIIELNTNTGIRKNLEQEIIQYNFKTSFFDIFVLAFFRFSGLLLGYAVLRLRHWSRRWCPVHSSLSRSSSLSCSAKGHLATCSPSSLLSSPGWRPGSLTSKSYPRKLKRSDSAPPGYLAAQVAVARGPLLFSGALSEGQFYSPPESFAGSDNESDEEVAGKKSFSAQEREYIRQGKEATAVVDQILAQEENWKFEKNNEYGDTVYTIEVPFHGKTFILKTFLPCPAELVYQEVILQPERMVLWNKTVTACQILQRVEDNTLISYDVSAGAAGGVVSPRDFVNVRRIERRRDRYLSSGIATSHSAKPPTHKYVRGENGPGGFIVLKSASNPRVCTFVWILNTDLKGRLPRYLIHQSLAATMFEFAFHLRQRISELGARA

SEQ ID NO: 3388 - protein, 205 aa, Homo sapiens
MEGLSDVASFATKLKNTLIQYHSIEEDKWRVAKKTKDVTVWRKPSEEFNGYLYKAQGVIDDLVYSIIDHIRPGPCRLDWDSLMTSLDILENFEENCCVMRYTTAGQLWNIISPREFVDFSYTVGYKEGLLSCGISLDWDEKRPEFVRGYNHPCGWFCVPLKDNPNQSLLTGYIQTDLRGMIPQSAVDTAMASTLTNFYGDLRKAL

SEQ ID NO: 3389 - protein, 159 aa, Homo sapiens
MEGLSDVASFATKLKNTLIQYHSIEEDKWRVAKKTKDVTVWRKPSEEFNGYLYKAQGVIDDLVYSIIDHIRPGPCRLDWDSLMTSLDILENFEENCCVMRYTTAGQLWNIISPREFVDFSYTVGYKEGLLSCGNNLNMLCFFSVWFKYLCFLGWMSLSL

SEQ ID NO: 3390 - protein, 705 aa, Homo sapiens
MTKFGFLRLSYEKQDTLLKLLILSMAAVLSFSTRLFAVLRFESVIHEFDPYFNYRTTRFLAEEGFYKFHNWFDDRAWYPLGRIIGGTIYPGLMITSAAIYHVLHFFHITIDIRNVCVFLAPLFSSFTTIVTYHLTKELKDAGAGLLAAAMIAVVPGYISRSVAGSYDNEGIAIFCMLLTYYMWIKAVKTGSICWAAKCALAYFYMVSSWGGYVFLINLIPLHVLVLMLTGRFSHRIYVAYCTVYCLGTILSMQISFVGFQPVLSSEHMAAFGVFGLCQIHAFVDYLRSKLNPQQFEVLFRSVISLVGFVLLTVGALLMLTGKISPWTGRFYSLLDPSYAKNNIPIIASVSEHQPTTWSSYYFDLQLLVFMFPVGLYYCFSNLSDARIFIIMYGVTSMYFSAVMVRLMLVLAPVMCILSGIGVSQVLSTYMKNLDISRPDKKSKKQQDSTYPIKNEVASGMILVMAFFLITYTFHSTWVTSEAYSSPSIVLSARGGDGSRIIFDDFREAYYWLRHNTPEDAKVMSWWDYGYQITAMANRTILVDNNTWNNTHISRVGQAMASTEEKAYEIMRELDVSYVLVIFGGLTGYSSDDINKFLWMVRIGGSTDTGKHIKENDYYTPTGEFRVDREGSPVLLNCLMYKMCYYRFGQVYTEAKRPPGFDRVRNAEIGNKDFELDVLEEAYTTEHWLVRIYKVKDLDNRGLSRT

SEQ ID NO: 3391 - protein, 613 aa, Homo sapiens
MITSAAIYHVLHFFHITIDIRNVCVFLAPLFSSFTTIVTYHLTKELKDAGAGLLAAAMIAVVPGYISRSVAGSYDNEGIAIFCMLLTYYMWIKAVKTGSICWAAKCALAYFYMVSSWGGYVFLINLIPLHVLVLMLTGRFSHRIYVAYCTVYCLGTILSMQISFVGFQPVLSSEHMAAFGVFGLCQIHAFVDYLRSKLNPQQFEVLFRSVISLVGFVLLTVGALLMLTGKISPWTGRFYSLLDPSYAKNNIPIIASVSEHQPTTWSSYYFDLQLLVFMFPVGLYYCFSNLSDARIFIIMYGVTSMYFSAVMVRLMLVLAPVMCILSGIGVSQVLSTYMKNLDISRPDKKSKKQQDSTYPIKNEVASGMILVMAFFLITYTFHSTWVTSEAYSSPSIVLSARGGDGSRIIFDDFREAYYWLRHNTPEDAKVMSWWDYGYQITAMANRTILVDNNTWNNTHISRVGQAMASTEEKAYEIMRELDVSYVLVIFGGLTGYSSDDINKFLWMVRIGGSTDTGKHIKENDYYTPTGEFRVDREGSPVLLNCLMYKMCYYRFGQVYTEAKRPPGFDRVRNAEIGNKDFELDVLEEAYTTEHWLVRIYKVKDLDNRGLSRT

SEQ ID NO: 3392 - protein, 62 aa, Homo sapiens
MKFLVFAFILALMVSMIGADSSEEKFLRRIGRFGYGYGPYQPVPEQPLYPQPYQPQYQQYTF

SEQ ID NO: 3393 - protein, 52 aa, Homo sapiens
MKFLVFAFILALMVSMIGADSSEEYGYGPYQPVPEQPLYPQPYQPQYQQYTF

SEQ ID NO: 3394 - protein, 2364 aa, Homo sapiens
MTTTVATDYDNIEIQQQYSDVNNRWDVDDWDNENSSARLFERSRIKALADEREAVQKKTFTKWVNSHLARVSCRITDLYTDLRDGRMLIKLLEVLSGERLPKPTKGRMRIHCLENVDKALQFLKEQRVHLENMGSHDIVDGNHRLTLGLIWTIILRFQIQDISVETEDNKEKKSAKDALLLWCQMKTAGYPNVNIHNFTTSWRDGMAFNALIHKHRPDLIDFDKLKKSNAHYNLQNAFNLAEQHLGLTKLLDPEDISVDHPDEKSIITYVVTYYHYFSKMKALAVEGKRIGKVLDNAIETEKMIEKYESLASDLLEWIEQTIIILNNRKFANSLVGVQQQLQAFNTYRTVEKPPKFTEKGNLEVLLFTIQSKMRANNQKVYMPREGKLISDINKAWERLEKAEHERELALRNELIRQEKLEQLARRFDRKAAMRETWLSENQRLVSQDNFGFDLPAVEAATKKHEAIETDIAAYEERVQAVVAVARELEAENYHDIKRITARKDNVIRLWEYLLELLRARRQRLEMNLGLQKIFQEMLYIMDWMDEMKVLVLSQDYGKHLLGVEDLLQKHTLVEADIGIQAERVRGVNASAQKFATDGEGYKPCDPQVIRDRVAHMEFCYQELCQLAAERRARLEESRRLWKFFWEMAEEEGWIREKEKILSSDDYGKDLTSVMRLLSKHRAFEDEMSGRSGHFEQAIKEGEDMIAEEHFGSEKIRERIIYIREQWANLEQLSAIRKKRLEEASLLHQFQADADDIDAWMLDILKIVSSSDVGHDEYSTQSLVKKHKDVAEEIANYRPTLDTLHEQASALPQEHAESPDVRGRLSGIEERYKEVAELTRLRKQALQDTLALYKMFSEADACELWIDEKEQWLNNMQIPEKLEDLEVIQHRFESLEPEMNNQASRVAVVNQIARQLMHSGHPSEKEIKAQQDKLNTRWSQFRELVDRKKDALLSALSIQNYHLECNETKSWIREKTKVIESTQDLGNDLAGVMALQRKLTGMERDLVAIEAKLSDLQKEAEKLESEHPDQAQAILSRLAEISDVWEEMKTTLKNREASLGEASKLQQFLRDLDDFQSWLSRTQTAIASEDMPNTLTEAEKLLTQHENIKNEIDNYEEDYQKMRDMGEMVTQGQTDAQYMFLRQRLQALDTGWNELHKMWENRQNLLSQSHAYQQFLRDTKQAEAFLNNQEYVLAHTEMPTTLEGAEAAIKKQEDFMTTMDANEEKINAVVETGRRLVSDGNINSDRIQEKVDSIDDRHRKNRETASELLMRLKDNRDLQKFLQDCQELSLWINEKMLTAQDMSYDEARNLHSKWLKHQAFMAELASNKEWLDKIEKEGMQLISEKPETEAVVKEKLTGLHKMWEVLESTTQTKAQRLFDANKAELFTQSCADLDKWLHGLESQIQSDDYGKDLTSVNILLKKQQMLENQMEVRKKEIEELQSQAQALSQEGKSTDEVDSKRLTVQTKFMELLEPLNERKHNLLASKEIHQFNRDVEDEILWVGERMPLATSTDHGHNLQTVQLLIKKNQTLQKEIQGHQPRIDDIFERSQNIVTDSSSLSAEAIRQRLADLKQLWGLLIEETEKRHRRLEEAHRAQQYYFDAAEAEAWMSEQELYMMSEEKAKDEQSAVSMLKKHQILEQAVEDYAETVHQLSKTSRALVADSHPESERISMRQSKVDKLYAGLKDLAEERRGKLDERHRLFQLNREVDDLEQWIAEREVVAGSHELGQDYEHVTMLQERFREFARDTGNIGQERVDTVNHLADELINSGHSDAATIAEWKDGLNEAWADLLELIDTRTQILAASYELHKFYHDAKEIFGRIQDKHKKLPEELGRDQNTVETLQRMHTTFEHDIQALGTQVRQLQEDAARLQAAYAGDKADDIQKRENEVLEAWKSLLDACESRRVRLVDTGDKFRFFSMVRDLMLWMEDVIRQIEAQEKPRDVSSVELLMNNHQGIKAEIDARNDSFTTCIELGKSLLARKHYASEEIKEKLLQLTEKRKEMIDKWEDRWEWLRLILEVHQFSRDASVAEAWLLGQEPYLSSREIGQSVDEVEKLIKRHEAFEKSAATWDERFSALERLTTLELLEVRRQQEEEERKRRPPSPEPSTKVSEEAESQQQWDTSKGEQVSQNGLPAEQGSPRMAETVDTSEMVNGATEQRTSSKESSPIPSPTSDRKAKTALPAQSAATLPARTQETPSAQMEGFLNRKHEWEAHNKKASSRSWHNVYCVINNQEMGFYKDAKTAASGIPYHSEVPVSLKEAVCEVALDYKKKKHVFKLRLNDGNEYLFQAKDDEEMNTWIQAISSAISSDKHEVSASTQSTPASSRAQTLPTSVVTITSESSPGKREKDKEKDKEKRFSLFGKKK

SEQ ID NO: 3395 - protein, 2168 aa, Homo sapiens
MTTTVATDYDNIEIQQQYSDVNNRWDVDDWDNENSSARLFERSRIKALADEREAVQKKTFTKWVNSHLARVSCRITDLYTDLRDGRMLIKLLEVLSGERLPKPTKGRMRIHCLENVDKALQFLKEQRVHLENMGSHDIVDGNHRLTLGLIWTIILRFQIQDISVETEDNKEKKSAKDALLLWCQMKTAGYPNVNIHNFTTSWRDGMAFNALIHKHRPDLIDFDKLKKSNAHYNLQNAFNLAEQHLGLTKLLDPEDISVDHPDEKSIITYVVTYYHYFSKMKALAVEGKRIGKVLDNAIETEKMIEKYESLASDLLEWIEQTIIILNNRKFANSLVGVQQQLQAFNTYRTVEKPPKFTEKGNLEVLLFTIQSKMRANNQKVYMPREGKLISDINKAWERLEKAEHERELALRNELIRQEKLEQLARRFDRKAAMRETWLSENQRLVSQDNFGFDLPAVEAATKKHEAIETDIAAYEERVQAVVAVARELEAENYHDIKRITARKDNVIRLWEYLLELLRARRQRLEMNLGLQKIFQEMLYIMDWMDEMKVLVLSQDYGKHLLGVEDLLQKHTLVEADIGIQAERVRGVNASAQKFATDGEGYKPCDPQVIRDRVAHMEFCYQELCQLAAERRARLEESRRLWKFFWEMAEEEGWIREKEKILSSDDYGKDLTSVMRLLSKHRAFEDEMSGRSGHFEQAIKEGEDMIAEEHFGSEKIRERIIYIREQWANLEQLSAIRKKRLEEASLLHQFQADADDIDAWMLDILKIVSSSDVGHDEYSTQSLVKKHKDVAEEIANYRPTLDTLHEQASALPQEHAESPDVRGRLSGIEERYKEVAELTRLRKQALQDTLALYKMFSEADACELWIDEKEQWLNNMQIPEKLEDLEVIQHRFESLEPEMNNQASRVAVVNQIARQLMHSGHPSEKEIKAQQDKLNTRWSQFRELVDRKKDALLSALSIQNYHLECNETKSWIREKTKVIESTQDLGNDLAGVMALQRKLTGMERDLVAIEAKLSDLQKEAEKLESEHPDQAQAILSRLAEISDVWEEMKTTLKNREASLGEASKLQQFLRDLDDFQSWLSRTQTAIASEDMPNTLTEAEKLLTQHENIKNEIDNYEEDYQKMRDMGEMVTQGQTDAQYMFLRQRLQALDTGWNELHKMWENRQNLLSQSHAYQQFLRDTKQAEAFLNNQEYVLAHTEMPTTLEGAEAAIKKQEDFMTTMDANEEKINAVVETGRRLVSDGNINSDRIQEKVDSIDDRHRKNRETASELLMRLKDNRDLQKFLQDCQELSLWINEKMLTAQDMSYDEARNLHSKWLKHQAFMAELASNKEWLDKIEKEGMQLISEKPETEAVVKEKLTGLHKMWEVLESTTQTKAQRLFDANKAELFTQSCADLDKWLHGLESQIQSDDYGKDLTSVNILLKKQQMLENQMEVRKKEIEELQSQAQALSQEGKSTDEVDSKRLTVQTKFMELLEPLNERKHNLLASKEIHQFNRDVEDEILWVGERMPLATSTDHGHNLQTVQLLIKKNQTLQKEIQGHQPRIDDIFERSQNIVTDSSSLSAEAIRQRLADLKQLWGLLIEETEKRHRRLEEAHRAQQYYFDAAEAEAWMSEQELYMMSEEKAKDEQSAVSMLKKHQILEQAVEDYAETVHQLSKTSRALVADSHPESERISMRQSKVDKLYAGLKDLAEERRGKLDERHRLFQLNREVDDLEQWIAEREVVAGSHELGQDYEHVTMLQERFREFARDTGNIGQERVDTVNHLADELINSGHSDAATIAEWKDGLNEAWADLLELIDTRTQILAASYELHKFYHDAKEIFGRIQDKHKKLPEELGRDQNTVETLQRMHTTFEHDIQALGTQVRQLQEDAARLQAAYAGDKADDIQKRENEVLEAWKSLLDACESRRVRLVDTGDKFRFFSMVRDLMLWMEDVIRQIEAQEKPRDVSSVELLMNNHQGIKAEIDARNDSFTTCIELGKSLLARKHYASEEIKEKLLQLTEKRKEMIDKWEDRWEWLRLILEVHQFSRDASVAEAWLLGQEPYLSSREIGQSVDEVEKLIKRHEAFEKSAATWDERFSALERLTTLELLEVRRQQEEEERKRRPPSPEPSTKVSEEAESQQQWDTSKGEQVSQNGLPAEQGSPRVSYRSQTYQNYKNFNSRRTASDQPWSGL

SEQ ID NO: 3396 - protein, 2155 aa, Homo sapiens
MELQRTSSISGPLSPAYTGQVPYNYNQLEGRFKQLQDEREAVQKKTFTKWVNSHLARVSCRITDLYTDLRDGRMLIKLLEVLSGERLPKPTKGRMRIHCLENVDKALQFLKEQRVHLENMGSHDIVDGNHRLTLGLIWTIILRFQIQDISVETEDNKEKKSAKDALLLWCQMKTAGYPNVNIHNFTTSWRDGMAFNALIHKHRPDLIDFDKLKKSNAHYNLQNAFNLAEQHLGLTKLLDPEDISVDHPDEKSIITYVVTYYHYFSKMKALAVEGKRIGKVLDNAIETEKMIEKYESLASDLLEWIEQTIIILNNRKFANSLVGVQQQLQAFNTYRTVEKPPKFTEKGNLEVLLFTIQSKMRANNQKVYMPREGKLISDINKAWERLEKAEHERELALRNELIRQEKLEQLARRFDRKAAMRETWLSENQRLVSQDNFGFDLPAVEAATKKHEAIETDIAAYEERVQAVVAVARELEAENYHDIKRITARKDNVIRLWEYLLELLRARRQRLEMNLGLQKIFQEMLYIMDWMDEMKVLVLSQDYGKHLLGVEDLLQKHTLVEADIGIQAERVRGVNASAQKFATDGEGYKPCDPQVIRDRVAHMEFCYQELCQLAAERRARLEESRRLWKFFWEMAEEEGWIREKEKILSSDDYGKDLTSVMRLLSKHRAFEDEMSGRSGHFEQAIKEGEDMIAEEHFGSEKIRERIIYIREQWANLEQLSAIRKKRLEEASLLHQFQADADDIDAWMLDILKIVSSSDVGHDEYSTQSLVKKHKDVAEEIANYRPTLDTLHEQASALPQEHAESPDVRGRLSGIEERYKEVAELTRLRKQALQDTLALYKMFSEADACELWIDEKEQWLNNMQIPEKLEDLEVIQHRFESLEPEMNNQASRVAVVNQIARQLMHSGHPSEKEIKAQQDKLNTRWSQFRELVDRKKDALLSALSIQNYHLECNETKSWIREKTKVIESTQDLGNDLAGVMALQRKLTGMERDLVAIEAKLSDLQKEAEKLESEHPDQAQAILSRLAEISDVWEEMKTTLKNREASLGEASKLQQFLRDLDDFQSWLSRTQTAIASEDMPNTLTEAEKLLTQHENIKNEIDNYEEDYQKMRDMGEMVTQGQTDAQYMFLRQRLQALDTGWNELHKMWENRQNLLSQSHAYQQFLRDTKQAEAFLNNQEYVLAHTEMPTTLEGAEAAIKKQEDFMTTMDANEEKINAVVETGRRLVSDGNINSDRIQEKVDSIDDRHRKNRETASELLMRLKDNRDLQKFLQDCQELSLWINEKMLTAQDMSYDEARNLHSKWLKHQAFMAELASNKEWLDKIEKEGMQLISEKPETEAVVKEKLTGLHKMWEVLESTTQTKAQRLFDANKAELFTQSCADLDKWLHGLESQIQSDDYGKDLTSVNILLKKQQMLENQMEVRKKEIEELQSQAQALSQEGKSTDEVDSKRLTVQTKFMELLEPLNERKHNLLASKEIHQFNRDVEDEILWVGERMPLATSTDHGHNLQTVQLLIKKNQTLQKEIQGHQPRIDDIFERSQNIVTDSSSLSAEAIRQRLADLKQLWGLLIEETEKRHRRLEEAHRAQQYYFDAAEAEAWMSEQELYMMSEEKAKDEQSAVSMLKKHQILEQAVEDYAETVHQLSKTSRALVADSHPESERISMRQSKVDKLYAGLKDLAEERRGKLDERHRLFQLNREVDDLEQWIAEREVVAGSHELGQDYEHVTMLQERFREFARDTGNIGQERVDTVNHLADELINSGHSDAATIAEWKDGLNEAWADLLELIDTRTQILAASYELHKFYHDAKEIFGRIQDKHKKLPEELGRDQNTVETLQRMHTTFEHDIQALGTQVRQLQEDAARLQAAYAGDKADDIQKRENEVLEAWKSLLDACESRRVRLVDTGDKFRFFSMVRDLMLWMEDVIRQIEAQEKPRDVSSVELLMNNHQGIKAEIDARNDSFTTCIELGKSLLARKHYASEEIKEKLLQLTEKRKEMIDKWEDRWEWLRLILEVHQFSRDASVAEAWLLGQEPYLSSREIGQSVDEVEKLIKRHEAFEKSAATWDERFSALERLTTLELLEVRRQQEEEERKRRPPSPEPSTKVSEEAESQQQWDTSKGEQVSQNGLPAEQGSPRVSYRSQTYQNYKNFNSRRTASDQPWSGL

SEQ ID NO: 3397 - protein, 3674 aa, Homo sapiens
MAGQPHSPRELLGAAGHRSRRPSTELRVPPSPSLTMDSQYETGHIRKLQARHMQMQEKTFTKWINNVFQCGQAGIKIRNLYTELADGIHLLRLLELISGEALPPPSRGRLRVHFLENSSRALAFLRAKVPVPLIGPENIVDGDQTLILGLIWVIILRFQISHISLDKEEFGASAALLSTKEALLVWCQRKTASYTNVNITDFSRSWSDGLGFNALIHAHRPDLLDYGSLRPDRPLHNLAFAFLVAEQELGIAQLLDPEDVAAAQPDERSIMTYVSLYYHYCSRLHQGQTVQRRLTKILLQLQETELLQTQYEQLVADLLRWIAEKQMQLEARDFPDSLPAMRQLLAAFTIFRTQEKPPRLQQRGAAEALLFRLQTALQAQNRRPFLPHEGLGLAELSQCWAGLEWAEAARSQALQQRLLQLQRLETLARRFQHKAALRESFLKDAEQVLDQARAPPASLATVEAAVQRLGMLEAGILPQEGRFQALAEIADILRQEQYHSWADVARRQEEVTVRWQRLLQHLQGQRKQVADMQAVLSLLQEVEAASHQLEELQEPARSTACGQQLAEVVELLQRHDLLEAQVSAHGAHVSHLAQQTAELDSSLGTSVEVLQAKARTLAQLQQSLVALVRARRALLEQTLQRAEFLRNCEEEEAWLKECGQRVGNAALGRDLSQIAGALQKHKALEAEVHRHQAVCVDLVRRGRDLSARRPPTQPDPGERAEAVQGGWQLLQTRVVGRGARLQTALLVLQYFADAAEAASWLRERRSSLERASCGQDQAAAETLLRRHVRLERVLRAFAAELRRLEEQGRAASARASLFTVNSALSPPGESLRNPGPWSEASCHPGPGDAWKMALPAEPDPDFDPNTILQTQDHLSQDYESLRALAQLRRARLEEAMALFGFCSSCGELQLWLEKQTVLLQRVQPQADTLEVMQLKYENFLTALAVGKGLWAEVSSSAEQLRQRYPGNSTQIQRQQEELSQRWGQLEALKREKAVQLAHSVEVCSFLQECGPTQVQLRDVLLQLEALQPGSSEDTCHALQLAQKKTLVLERRVHFLQSVVVKVEEPGYAESQPLQGQVETLQGLLKQVQEQVAQRARRQAETQARQSFLQESQQLLLWAESVQAQLRSKEVSVDVASAQRLLREHQDLLEEIHLWQERLQQLDAQSQPMAALDCPDSQEVPNTLRVLGQQGQELKVLWEQRQQWLQEGLELQKFGREVDGFTATCANHQAWLHLDNLGEDVREALSLLQQHREFGRLLSTLGPRAEALRAHGEKLVQSQHPAAHTVREQLQSIQAQWTRLQGRSEQRRRQLLASLQLQEWKQDVAELMQWMEEKGLMAAHEPSGARRNILQTLKRHEAAESELLATRRHVEALQQVGRELLSRRPCGQEDIQTRLQGLRSKWEALNRKMTERGDELQQAGQQEQLLRQLQDAKEQLEQLEGALQSSETGQDLRSSQRLQKRHQQLESESRTLAAKMAALASMAHGMAASPAILEETQKHLRRLELLQGHLAIRGLQLQASVELHQFCHLSNMELSWVAEHMPHGSPTSYTECLNGAQSLHRKHKELQVEVKAHQGQVQRVLSSGRSLAASGHPQAQHIVEQCQELEGHWAELERACEARAQCLQQAVTFQQYFLDVSELEGWVEEKRPLVSSRDYGRDEAATLRLINKHQALQEELAIYWSSMEELDQTAQTLTGPEVPEQQRVVQERLREQLRALQELAATRDRELEGTLRLHEFLREAEDLQGWLASQKQAAKGGESLGEDPEHALHLCTKFAKFQHQVEMGSQRVAACRLLAESLLERGHSAGPMVRQRQQDLQTAWSELWELTQARGHALRDTETTLRVHRDLLEVLTQVQEKATSLPNNVARDLCGLEAQLRSHQGLERELVGTERQLQELLETAGRVQKLCPGPQAHAVQQRQQAVTQAWAVLQRRMEQRRAQLERARLLARFRTAVRDYASWAARVRQDLQVEESSQEPSSGPLKLSAHQWLRAELEAREKLWQQATQLGQQALLAAGTPTKEVQEELRALQDQRDQVYQTWARKQERLQAEQQEQLFLRECGRLEEILAAQEVSLKTSALGSSVEEVEQLIRKHEVFLKVLTAQDKKEAALRERLKTLRRPRVRDRLPILLQRRMRVKELAESRGHALHASLLMASFTQAATQAEDWIQAWAQQLKEPVPPGDLRDKLKPLLKHQAFEAEVQAHEEVMTSVAKKGEALLAQSHPRAGEVSQRLQGLRKHWEDLRQAMALRGQELEDRRNFLEFLQRVDLAEAWIQEKEVKMNVGDLGQDLEHCLQLRRRLREFRGNSAGDTVGDACIRSISDLSLQLKNRDPEEVKIICQRRSQLNNRWASFHGNLLRYQQQLEGALEIHVLSRELDNVTKRIQEKEALIQALDCGKDLESVQRLLRKHEELEREVHPIQAQVESLEREVGRLCQRSPEAAHGLRHRQQEVAESWWQLRSRAQKRREALDALHQAQKLQAMLQELLVSAQRLRAQMDTSPAPRSPVEARRMLEEHQECKAELDSWTDSISLARSTGQQLLTAGHPFSSDIRQVLAGLEQELSSLEGAWQEHQLQLQQALELQLFLSSVEKMERWLCSKEDSLASEGLWDPLAPMEPLLWKHKMLEWDLEVQAGKISALEATARGLHQGGHPEAQSALGRCQAMLLRKEALFRQAGTRRHRLEELRQLQAFLQDSQEVAAWLREKNLVALEEGLLDTAMLPAQLQKQQNFQAELDASMHQQQELQREGQRLLQGGHPASEAIQERLEELGALWGELQDNSQKKVAKLQKACEALRLRRSMEELENWLEPIEVELRAPTVGQALPGVGELLGTQRELEAAVDKKARQAEALLGQAQAFVREGHCLAQDVEEQARRLLQRFKSLREPLQERRTALEARSLLLKFFRDADEEMAWVQEKLPLAAAQDYGQSLSAVRHLQEQHQNLESEMSSHEALTRVVLGTGYKLVQAGHFAAHEVAARVQQLEKAMAHLRAEAARRRLLLQQAQEAQQFLTELLEAGSWLAERGHVLDSEDMGHSAEATQALLRRLEATKRDLEAFSPRIERLQQTAALLESRKNPESPKVLAQLQAVREAHAELLRRAEARGHGLQEQLQLHQLERETLLLDAWLTTKAATAESQDYGQDLEGVKVLEEKFDAFRKEVQSLGQAKVYALRKLAGTLERGAPRRYPHIQAQRSRIEAAWERLDQAIKARTENLAAAHEVHSFQQAAAELQGRMQEKTALMKGEDGGHSLSSVRTLQQQHRRLERELEAMEKEVARLQTEACRLGQLHPAAPGGLAKVQEAWATLQAKAQERGQWLAQAAQGHAFLGRCQELLAWAQERQELASSEELAEDVAGAEQLLGQHEELGQEIRECRLQAQDLRQEGQQLVDNSHFMSAEVTECLQELEGRLQELEEAWALRWQRCAESWGLQKLRQRLEQAEAWLACWEGLLLKPDYGHSVSDVELLLHRHQDLEKLLAAQEEKFAQMQKTEMEQELLLQPQELKPGRAGSSLTSFQWRPSGHQGLGAQLAETRDPQDAKGTPTMEGSLEFKQHLLPGGRQPSSSSWDSCRGNLQGSSLSLFLDERMAAEKVASIALLDLTGARCERLRGRHGRKHTFSLRLTSGAEILFAAPSEEQAESWWRALGSTAAQSLSPKLKAKPVSSLNECTTKDARPGCLLRSDP

SEQ ID NO: 3398 - protein, 360 aa, Homo sapiens
MEELSQALASSFSVSQDLNSTAAPHPRLSQYKSKYSSLEQSERRRRLLELQKSKRLDYVNHARRLAEDDWTGMESEEENKKDDEEMDIDTVKKLPKHYANQLMLSEWLIDVPSDLGQEWIVVVCPVGKRALIVASRGSTSAYTKSGYCVNRFSSLLPGGNRRNSTAKDYTILDCIYNEVNQTYYVLDVMCWRGHPFYDCQTDFRFYWMHSKLPEEEGLGEKTKLNPFKFVGLKNFPCTPESLCDVLSMDFPFEVDGLLFYHKQTHYSPGSTPLVGWLRPYMVSDVLGVAVPAGPLTTKPDYAGHQLQQIMEHKKSQKEGMKEKLTHKASENGHYELEHLSTPKLKGSSHSPDHPGCLMEN

SEQ ID NO: 3399 - protein, 683 aa, Homo sapiens
MDDYKYQDNYGGYAPSDGYYRGNESNPEEDAQSDVTEGHDEEDEIYEGEYQGIPHPDDVKAKQAKMAPSRMDSLRGQTDLMAERLEDEEQLAHQYETIMDECGHGRFQWILFFVLGLALMADGVEVFVVSFALPSAEKDMCLSSSKKGMLGMIVYLGMMAGAFILGGLADKLGRKRVLSMSLAVNASFASLSSFVQGYGAFLFCRLISGIGIGGALPIVFAYFSEFLSREKRGEHLSWLGIFWMTGGLYASAMAWSIIPHYGWGFSMGTNYHFHSWRVFVIVCALPCTVSMVALKFMPESPRFLLEMGKHDEAWMILKQVHDTNMRAKGTPEKVFTVSNIKTPKQMDEFIEIQSSTGTWYQRWLVRFKTIFKQVWDNALYCVMGPYRMNTLILAVVWFAMAFSYYGLTVWFPDMIRYFQDEEYKSKMKVFFGEHVYGATINFTMENQIHQHGKLVNDKFTRMYFKHVLFEDTFFDECYFEDVTSTDTYFKNCTIESTIFYNTDLYEHKFINCRFINSTFLEQKEGCHMDLEQDNDFLIYLVSFLGSLSVLPGNIISALLMDRIGRLKMIGGSMLISAVCCFFLFFGNSESAMIGWQCLFCGTSIAAWNALDVITVELYPTNQRATAFGILNGLCKFGAILGNTIFASFVGITKVVPILLAAASLVGGGLIALRLPETREQVLM

SEQ ID NO: 3400 - protein, 532 aa, Homo sapiens
MIVYLGMMAGAFILGGLADKLGRKRVLSMSLAVNASFASLSSFVQGYGAFLFCRLISGIGIGGALPIVFAYFSEFLSREKRGEHLSWLGIFWMTGGLYASAMAWSIIPHYGWGFSMGTNYHFHSWRVFVIVCALPCTVSMVALKFMPESPRFLLEMGKHDEAWMILKQVHDTNMRAKGTPEKVFTVSNIKTPKQMDEFIEIQSSTGTWYQRWLVRFKTIFKQVWDNALYCVMGPYRMNTLILAVVWFAMAFSYYGLTVWFPDMIRYFQDEEYKSKMKVFFGEHVYGATINFTMENQIHQHGKLVNDKFTRMYFKHVLFEDTFFDECYFEDVTSTDTYFKNCTIESTIFYNTDLYEHKFINCRFINSTFLEQKEGCHMDLEQDNDFLIYLVSFLGSLSVLPGNIISALLMDRIGRLKMIGGSMLISAVCCFFLFFGNSESAMIGWQCLFCGTSIAAWNALDVITVELYPTNQRATAFGILNGLCKFGAILGNTIFASFVGITKVVPILLAAASLVGGGLIALRLPETREQVLM

SEQ ID NO: 3401 - protein, 512 aa, Homo sapiens
MAGGMSAECPEPGPGGLQGQSPGPGRQCPPPITPTSWSLPPWRAYVAAAVLCYINLLNYMNWFIIAGVLLDIQEVFQISDNHAGLLQTVFVSCLLLSAPVFGYLGDRHSRKATMSFGILLWSGAGLSSSFISPRYSWLFFLSRGIVGTGSASYSTIAPTVLGDLFVRDQRTRVLAVFYIFIPVGSGLGYVLGSAVTMLTGNWRWALRVMPCLEAVALILLILLVPDPPRGAAETQGEGAVGGFRSSWCEDVRYLGKNWSFVWSTLGVTAMAFVTGALGFWAPKFLLEARVVHGLQPPCFQEPCSNPDSLIFGALTIMTGVIGVILGAEAARRYKKVIPGAEPLICASSLLATAPCLYLALVLAPTTLLASYVFLGLGELLLSCNWAVVADILLSVVVPRCRGTAEALQITVGHILGDAGSPYLTGLISSVLRARRPDSYLQRFRSLQQSFLCCAFVIALGGGCFLLTALYLERDETRAWQPVTGTPDSNDVDSNDLERQGLLSGAGASTEEP

SEQ ID NO: 3402 - protein, 385 aa, Homo sapiens
MLVCFRLYSWLFFLSRGIVGTGSASYSTIAPTVLGDLFVRDQRTRVLAVFYIFIPVGSGLGYVLGSAVTMLTGNWRWALRVMPCLEAVALILLILLVPDPPRGAAETQGEGAVGGFRSSWCEDVRYLGKNWSFVWSTLGVTAMAFVTGALGFWAPKFLLEARVVHGLQPPCFQEPCSNPDSLIFGALTIMTGVIGVILGAEAARRYKKVIPGAEPLICASSLLATAPCLYLALVLAPTTLLASYVFLGLGELLLSCNWAVVADILLSVVVPRCRGTAEALQITVGHILGDAGSPYLTGLISSVLRARRPDSYLQRFRSLQQSFLCCAFVIALGGGCFLLTALYLERDETRAWQPVTGTPDSNDVDSNDLERQGLLSGAGASTEEP

SEQ ID NO: 3403 - protein, 1216 aa, Homo sapiens
MSQAGDVEGPSTGDPVLSPQHNCELLQNMEGASSMPGLSPDGPGASSGPGVRAGSRRKIPRKEALRGGSSRAAGAAEVRPGVLELLAVVQSRGSMLAPGLHMQLPSVPTQGRALTSKRLQVSLCDILDDSCPRKLCSRSAGLPERALACRERLAGVEEVSCLRPREARDGGMSSPGCDRRSPTLSKEEPPGRPLTSSPDPVPVRVRKKWRRQGAHSECEEGAGDFLWLDQSPRGDNLLSVGDPPQVADLESLGGPCRPPSPKDTGSGPGEPGGSGAGCASGTEKFGYLPATGDGPQPGSPCGPVGFPVPSGGESLSSAAQAPPQSAALCLGASAQASAEQQEAVCVVRTGSDEGQAPAQDQEELEAKAQPASRGRLEQGLAAPADTCASSREPLGGLSSSLDTEASRACSGPFMEQRRSKGTKNLKKGPVPCAQDRGTDRSSDNSHQDRPEEPSPGGCPRLEEVKIPHGVKLVCYLGSGPVIQLLGAISHGQAGGQLPPKLEVLEDLMEVSSPSPAQRLRRKKRPMVQGPAGCQVFQPSPSGGTAGDPGGLSDPFYPPRSGSLALGDPSSDPACSQSGPMEAEEDSLPEQPEDSAQLQQEKPSLYIGVRGTVVRSMQEVLWTRLRELPDPVLSEEVVEGIAAGIEAALWDLTQGTNGRYKTKYRSLLFNLRDPRNLDLFLKVVHGDVTPYDLVRMSSMQLAPQELARWRDQEEKRGLNIIEQQQKEPCRLPASKMTHKGEVEIQRDMDQTLTLEDLVGPQMFMDCSPQALPIASEDTTGQHDHHFLDPNCHICKDWEPSNELLGSFEAAKSCGDNIFQKALSQTPMPAPEMPKTRELSPTEPQDRVPPSGLHVPAAPTKALPCLPPWEGVLDMFSIKRFRARAQLVSGHSCRLVQALPTVIRSAGCIPSNIVWDLLASICPAKAKDVCVVRLCPHGARDTQNCRLLYSYLNDRQRHGLASVEHMGMVLLPLPAFQPLPTRLRPLGGPGLWALPVSPLLSPGLEVTHSSLLLAVLLPKEGLPDTAGSSPWLGKVQKMVSFNSKVEKRYYQPDDRRPNVPLKGTPPPGGAWQQSQGRGSIAPRGISAWQRPPRGRGRLWPEPENWQHPGRGQWPPEPGLRQSQHPYSVAPAGHGFGRGQHFHRDSCPHQALLRHLESLATMSHQLQALLCPQTKSSIPRPLQRLSSALAAPEPPGPARDSSLGPTDEAGSECPFPRKA

SEQ ID NO: 3404 - protein, 1203 aa, Homo sapiens
MSQAGDVEGPSTGDPVLSPQHNCELLQNMEGASSMPGLSPDGPGASSGPGVRAGSRRKIPRKEALRGGSSRAAGAAEVRPGVLELLAVVQSRGSMLAPGLHMQLPSVPTQGRALTSKRLQVSLCDILDDSCPRKLCSRSAGLPERALACRERLAGVEEVSCLRPREARDGGMSSPGCDRRSPTLSKEEPPGRPLTSSPDPVPVRVRKKWRRQGAHSECEEGAGDFLWLDQSPRGDNLLSVGDPPQVADLESLGGPCRPPSPKDTGSGPGEPGGSGAGCASGTEKFGYLPATGDGPQPGSPCGPVGFPVPSGGESLSSAAQAPPQSAALCLGASAQASAEQQEAVCVVRTGSDEGQAPAQDQEELEAKAQPASRGRLEQGLAAPADTCASSREPLGGLSSSLDTEASRACSGPFMEQRRSKGTKNLKKGPVPCAQDRGTDRSSDNSHQDRPEEPSPGGCPRLEEVKIPHGVKLVCYLGSGPVIQLLGAISHGQAGGQLPPKLEVLEDLMEVSSPSPAQRLRRKKRPMVQGPAGCQVFQPSPSGGTAGDPGGLSDPFYPPRSGSLALGDPSSDPACSQSGPMEAEEDSLPEQPEDSAQLQQEKPSLYIGVRGTVVRSMQEVLWTRLRELPDPVLSEEVVEGIAAGIEAALWDLTQGTNGRYKTKYRSLLFNLRDPRNLDLFLKVVHGDVTPYDLVRMSSMQLAPQELARWRDQEEKRGLNIIEQQQKEPCRLPASKMTHKGEVEIQRDMDQTLTLEDLVGPQMFMDCSPQALPIASEDTTGQHDHHFLDPNCHICKDWEPSNELLGSFEAAKSCGDNIFQKALSQTPMPAPEMPKTRELSPTEPQDRVPPSGLHVPAAPTKALPCLPPWEGVLDMFSIKRFRARAQLVSGHSCRLVQALPTVIRSAGCIPSNIVWDLLASICPAKAKDVCVVRLCPHGARDTQNCRLLYSYLNDRQRHGLASVEHMGMVLLPLPAFQPLPTRLRPLGGPGLEVTHSSLLLAVLLPKEGLPDTAGSSPWLGKVQKMVSFNSKVEKRYYQPDDRRPNVPLKGTPPPGGAWQQSQGRGSIAPRGISAWQRPPRGRGRLWPEPENWQHPGRGQWPPEPGLRQSQHPYSVAPAGHGFGRGQHFHRDSCPHQALLRHLESLATMSHQLQALLCPQTKSSIPRPLQRLSSALAAPEPPGPARDSSLGPTDEAGSECPFPRKA

SEQ ID NO: 3405 - protein, 696 aa, Homo sapiens
MEVSSPSPAQRLRRKKRPMVQGPAGCQVFQPSPSGGTAGDPGGLSDPFYPPRSGSLALGDPSSDPACSQSGPMEAEEDSLPEQPEDSAQLQQEKPSLYIGVRGTVVRSMQEVLWTRLRELPDPVLSEEVVEGIAAGIEAALWDLTQGTNGRYKTKYRSLLFNLRDPRNLDLFLKVVHGDVTPYDLVRMSSMQLAPQELARWRDQEEKRGLNIIEQQQKEPCRLPASKMTHKGEVEIQRDMDQTLTLEDLVGPQMFMDCSPQALPIASEDTTGQHDHHFLDPNCHICKDWEPSNELLGSFEAAKSCGDNIFQKALSQTPMPAPEMPKTRELSPTEPQDRVPPSGLHVPAAPTKALPCLPPWEGVLDMFSIKRFRARAQLVSGHSCRLVQALPTVIRSAGCIPSNIVWDLLASICPAKAKDVCVVRLCPHGARDTQNCRLLYSYLNDRQRHGLASVEHMGMVLLPLPAFQPLPTRLRPLGGPGLEVTHSSLLLAVLLPKEGLPDTAGSSPWLGKVQKMVSFNSKVEKRYYQPDDRRPNVPLKGTPPPGGAWQQSQGRGSIAPRGISAWQRPPRGRGRLWPEPENWQHPGRGQWPPEPGLRQSQHPYSVAPAGHGFGRGQHFHRDSCPHQALLRHLESLATMSHQLQALLCPQTKSSIPRPLQRLSSALAAPEPPGPARDSSLGPTDEAGSECPFPRKA

SEQ ID NO: 3406 - protein, 132 aa, Homo sapiens
MLGWGSSFSVWCSPAPCPHQDLFLKVVHGDVTPYDLVRMSSMQLAPQELARWRDQEEKRGLNIIEQQQKEPCRLPASKMTHKGEVEIQRDMDQTLTLEDLVVKLEPDLVLGRAHAWGSHASPHQQCGLGHVT

SEQ ID NO: 3407 - protein, 544 aa, Homo sapiens
MSQAGDVEGPSTGDPVLSPQHNCELLQNMEGASSMPGLSPDGPGASSGPGVRAGSRRKIPRKEALRGGSSRAAGAAEVRPGVLELLAVVQSRGSMLAPGLHMQLPSVPTQGRALTSKRLQVSLCDILDDSCPRKLCSRSAGLPERALACRERLAGVEEVSCLRPREARDGGMSSPGCDRRSPTLSKEEPPGRPLTSSPDPVPVRVRKKWRRQGAHSECEEGAGDFLWLDQSPRGDNLLSVGDPPQVADLESLGGPCRPPSPKDTGSGPGEPGGSGAGCASGTEKFGYLPATGDGPQPGSPCGPVGFPVPSGGESLSSAAQAPPQSAALCLGASAQASAEQQEAVCVVRTGSDEGQAPAQDQEELEAKAQPASRGRLEQGLAAPADTCASSREPLGGLSSSLDTEASRACSGPFMEQRRSKGTKNLKKGPVPCAQDRGTDRSSDNSHQDRPEEPSPGGCPRLEEVKIPHGVKLVCYVFQPSPSGGTAGDPGGLSDPFYPPRSGSLALGDPSSDPACSQSGPMEAEEDSLPEQPEDSAFGSSRTQC

SEQ ID NO: 3408 - protein, 459 aa, Homo sapiens
MTSPAKFKKDKEIIAEYDTQVKEIRAQLTEQMKCLDQQCELRVQLLQDLQDFFRKKAEIEMDYSRNLEKLAEHFLAKTRSTKDQQFKKDQNVLSPVNCWNLLLNQVKWESRDHTTLSDIYLNNIIPRFVQVSEDSGRLFKKSKEVGQQLQDDLMKVLNELYSVMKTYHMYNADSISAQSKLKEAEKQEEKQIGKSVKQEDRQTPCSPDSTANVRIEEKHVRRSSVKKIEKMKEKHQAKYTENKLKAIKAQNEYLLALEATNASVFKYYIHDLSDLIDQCCDLGYHASLNRALRTFLSAELNLEQSKHEGLDAIENAVENLDATSDKQRLMEMYNNVFCPPMKFEFQPHMGDMASQLCAQQPVQSELVQRCQQLQSRLSTLKIENEEVKKTMEATLQTIQDIVTVEDFDVSDCFQYSNSMESVKSTVSETFMSKPSIAKRRANQQETEQFYFTVRECYGF

SEQ ID NO: 3409 - protein, 270 aa, Homo sapiens
MLQACKMEGFPLVPPPSEDLVPYDTDLYQRQTHEYYPYLSSDGESHSDHYWDFHPHHVHSEFESFAENNFTELQSVQPPQLQQLYRHMELEQMHVLDTPMVPPHPSLGHQVSYLPRMCLQYPSLSPAQPSSDEEEGERQSPPLEVSDGEADGLEPGPGLLPGETGSKKKIRLYQFLLDLLRSGDMKDSIWWVDKDKGTFQFSSKHKEALAHRWGIQKGNRKKMTYQKMARALRNYGKTGEVKKVKKKLTYQFSGEVLGRGGLAERRHPPH

SEQ ID NO: 3410 - protein, 271 aa, Homo sapiens
MLQACKMEGFPLVPPQPSEDLVPYDTDLYQRQTHEYYPYLSSDGESHSDHYWDFHPHHVHSEFESFAENNFTELQSVQPPQLQQLYRHMELEQMHVLDTPMVPPHPSLGHQVSYLPRMCLQYPSLSPAQPSSDEEEGERQSPPLEVSDGEADGLEPGPGLLPGETGSKKKIRLYQFLLDLLRSGDMKDSIWWVDKDKGTFQFSSKHKEALAHRWGIQKGNRKKMTYQKMARALRNYGKTGEVKKVKKKLTYQFSGEVLGRGGLAERRHPPH

SEQ ID NO: 3411 - protein, 246 aa, Homo sapiens
MNDWMPIAKEYDPLKAGSIDGTDEDPHDRAVWRAMLARYVPNKGVIGDPLLTLFVARLNLQTKEDKLKEVFSRYGDIRRLRLVRDLVTGFSKGYAFIEYKEERAVIKAYRDADGLVIDQHEIFVDYELERTLKGWIPRRLGGGLGGKKESGQLRFGGRDRPFRKPINLPVVKNDLYREGKRERRERSRSRERHWDSRTRDRDHDRGREKRWQEREPTRVWPDNDWERERDFRDDRIKGREKKERGK

SEQ ID NO: 3412 - protein, 251 aa, Homo sapiens
MKPANMNDWMPIAKEYDPLKAGSIDGTDEDPHDRAVWRAMLARYVPNKGVIGDPLLTLFVARLNLQTKEDKLKEVFSRYGDIRRLRLVRDLVTGFSKGYAFIEYKEERAVIKAYRDADGLVIDQHEIFVDYELERTLKGWIPRRLGGGLGGKKESGQLRFGGRDRPFRKPINLPVVKNDLYREGKRERRERSRSRERHWDSRTRDRDHDRGREKRWQEREPTRVWPDNDWERERDFRDDRIKGREKKERGK

SEQ ID NO: 3413 - protein, 523 aa, Homo sapiens
MAALLRRLLQRERPSAASGRPVGRREANLGTDAGVAVRVRFAPSPTGFLHLGGLRTALYNYIFAKKYQGSFILRLEDTDQTRVVPGAAENIEDMLEWAGIPPDESPRRGGPAGPYQQSQRLELYAQATEALLKTGAAYPCFCSPQRLELLKKEALRNHQTPRYDNRCRNMSQEQVAQKLAKDPKPAIRFRLEQVVPAFQDLVYGWNRHEVASVEGDPVIMKSDGFPTYHLACVVDDHHMGISHVLRGSEWLVSTAKHLLLYQALGWQPPHFAHLPLLLNRDGSKLSKRQGDVFLEHFAADGFLPDSLLDIITNCGSGFAENQMGRTLPELITQFNLTQVTCHSALLDLEKLPEFNRLHLQRLVSNESQRRQLVGKLQVLVEEAFGCQLQNRDVLNPVYVERILLLRQGHICRLQDLVSPVYSYLWTRPAVGRAQLDAISEKVDVIAKRVLGLLERSSMSLTQDMLNGELKKLSEGLEGTKYSNVMKLLRMALSGQQQGPPVAEMMLALGPKEVRERIQKVVSS

SEQ ID NO: 3414 - protein, 534 aa, Homo sapiens
MAALLRRLLQRERPSAASGRPVGRREANLGTDAGVAVRVRFAPSPTGFLHLGGLRTALYNYIFAKKYQGSFILRLEDTDQTRVVPGAAENIEDMLEWAGIPPDESPRRGGPAGPYQQSQRLELYAQATEALLKTGAAYPCFCSPQRLELLKKEALRNHQTPRYDNRCRNMSQEQVAQKLAKDPKPAIRFRLEQVVPAFQDLVYGWNRHEVASVEGDPVIMKSDGFPTYHLACVVDDHHMGISHVLRGSEWLVSTAKHLLLYQALGWQPPHFAHLPLLLNRDGSKLSKRQGDVFLEHFAADGFLPDSLLDIITNCGSGFAENQMGRTLPELITQFNLTQVTCHSALLDLEKLPEFNRLHLQRLVSNESQRRQLVGKLQVLVEEAFGCQLQNRDVLNPVYVERILLLRQGHICRLQDLVSPVYSYLWTRPAVGRAQLDAISEKVDVIAKRVLGLLERSSMSLTQDMLNGELKKLSEGLEGTKYSNVMKLLRMALSGQQVRQGHGLDCSLEPLIDPLNLHFLAGTELNIEYTKVNET

SEQ ID NO: 3415 - protein, 968 aa, Homo sapiens
MDSTLTASEIRQRFIDFFKRNEHTYVHSSATIPLDDPTLLFANAGMNQFKPIFLNTIDPSHPMAKLSRAANTQKCIRAGGKHNDLDDVGKDVYHHTFFEMLGSWSFGDYFKELACKMALELLTQEFGIPIERLYVTYFGGDEAAGLEADLECKQIWQNLGLDDTKILPGNMKDNFWEMGDTGPCGPCSEIHYDRIGGRDAAHLVNQDDPNVLEIWNLVFIQYNREADGILKPLPKKSIDTGMGLERLVSVLQNKMSNYDTDLFVPYFEAIQKGTGARPYTGKVGAEDADGIDMAYRVLADHARTITVALADGGRPDNTGRGYVLRRILRRAVRYAHEKLNASRGFFATLVDVVVQSLGDAFPELKKDPDMVKDIINEEEVQFLKTLSRGRRILDRKIQSLGDSKTIPGDTAWLLYDTYGFPVDLTGLIAEEKGLVVDMDGFEEERKLAQLKSQGKGAGGEDLIMLDIYAIEELRARGLEVTDDSPKYNYHLDSSGSYVFENTVATVMALRREKMFVEEVSTGQECGVVLDKTCFYAEQGGQIYDEGYLVKVDDSSEDKTEFTVKNAQVRGGYVLHIGTIYGDLKVGDQVWLFIDEPRRRPIMSNHTATHILNFALRSVLGEADQKGSLVAPDRLRFDFTAKGAMSTQQIKKAEEIANEMIEAAKAVYTQDCPLAAAKAIQGLRAVFDETYPDPVRVVSIGVPVSELLDDPSGPAGSLTSVEFCGGTHLRNSSHAGAFVIVTEEAIAKGIRRIVAVTGAEAQKALRKAESLKKCLSVMEAKVKAQTAPNKDVQREIADLGEALATAVIPQWQKDELRETLKSLKKVMDDLDRASKADVQKRVLEKTKQFIDSNPNQPLVILEMESGASAKALNEALKLFKMHSPQTSAMLFTVDNEAGKITCLCQVPQNAANRGLKASEWVQQVSGLMDGKGGGKDVSAQATGKNVGCLQEALQLATSFAQLRLGDVKN

SEQ ID NO: 3416 - protein, 992 aa, Homo sapiens
MDSTLTASEIRQRFIDFFKRNEHTYVHSSATIPLDDPTLLFANAGMNQFKPIFLNTIDPSHPMAKLSRAANTQKCIRAGGKHNDLDDVGKDVYHHTFFEMLGSWSFGDYFKELACKMALELLTQEFGIPIERLYVTYFGGDEAAGLEADLECKQIWQNLGTYLYSFVRLDDTKILPGNMKDNFWEMGDTGPCGPCSEIHYDRIGGRDAAHLVNQDDPNVLEIWNLVFIQYNREADGILKPLPKKSIDTGMGLERLVSVLQNKMSNYDTDLFVPYFEAIQKGTGARPYTGKVGAEDADGIDMAYRVLADHARTITVALADGGRPDNTGRGYVLRRILRRAVRYAHEKLNASRGFFATLVDVVVQSLGDAFPELKKDPDMVKDIINEEEVQFLKTLSRGRRILDRKIQSLGDSKTIPGDTAWLLYDTYGFPVDLTGLIAEEKGLVVDMDGFEEERKLAQLKSQGKGAGGEDLIMLDIYAIEELRARGLEVTDDSPKYNYHLDSSGSYVFENTVATVMALRREKMFVEEVSTGQECGVVLDKTCFYAEQGGQIYDEGYLVKVDDSSEDKTEFTVKNAQVRGGYVLHIGTIYGDLKVGDQVWLFIDEPRRRPIMSNHTATHILNFALRSVLGEADQKGSLVAPDRLRFDFTAKGAMSTQQIKKAEEIANEMIEAAKAVYTQDCPLAAAKAIQGLRAVFDETYPDPVRVVSIGVPVSELLDDPSGPAGSLTSVEFCGGTHLRNSSHAGAFVIVTEEAIAKGIRRIVAVTGAEAQKALRKAESLKKCLSVMEAKVKAQTAPNKDVQREIADLGEALATAVIPQWQKDELRETLKSLKKVMDDLDRASKADVQKRVLEKTKQFIDSNPNQPLVILEMESGASAKATQGPGSPPLGLISSLALNEALKLFKMHSPQTSAMLFTVDNEAGKITCLCQVPQNAANRGLKASEWVQQVSGLMDGKGGGKDVSAQATGKNVGCLQEALQLATSFAQLRLGDVKN

SEQ ID NO: 3417 - protein, 312 aa, Homo sapiens
MALRPEDPSSGFRHGNVVAFIIEKMARHTKGPEFYFENISLSWEEVEDKLRAILEDSEVPSEVKEACTWGSLALGVRFAHRQGQLQNRRVQWLQGFAKLHRSAALVLASNLTELKEQQEMECNEATFQLQLTETSLAEVQRERDMLRWKLFHAELAPPQGQGQATVFPGLATAGGDWTEGAGEQEKEAVAAAGAAGGKGEERYAEAGPAPAEVLQGLGGGFRQPLGAIVAGKLHLCGAEGERSQVSTNSHVCLLWAWVHSLTGASSCPAPYLIHILIPMPFVRLLSHTQYTPFTSKGHRTGSNSDAFQLGGL

SEQ ID NO: 3418 - protein, 993 aa, Homo sapiens
MAMNFGDHASGFRHDDVIRFINNEVLRNGGSPAFYTAFRSRPWNEVEDRLRAIVADPRVPRAIKRACTWSALALSVQVAARQQEELLYQVWWLQGHVEECQATSWALTSQLQQLRLEHEEVATQLHLTQAALQQVLNERDGLCGRLLEVERSMQVYPMPQDFVPGPEAGQYGPVAGTLNAEQSEAVATEAQGMPHSEAQVAAPTAVYYMPEPQSGRVQGMQPLLLMQAPHPVPFHMPSPMGLPYSTPLPPPVVMESAAAIAPQMPPAGIYPPGLWATVGSQEETAPPWDQKCHGQDGYPENFQGVYHPGDNRSCNQKEGSECPQGMTSQGDSSSHSLKKDPVMQEGTAPPEFSRSHSLEKKPVMPKEMVPLGDSNSHSLKKDPVVPKEIVPIGDSNSHSLTKNPVVHKEMVSLGDSNSHSMKKDPVMPQKMVPLGDSNSHSLKKDPMMCQEMVPLGDSNSHSLKKDPVVAQGTAPLMYSRRHSQKKVPMMPKEMVPLGESHSHSLKKDLVVPKELVPLGDSKSHRMKKDPVMPQKMVPLGDSRSHSLKKDPVMPQNMIPLEDSNSHSLKKDPVMPQNMIPLEDSNSHSLKKDPMMHQEMVPLGDSNSHSLKKDPVVPQDTAPLMFSRRHSLKKVPVMPKEMVPLGDSHSLKKDPVMPQNMVPLEDSNSHSLKKDPVVPQGTAPLMFSRRHSLKKVPVMPKEMVPLGDSNSHSLKKDPVVPQGTAPLMFSRRHSLKKVPVMPKEMVPLGDSHSLKKDPVMPQNMVPLEDSNSHSLKKDPVVPQGTAPLTFSRRHSLKKVPVVPQGTASLGFSRIHSLKKELVMPEEMVPLGDSNSHSMKKDLVMPKEMVPLGDSNSHSLKKDPVVHQEVVSLGDSNSHSLKKHPVIPQGTASLRFSKSHSQKEDQERPQVTPLEDSKSHGVKNSPWKHQPQGQKVKEQKRKKASESQQQKPASCSSPVNWACPWCNAMNFPRNKVCSKCKRVRMPVENGSVDPA

SEQ ID NO: 3419 - protein, 714 aa, Homo sapiens
MAMNFGDHASGFRHNDVIRFINNEVLMDGSGPAFYVAFRSRPWNEVEDSLQAIVADSQVPRAIKRACTWSALALSVRVATRQREELLHHVRRLQRHAEERQATSWALTSQLQQLRLEHEVAATQLHLAQAALQQALNERDGLYGRLLQIERFPQAAPLAHEIMSGPQAEQNGAAACPLATEQQSDMVAMGTHANAQMPTPTDVLYVPGPLSPWAQGMQPPLPVPHPFPHPPPFPMKFPSLPPLPPAVVTGAEAAAVPLQMPPTEIHPPCPWPAVGFQEEMAPLWYQRSYIQEEDSKILQGSFPLGDSRSHSQGEGSERSQRMPLPGDSGCHNPLSESPQGTAPLGSSGCHSQEEGTEGPQGMDPLGNRERQNQKEGPKRARRMHTLVFRRSHKSEGPEGPQGTVPQGDSRSYSQEGCSDRAQEMATLVFIRRCKPEGPKRPQWTVPLGDSRSHIKEEGPEGPQRIVLQGDNRSYSQEGSPERAQGMATLVFSRSCKPEEGPERPQDTPLGDSRSHIKEEGPEGPQRIVLQGDNRSYSQEGSPERAQGMATLVFSRSCKPEEGPERPQDTPLGDSRSHIKEEGPEGPQRIVLQGDNRSYSQEGSRERAQGMATLVFSRSCKPEEGPERPQGTPLGDSRSHGVRESPKKWQPQRQKAKKPKVNKVSGSQQQEKPASFPVPVNWKCPWCKAINFSWRTACYKCKKACVPFESGGQTQ

SEQ ID NO: 3420 - protein, 75 aa, Homo sapiens
MALKLIHKEFLELARDPQPHCSAGPVWDDMLHWQATITRPNDSSYLGGVFFLKFPSDYLFKPPKIKFTNGIYHQR

SEQ ID NO: 3421 - protein, 259 aa, Homo sapiens
MKDVDNLKSIKEEWVCETGSDNQPLGNNQQSNCEYFVDSLFEEAQKVSSKCVSPAEQKKQVDVNIKLWKNGFTVNDDFRSYSDGASQQFLNSIKKGELPSELQGIFDKEEVDVKVEDKKNEICLSTKPVFQPFSGQGHRLGSATPKIVSKAKNIEVENKNNLSAVPLNNLEPITNIQIWLANGKRIVQKFNITHRVSHIKDFIEKYQGSQRSPPFSLATALPVLRLLDETLTLEEADLQNAVIIQRLQKTASFRELSEH

SEQ ID NO: 3422 - protein, 206 aa, Homo sapiens
MKDVDNLKSIKEEWVCETGSDNQPLGNNQQSNCEYFVDSLFEEAQKVSSKCVSPAEQKKQVDVNIKLWKNGFTVNDDFRSYSDGASQQFLNSIKKGELPSELQGIFDKEEVDVKVEDKKNEICLSTKPVFQPFSGQGHRLGRVSHIKDFIEKYQGSQRSPPFSLATALPVLRLLDETLTLEEADLQNAVIIQRLQKTASFRELSEH

SEQ ID NO: 3423 - protein, 161 aa, Homo sapiens
MKELQDIARLSDRFISVELVDESLFDWNVKLHQVDKDSVLWQDMKETNTEFILLNLTFPDNFPFSPPFMRVLSPRLENGYVLDGGAICMELLTPRGWSSAYTVEAVMRQFAASLVKGQGRICRKAGKSKKSFSRKEAEATFKSLVKTHEKYGWVTPPVSDG

SEQ ID NO: 3424 - protein, 597 aa, Homo sapiens
MAAVQAAEVKVDGSEPKLSKNELKRRLKAEKKVAEKEAKQKELSEKQLSQATAAATNHTTDNGVGPEEESVDPNQYYKIRSQAIHQLKVNGEDPYPHKFHVDISLTDFIQKYSHLQPGDHLTDITLKVAGRIHAKRASGGKLIFYDLRGEGVKLQVMANSRNYKSEEEFIHINNKLRRGDIIGVQGNPGKTKKGELSIIPYEITLLSPCLHMLPHLHFGLKDKETRYRQRYLDLILNDFVRQKFIIRSKIITYIRSFLDELGFLEIETPMMNIIPGGAVAKPFITYHNELDMNLYMRIAPELYHKMLVVGGIDRVYEIGRQFRNEGIDLTHNPEFTTCEFYMAYADYHDLMEITEKMVSGMVKHITGSYKVTYHPDGPEGQAYDVDFTPPFRRINMVEELEKALGMKLPETNLFETEETRKILDDICVAKAVECPPPRTTARLLDKLVGEFLEVTCINPTFICDHPQIMSPLAKWHRSKEGLTERFELFVMKKEICNAYTELNDPMRQRQLFEEQAKAKAAGDDEAMFIDENFCTALEYGLPPTAGWGMGIDRVAMFLTDSNNIKEVLLFPAMKPEDKKENVATTDTLESTTVGTSV

SEQ ID NO: 3425 - protein, 625 aa, Homo sapiens
MLTQAAVRLVRGSLRKTSWAEWGHRELRLGQLAPFTAPHKDKSFSDQRSELKRRLKAEKKVAEKEAKQKELSEKQLSQATAAATNHTTDNGVGPEEESVDPNQYYKIRSQAIHQLKVNGEDPYPHKFHVDISLTDFIQKYSHLQPGDHLTDITLKVAGRIHAKRASGGKLIFYDLRGEGVKLQVMANSRNYKSEEEFIHINNKLRRGDIIGVQGNPGKTKKGELSIIPYEITLLSPCLHMLPHLHFGLKDKETRYRQRYLDLILNDFVRQKFIIRSKIITYIRSFLDELGFLEIETPMMNIIPGGAVAKPFITYHNELDMNLYMRIAPELYHKMLVVGGIDRVYEIGRQFRNEGIDLTHNPEFTTCEFYMAYADYHDLMEITEKMVSGMVKHITGSYKVTYHPDGPEGQAYDVDFTPPFRRINMVEELEKALGMKLPETNLFETEETRKILDDICVAKAVECPPPRTTARLLDKLVGEFLEVTCINPTFICDHPQIMSPLAKWHRSKEGLTERFELFVMKKEICNAYTELNDPMRQRQLFEEQAKAKAAGDDEAMFIDENFCTALEYGLPPTAGWGMGIDRVAMFLTDSNNIKEVLLFPAMKPEDKKENVATTDTLESTTVGTSV

SEQ ID NO: 3426 - protein, 492 aa, Homo sapiens
MATKPTEPVTILSLRKLSLGTAEPQVKEPKTFTVEDAVETIGFGRFHIALFLIMGSTGVVEAMEIMLIAVVSPVIRCEWQLENWQVALVTTMVFFGYMVFSILFGLLADRYGRWKILLISFLWGAYFSLLTSFAPSYIWFVFLRTMVGCGVSGHSQGLIIKTEFLPTKYRGYMLPLSQVFWLAGSLLIIGLASVIIPTIGWRWLIRVASIPGIILIVAFKFIPESARFNVSTGNTRAALATLERVAKMNRSVMPEGKLVEPVLEKRGRFADLLDAKYLRTTLQIWVIWLGISFAYYGVILASAELLERDLVCGSKSDSAVVVTGGDSGESQSPCYCHMFAPSDYRTMIISTIGEIALNPLNILGINFLGRRLSLSITMGCTALFFLLLNICTSSAGLIGFLFMLRALVAANFNTVYIYTAEVYPTTMRALGMGTSGSLCRIGAMVAPFISQVLMSASILGALCLFSSVCVVCAISAFTLPIETKGRALQQIK

SEQ ID NO: 3427 - protein, 340 aa, Homo sapiens
MAAGRLIIKTEFLPTKYRGYMLPLSQVFWLAGSLLIIGLASVIIPTIGWRWLIRVASIPGIILIVAFKFIPESARFNVSTGNTRAALATLERVAKMNRSVMPEGKLVEPVLEKRGRFADLLDAKYLRTTLQIWVIWLGISFAYYGVILASAELLERDLVCGSKSDSAVVVTGGDSGESQSPCYCHMFAPSDYRTMIISTIGEIALNPLNILGINFLGRRLSLSITMGCTALFFLLLNICTSSAGLIGFLFMLRALVAANFNTVYIYTAEVYPTTMRALGMGTSGSLCRIGAMVAPFISQVLMSASILGALCLFSSVCVVCAISAFTLPIETKGRALQQIK

SEQ ID NO: 3428 - protein, 525 aa, Homo sapiens
MEGPAEWGPEAALGPEAVLRFLAERGGRALHAELVQHFRGALGGEPEQRARARAHFKELVNAVATVRVDPADGAKYVHLKKRFCEGPSEPSGDPPRIQVTAEPEAPDGPAGPEARDRLPDAAAPESLPGQGRELGEGEPPAPAHWPPLSAGARRKNSRRDVQPLPRTPAPGPSEDLELPPHGCEEADRGSSLVGATAQRPARQNLRDLVMGSSPQLKRSVCPGGSSPGSSSGGGRGRGGGDSDSASVASSSAEEESSGGGSVTLDPLEHAWMLSASDGKWDSLEGLLTCEPGLLVKRDFITGFTCLHWAAKHGRQELLAMLVNFANKHQLPVNIDARTSGGYTALHLAAMHGHVEVVKLLVGAYDADVDIRDYSGKKASQYLSRSIAEEIKNLVGALDEGDGESAAGSGGGRWRLSKVLPSHLITYKLSHALEDGGDHHHHHHSAEGWVGGKAKDPGRKASGSSSGRIKPRLNKIRFRTQIVHTTPSFRDPEQPLEGRGEEGVGEERPVKGHSPFTLRPKSNVFG

SEQ ID NO: 3429 - protein, 380 aa, Homo sapiens
MAGSDVDSEGPARRGGAARRPGAPGGPGSEAAAGCPEPLSTAEAPAESATLPAWMRLYFYGMHGITLDVLVSSARRFARSPDLRMLGFSSPYRCLLHSLTHFALEKVYLQQRRCPNAFVFNFLLYPSAHVGLQTLAGQALLLSLGGGAGVAVAPGALDLALQYVLALYHCQVFLKRFLRLRYGRQRRRQQQQQQQQQQQQRRGALPVPPGARVPTAAGARRRRPRGPRGAGGAPSQGLPDLPRFLFFGMHGFLDEIFFTFFFNVLGQGDGTTSGHTSLWSFFMYGSCSFVVEKLYFHLHYSRGWGTWKRVPIYVIFIYVWELSWGLGLRTCGACSWDYSHYPLNFMGLITLMYLPGWIFLSVYQDLISNVLWRVQYVPAN

SEQ ID NO: 3430 - protein, 1073 aa, Homo sapiens
MHQPPESTAAAAAAADISARKMAHPAMFPRRGSGSGSASALNAAGTGVGSNATSSEDFPPPSLLQPPPPAASSTSGPQPPPPQSLNLLSQAQLQAQPLAPGGTQMKKKSGFQITSVTPAQISASISSNNSIAEDTESYDDLDESHTEDLSSSEILDVSLSRATDLGEPERSSSEETLNNFQEAETPGAVSPNQPHLPQPHLPHLPQQNVVINGNAHPHHLHHHHQIHHGHHLQHGHHHPSHVAVASASITGGPPSSPVSRKLSTTGSSDSITPVAPTSAVSSSGSPASVMTNMRAPSTTGGIGINSVTGTSTVNNVNITAVGSFNPNVTSSMLGNVNISTSNIPSAAGVSVGPGVTSGVNVNILSGMGNGTISSSAAVSSVPNAAAGMTGGSVSSQQQQPTVNTSRFRVVKLDSSSEPFKKGRWTCTEFYEKENAVPATEGVLINKVVETVKQNPIEVTSERESTSGSSVSSSVSTLSHYTESVGSGEMGAPTVVVQQQQQQQQQQQQQPALQGVTLQQMDFGSTGPQSIPAVSIPQSISQSQISQVQLQSQELSYQQKQGLQPVPLQATMSAATGIQPSPVNVVGVTSALGQQPSISSLAQPQLPYSQAAPPVQTPLPGAPPPQQLQYGQQQPMVSTQMAPGHVKSVTQNPASEYVQQQPILQTAMSSGQPSSAGVGAGTTVIPVAQPQGIQLPVQPTAVPAQPAGASVQPVGQAPAAVSAVPTGSQIANIGQQANIPTAVQQPSTQVPPSVIQQGAPPSSQVVPPAQTGIIHQGVQTSAPSLPQQLVIASQSSLLTVPPQPQGVEPVAQGIVSQQLPAVSSLPSASSISVTSQVSSTGPSGMPSAPTNLVPPQNIAQTPATQNGNLVQSVSQPPLIATNTNLPLAQQIPLSSTQFSAQSLAQAIGSQIEDARRAAEPSLVGLPQTISGDSGGMSAVSDGSSSSLAASASLFPLKVLPLTTPLVDGEDESSSGASVVAIDNKIEQAMDLVKSHLMYAVREEVEVLKEQIKELIEKNSQLEQENNLLKTLASPEQLAQFQAQLQTGSPPATTQPQGTTQPPAQPASQGSGPTA

SEQ ID NO: 3431 - protein, 144 aa, Homo sapiens
MKSQWCRPVAMDLGVYQLRHFSISFLSSLLGTENASVRLDNSSSGASVVAIDNKIEQAMDLVKSHLMYAVREEVEVLKEQIKELIEKNSQLEQENNLLKTLASPEQLAQFQAQLQTGSPPATTQPQGTTQPPAQPASQGSGPTA

SEQ ID NO: 3432 - protein, 585 aa, Homo sapiens
MGAPTVVVQQQQQQQQQQQQQPALQGVTLQQMDFGSTGPQSIPAVSIPQSISQSQISQVQLQSQELSYQQKQGLQPVPLQATMSAATGIQPSPVNVVGVTSALGQQPSISSLAQPQLPYSQAAPPVQTPLPGAPPPQQLQYGQQQPMVSTQMAPGHVKSVTQNPASEYVQQQPILQTAMSSGQPSSAGVGAGTTVIPVAQPQGIQLPVQPTAVPAQPAGASVQPVGQAPAAVSAVPTGSQIANIGQQANIPTAVQQPSTQVPPSVIQQGAPPSSQVVPPAQTGIIHQGVQTSAPSLPQQLVIASQSSLLTVPPQPQGVEPVAQGIVSQQLPAVSSLPSASSISVTSQVSSTGPSGMPSAPTNLVPPQNIAQTPATQNGNLVQSVSQPPLIATNTNLPLAQQIPLSSTQFSAQSLAQAIGSQIEDARRAAEPSLVGLPQTISGDSGGMSAVSDGSSSSLAASASLFPLKVLPLTTPLVDGEDESSSGASVVAIDNKIEQAMDLVKSHLMYAVREEVEVLKEQIKELIEKNSQLEQENNLLKTLASPEQLAQFQAQLQTGSPPATTQPQGTTQPPAQPASQGSGPTA

SEQ ID NO: 3433 - protein, 570 aa, Homo sapiens
MHQPPESTAAAAAAADISARKMAHPAMFPRRGSGSGSASALNAAGTGVGSNATSSEDFPPPSLLQPPPPAASSTSGPQPPPPQSLNLLSQAQLQAQPLAPGGTQMKKKSGFQITSVTPAQISASISSNNSIAEDTESYDDLDESHTEDLSSSEILDVSLSRATDLGEPERSSSEETLNNFQEAETPGAVSPNQPHLPQPHLPHLPQQNVVINGNAHPHHLHHHHQIHHGHHLQHGHHHPSHVAVASASITGGPPSSPVSRKLSTTGSSDSITPVAPTSAVSSSGSPASVMTNMRAPSTTGGIGINSVTGTSTVNNVNITAVGSFNPNVTSSMLGNVNISTSNIPSAAGVSVGPGVTSGVNVNILSGMGNGTISSSAAVSSVPNAAAGMTGGSVSSQQQQPTVNTSRFRVVKLDSSSEPFKKGRWTCTEFYEKENAVPATEGVLINKVVETVKQNPIEVTSERESTSGSSVSSSVSTLSHYTESVGSGEMGAPTVVVQQQQQQQQQQQQQPALQGVTLQQMDFGSTGPQSIPAVSIPQSISQSQISQVQLQSQELSYLTMKVVLLIVYLCM

SEQ ID NO: 3434 - protein, 312 aa, Homo sapiens
MPKTEETVLQNDPSVAENGAPEPKTPGQSQKSKSFCLDDQSPDLIETVNEVSKLSISHEIVVNQDFYVEETILPPNSVEGRFAEAMYNAFWNHLKEQLLSTPPDFTCALELLKDVKETLLSLLLPWQNRLRNEIEEALDTDLLKQEAEHGALDVPHLSNYILNLMALLCAPVRDEAIQKLETIRDPVQLLRGILRVLGLMKMDMVNYTIQSFRPYLQEHSIQYEQAKFQELLDKQPSLLDYTTKWLTKAATDITTLCPSSPDSPSSSCSMACSLPSGADSADGQNPAPGTGIPVAPVNCPGLSLASGQKLLW

SEQ ID NO: 3435 - protein, 186 aa, Homo sapiens
MTKGRRFNPPSDKDGRWFPHIGLTQKTPESITSATSKEPQSPHLPRQAEGKLPPIYKVREKQAVNNQFPFSVHDNRHSLENSGCYLDSGLGRKKISPDKRQHVSRNFNLWACDYVPSCLDGFSNNQISYVYKEAMVVSSFRRFPRCYKEIWNAFTFLPERSYTEVLKKKPKVRFTVDKKVVSSLES

SEQ ID NO: 3436 - protein, 1294 aa, Homo sapiens
MEKSGPSSTISEQQLQRQEGWINTKTDLAEQSLISSEKWLQLHGLKSNKLTLKQILSQIGFPHCEDYVASLGRPVASRYADGLFPQLYRAEDGRVYNLTAKSELIYQFVEHLTQAVESYKQRMDWLTSKSRQIFGVILEQCVTIVLDFGGILEGELDLCREALTMVLQEQVAHITEFNIIRVSQEPVKWQENATPVTEQSIATAISWVEKLTVELTVSEAGRLDALLEAGRDKTIESIYYFVVGDVPEESKELLLQRALEIPCPVYTVSFNARGEGTIAFLKDLSAKTHSRFHAFAERTECVEFPAFSTKDGDNVMTWNSRKLKGKLPPGAGVREDVFLVWQEMEEACSTLAQIQRLVAEPPKPDVATVDCESETTSVEIASNPEDTWDSKTWLQKYGLKAQKLSLYDVLADCSFRHADGVVDIKAKPENESVQTSAETNKKTVHAKYCSRFVHAPWKDGSLVHVNITKEKCKWYSERIHTALARIRRRIKWLQDGSQSLFGRLHNDCIYILIDTSHSMKSKLDLVKDKIIQFIQEQLKYKSKFNFVKFDGQAVAWREQLAEVNEDNLEQAQSWIRDIKIGSSTNTLSALKTAFADKETQAIYLLTDGRPDQPPETVIDQVKRFQEIPIYTISFNYNDEIANRFLKEVAALTGGEFHFYNFGCKDPTPPEAVQNEDLTLLVKEMEQGHSDLEKMQDLYSESLIMDWWYNAEKDGDSKHQKEICSMISTPEKCAKPQSDVDSTQTSSLNMLKGPWGLSDQKVQKKKVLHAESTKTSLLRSQMSSLRSSACSERKDGLSNASSRRTALSDKEMSILLAEEWLDDKSSEKVTREGSQVYDHDSSDVSSENWLKTYGLVAKKLTLMDALSVAAVPHSSTYVPVLDKHVVSKVFDEVFPLAHVCNDTNKMTLINPQGAKLNIYKRKVEQAIQSYEKRLNKIVWRALSQEEKEKLDANKPIQYLENKTVLNQALERLNWPISLKELSMLESEILAGKMYIQQAMELQEAAKKNYANKAPGEQQKLQGNPTKKTKSKRPDPLKGQKVIARCDENGFYFPGVVKKCVSRTQALVGFSYGDTKVVSTSFITPVGGAMPCPLLQVGDYVFAKIVIPKGFDFYVPAIVIALPNKHVATEKFYTVLKCNNRREFCPRSALIKISQNKYALSCSHIKSPPIPEDPEVEDVEARNSAFLFWPLKEADTQDSREPRREKPRRKKRPAKQPLQQAAPSDSDGSSHGISSHGSCQGTHPEPRTAHLHFPAAGRLGLSSHAIIATPPPRAALPCTLQATHSSKGLRSVPETL

SEQ ID NO: 3437 - protein, 624 aa, Homo sapiens
MEKSGPSSTISEQQLQRQEGWINTKTDLAEQSLISSEKWLQLHGLKSNKLTLKQILSQIGFPHCEDYVASLGRPVASRYADGLFPQLYRAEDGRVYNLTAKSELIYQFVEHLTQAVESYKQRMDWLTSKSRQIFGVILEQCVTIVLDFGGILEGELDLCREALTMVLQEQVAHITEFNIIRVSQEPVKWQENATPVTEQSIATAISWVEKLTVELTVSEAGRLDALLEAGRDKTIESIYYFVVGDVPEESKELLLQRALEIPCPVYTVSFNARGEGTIAFLKDLSAKTHSRFHAFAERTECVEFPAFSTKDGDNVMTWNSRKLKGKLPPGAGVREDVFLVWQEMEEACSTLAQIQRLVAEPPKPDVATVDCESETTSVEIASNPEDTWDSKTWLQKYGLKAQKLSLYDVLADCSFRHADGVVDIKAKPENESVQTSAETNKKTVHAKYCSRFVHAPWKDGSLVHVNITKEKCKWYSERIHTALARIRRRIKWLQDGSQSLFGRLHNDCIYILIDTSHSMKSKLDLVKDKIIQFIQEQLKYKSKFNFVKFDGQAVAWREQLAEVNEDNLEQAQSWIRDIKIGSSTNTLSALKTAFADKETQAIYLLTDGRPDQGTSSHLLLTAAV

SEQ ID NO: 3438 - protein, 416 aa, Homo sapiens
MATKGMRLKSTKEVFPLAHVCNDTNKMTLINPQGAKLNIYKRKVEQAIQSYEKRLNKIVWRALSQEEKEKLDANKPIQYLENKTVLNQALERLNWPISLKELSMLESEILAGKMYIQQAMELQEAAKKNYANKAPGEQQKLQGNPTKKTKSKRPDPLKGQKVIARCDENGFYFPGVVKKCVSRTQALVGFSYGDTKVVSTSFITPVGGAMPCPLLQVGDYVFAKIVIPKGFDFYVPAIVIALPNKHVATEKFYTVLKCNNRREFCPRSALIKISQNKYALSCSHIKSPPIPEDPEVEDVEARNSAFLFWPLKEADTQDSREPRREKPRRKKRPAKQPLQQAAPSDSDGSSHGISSHGSCQGTHPEPRTAHLHFPAAGRLGLSSHAIIATPPPRAALPCTLQATHSSKGLRSVPETL

SEQ ID NO: 3439 - protein, 401 aa, Homo sapiens
MATKGMRLKSTKEVFPLAHVCNDTNKMTLINPQGAKLNIYKRKVEQAIQSYEKRLNKIVWRALSQEEKEKLDANKPIQYLENKTVLNQALERLNWPISLKELSMLESEILAGKMYIQQAMELQEAAKKNYANKAPGEQQKLQGNPTKKTKSKRPDPLKGQKVIARCDENGFYFPGVVKKCVSRTQALVGFSYGDTKVVSTSFITPVGGAMPCPLLQVGDYVFAKIVIPKGFDFYVPAIVIALPNKHVATEKFYTVLKCNNRREFCPRSALIKISQNKYALSCSHIKSPPIPEDPEVEDVEARNSAFLFWPLKEADTQDSREPRREKPRRKKRPAKQPLQQAAPSDSDGSSHGISSHGPPPLPRGRASRTQQPRHHCHTSTSSSPALYSPSHPQQQRAEERP

SEQ ID NO: 3440 - protein, 686 aa, Homo sapiens
MCIIPPETVIDQVKRFQEIPIYTISFNYNDEIANRFLKEVAALTGGEFHFYNFGCKDPTPPEAVQNEDLTLLVKEMEQGHSDLEKMQDLYSESLIMDWWYNAEKDGDSKHQKEICSMISTPEKCAKPQSDVDSTQTSSLNMLKGPWGLSDQKVQKKKVLHAESTKTSLLRSQMSSLRSSACSERKDGLSNASSRRTALSDKEMSILLAEEWLDDKSSEKVTREGSQVYDHDSSDVSSENWLKTYGLVAKKLTLMDALSVAAVPHSSTYVPVLDKHVVSKVFDEVFPLAHVCNDTNKMTLINPQGAKLNIYKRKVEQAIQSYEKRLNKIVWRALSQEEKEKLDANKPIQYLENKTVLNQALERLNWPISLKELSMLESEILAGKMYIQQAMELQEAAKKNYANKAPGEQQKLQGNPTKKTKSKRPDPLKGQKVIARCDENGFYFPGVVKKCVSRTQALVGFSYGDTKVVSTSFITPVGGAMPCPLLQVGDYVFAKIVIPKGFDFYVPAIVIALPNKHVATEKFYTVLKCNNRREFCPRSALIKISQNKYALSCSHIKSPPIPEDPEVEDVEARNSAFLFWPLKEADTQDSREPRREKPRRKKRPAKQPLQQAAPSDSDGSSHGISSHGSCQGTHPEPRTAHLHFPAAGRLGLSSHAIIATPPPRAALPCTLQATHSSKGLRSVPETL

SEQ ID NO: 3441 - protein, 1312 aa, Homo sapiens
MEKSGPSSTISEQQLQRQEGWINTKTDLAEQSLISSEKWLQLHGLKSNKLTLKQILSQIGFPHCEDYVASLGRPVASRYADGLFPQLYRAEDGRVYNLTAKSELIYQFVEHLTQAVESYKQRMDWLTSKSRQIFGVILEQCVTIVLDFGGILEGELDLCREALTMVLQEQVAHITEFNIIRVSQEPVKWQENATPVTEQSIATAISWVEKLTVELTVSEAGRLDALLEAGRDKTIESIYYFVVGDVPEESKELLLQRALEIPCPVYTVSFNARGEGTIAFLKDLSAKTHSRFHAFAERTECVEFPAFSTKDGDNVMTWNSRKLKGKLPPGAGVREDVFLVWQEMEEACSTLAQIQRLVAEPPKPDVATVDCESETTSVEIASNPEDTWDSKTWLQKYGLKAQKLSLYDVLADCSFRHADGVVDIKAKPENESVQTSAETNKKTVHAKYCSRFVHAPWKDGSLVHVNITKEKCKWYSERIHTALARIRRRIKWLQDGSQSLFGRLHNDCIYILIDTSHSMKSKLDLVKDKIIQFIQEQLKYKSKFNFVKFDGQAVAWREQLAEVNEDNLEQAQSWIRDIKIGSSTNTLSALKTAFADKETQAIYLLTDGRPDQPPETVIDQVKRFQEIPIYTISFNYNDEIANRFLKEVAALTGGEFHFYNFGCKDPTPPEAVQNEDLTLLVKEMEQGHSDLEKMQDLYSESLIMDWWYNAEKDGDSKHQKEICSMISTPEKCAKPQSDVDSTQTSSLNMLKGPWGLSDQKVQKKKVLHAESTKTSLLRSQMSSLRSSACSERKDGLSNASSRRTALSDKEMSILLAEEWLDDKSSEKVTREGSQVYDHDSSDVSSENWLKTYGLVAKKLTLMDALSVAAVPHSSTYVPVLDKHVVSKVFDEVFPLAHVCNDTNKMTLINPQGAKLNIYKRKVEQAIQSYEKRLNKIVWRALSQEEKEKLDANKPIQYLENKTVLNQALERLNWPISLKELSMLESEILAGKMYIQQAMELQEAAKKNYANKAPGEQQKLQGNPTKKTKSKRPDPLKGQKVIARCDENGFYFPGVVKKCVSRTQALVGFSYGDTKVVSTSFITPVGGAMPCPLLQVGDYVFAKIVIPKGFDFYVPAIVIALPNKHVATEKFYTVLKCNNRREFCPRSALIKISQNKYALSCSHIKSPPIPEDPEVEDVEARNSAFLFWPLKEADTQDSREPRREKPRRKKRPAKQPLQQAAPSDSDGSSHGISSHGSCQGTHPEPRVWVMGGEHNIAYLRNTLKSLSRIVHLTSSFRFWACLGSSAAKTLTSLSNAELCFPRQPTSTSPRPGV

SEQ ID NO: 3442 - protein, 570 aa, Homo sapiens
MISTPEKCAKPQSDVDSTQTSSLNMLKGPWGLSDQKVQKKKVLHAESTKTSLLRSQMSSLRSSACSERKDGLSNASSRRTALSDKEMSILLAEEWLDDKSSEKVTREGSQVYDHDSSDVSSENWLKTYGLVAKKLTLMDALSVAAVPHSSTYVPVLDKHVVSKVFDEVFPLAHVCNDTNKMTLINPQGAKLNIYKRKVEQAIQSYEKRLNKIVWRALSQEEKEKLDANKPIQYLENKTVLNQALERLNWPISLKELSMLESEILAGKMYIQQAMELQEAAKKNYANKAPGEQQKLQGNPTKKTKSKRPDPLKGQKVIARCDENGFYFPGVVKKCVSRTQALVGFSYGDTKVVSTSFITPVGGAMPCPLLQVGDYVFAKIVIPKGFDFYVPAIVIALPNKHVATEKFYTVLKCNNRREFCPRSALIKISQNKYALSCSHIKSPPIPEDPEVEDVEARNSAFLFWPLKEADTQDSREPRREKPRRKKRPAKQPLQQAAPSDSDGSSHGISSHGSCQGTHPEPRTAHLHFPAAGRLGLSSHAIIATPPPRAALPCTLQATHSSKGLRSVPETL

SEQ ID NO: 3443 - protein, 1080 aa, Homo sapiens
MEKSGPSSTISEQQLQRQEGWINTKTDLAEQSLISSEKWLQLHGLKSNKLTLKQILSQIGFPHCEDYVASLGRPVASRYADGLFPQLYRAEDGRVYNLTAKSELIYQFVEHLTQAVESYKQRMDWLTSKSRQIFGVILEQCVTIVLDFGGILEGELDLCREALTMVLQEQVAHITEFNIIRVSQEPVKWQENATPVTEQSIATAISWVEKLTVELTVSEAGRLDALLEAGRDKTIESIYYFVVGDVPEESKELLLQRALEIPCPVYTVSFNARGEGTIAFLKDLSAKTHSRFHAFAERTECVEFPAFSTKDGDNVMTWNSRKLKGKLPPGAGVREDVFLVWQEMEEACSTLAQIQRLVAEPPKPDVATVDCESETTSVEIASNPEDTWDSKTWLQKYGLKAQKLSLYDVLADCSFRHADGVVDIKAKPENESVQTSAETNKKTVHAKYCSRFVHAPWKDGSLVHVNITKEKCKWYSERIHTALARIRRRIKWLQDGSQSLFGRLHNDCIYILIDTSHSMKSKLDLVKDKIIQFIQEQLKYKSKFNFVKFDGQAVAWREQLAEVNEDNLEQAQSWIRDIKIGSSTNTLSALKTAFADKETQAIYLLTDGRPDQPPETVIDQVKRFQEIPIYTISFNYNDEIANRFLKEVAALTGGEFHFYNFGCKDPTPPEAVQNEDLTLLVKEMEQGHSDLEKMQDLYSESLIMDWWYNAEKDGDSKHQKEICSMISTPEKCAKPQSDVDSTQTSSLNMLKGPWGLSDQKVQKKKVLHAESTKTSLLRSQMSSLRSSACSERKDGLSNASSRRTALSDKEMSILLAEEWLDDKSSEKVTREGSQVYDHDSSDVSSENWLKTYGLVAKKLTLMDALSVAAVPHSSTYVPVLDKHVVSKVFDEVFPLAHVCNDTNKMTLINPQGAKLNIYKRKVEQAIQSYEKRLNKIVWRALSQEEKEKLDANKPIQYLENKTVLNQALERLNWPISLKELSMLESEILAGKMYIQQAMELQEAAKKNYANKAPGEQQKLQGNPTKKTKSKRPDPLKGQKVIARCDENGFYFPGSFFFFNFVRLLLNNLILGTRSFNLCFC

SEQ ID NO: 3444 - protein, 577 aa, Homo sapiens
MVICCAAVNCSNRQGKGEKRAVSFHRFPLKDSKRLIQWLKAVQRDNWTPTKYSFLCSEHFTKDSFSKRLEDQHRLLKPTAVPSIFHLTEKKRGAGGHGRTRRKDASKATGGVRGHSSAATSRGAAGWSPSSSGNPMAKPESRRLKQAALQGEATPRAAQEAASQEQAQQALERTPGDGLATMVAGSQGKAEASATDAGDESATSSIEGGVTDKSGISMDDFTPPGSGACKFIGSLHSYSFSSKHTRERPSVPREPIDRKRLKKDVEPSCSGSSLGPDKGLAQSPPSSSLTATPQKPSQSPSAPPADVTPKPATEAVQSEHSDASPMSINEVILSASGACKLIDSLHSYCFSSRQNKSQVCCLREQVEKKNGELKSLRQRVSRSDSQVRKLQEKLDELRRVSVPYPSSLLSPSREPPKMNPVVEPLSWMLGTWLSDPPGAGTYPTLQPFQYLEEVHISHVGQPMLNFSFNSFHPDTRKPMHRECGFIRLKPDTNKVAFVSAQNTGVVEVEEGEVNGQELCIASHSIARISFAKEPHVEQITRKFRLNSEGKLEQTVSMATTTQPMTQHLHVTYKKVTP

SEQ ID NO: 3445 - protein, 165 aa, Homo sapiens
MEPPKMNPVVEPLSWMLGTWLSDPPGAGTYPTLQPFQYLEEVHISHVGQPMLNFSFNSFHPDTRKPMHRECGFIRLKPDTNKVAFVSAQNTGVVEVEEGEVNGQELCIASHSIARISFAKEPHVEQITRKFRLNSEGKLEQTVSMATTTQPMTQHLHVTYKKVTP

SEQ ID NO: 3446 - protein, 518 aa, Homo sapiens
MADADEGFGLAHTPLEPDAKDLPCDSKPESALGAPSKSPSSPQAAFTQQGMEGIKVFLHERELWLKFHEVGTEMIITKAGRRMFPSYKVKVTGLNPKTKYILLMDIVPADDHRYKFADNKWSVTGKAEPAMPGRLYVHPDSPATGAHWMRQLVSFQKLKLTNNHLDPFGHIILNSMHKYQPRLHIVKADENNGFGSKNTAFCTHVFPETAFIAVTSYQNHKITQLKIENNPFAKGFRGSDDMELHRMSRMQSKEYPVVPRSTVRQKVASNHSPFSSESRALSTSSNLGSQYQCENGVSGPSQDLLPPPNPYPLPQEHSQIYHCTKRKEEECSTTDHPYKKPYMETSPSEEDSFYRSSYPQQQGLGASYRTESAQRQACMYASSAPPSEPVPSLEDISCNTWPSMPSYSSCTVTTVQPMDRLPYQHFSAHFTSGPLVPRLAGMANHGSPQLGEGMFQHQTSVAHQPVVRQCGPQTGLQSPGTLQPPEFLYSHGVPRTLSPHQYHSVHGVGMVPEWSDNS

SEQ ID NO: 3447 - protein, 349 aa, Homo sapiens
MADADEGFGLAHTPLEPDAKDLPCDSKPESALGAPSKSPSSPQAAFTQQGMEGIKVFLHERELWLKFHEVGTEMIITKAGRRMFPSYKVKVTGLNPKTKYILLMDIVPADDHRYKFADNKWSVTGKAEPAMPGRLYVHPDSPATGAHWMRQLVSFQKLKLTNNHLDPFGHIILNSMHKYQPRLHIVKADENNGFGSKNTAFCTHVFPETAFIAVTSYQNHKITQLKIENNPFAKGFRGSDDMELHRMSRMQSKEYPVVPRSTVRQKVASNHSPFSSESRALSTSSNLGSQYQCENGVSGPSQDLLPPPNPYPLPQEHSQIYHCTKRKGECDHPWSICFLSYLFLSLGWG

SEQ ID NO: 3448 - protein, 468 aa, Homo sapiens
MEGIKVFLHERELWLKFHEVGTEMIITKAGRRMFPSYKVKVTGLNPKTKYILLMDIVPADDHRYKFADNKWSVTGKAEPAMPGRLYVHPDSPATGAHWMRQLVSFQKLKLTNNHLDPFGHIILNSMHKYQPRLHIVKADENNGFGSKNTAFCTHVFPETAFIAVTSYQNHKITQLKIENNPFAKGFRGSDDMELHRMSRMQSKEYPVVPRSTVRQKVASNHSPFSSESRALSTSSNLGSQYQCENGVSGPSQDLLPPPNPYPLPQEHSQIYHCTKRKEEECSTTDHPYKKPYMETSPSEEDSFYRSSYPQQQGLGASYRTESAQRQACMYASSAPPSEPVPSLEDISCNTWPSMPSYSSCTVTTVQPMDRLPYQHFSAHFTSGPLVPRLAGMANHGSPQLGEGMFQHQTSVAHQPVVRQCGPQTGLQSPGTLQPPEFLYSHGVPRTLSPHQYHSVHGVGMVPEWSDNS

SEQ ID NO: 3449 - protein, 327 aa, Homo sapiens
MSFLGGFFGPICEIDIVLNDGETRKMAEMKTEDGKVEKHYLFYDGESVSGKVNLAFKQPGKRLEHQGIRIEFVGQIELFNDKSNTHEFVNLVKELALPGELTQSRSYDFEFMQVEKPYESYIGANVRLRYFLKVTIVRRLTDLVKEYDLIVHQLATYPDVNNSIKMEVGIEDCLHIEFEYNKSKYHLKDVIVGKIYFLLVRIKIQHMELQLIKKEITGIGPSTTTETETIAKYEIMDGAPVKGESIPIRLFLAGYDPTPTMRDVNKKFSVRYFLNLVLVDEEDRRYFKQQEIILWRKAPEKLRKQRTNFHQRFESPESQASAEQPEM

SEQ ID NO: 3450 - protein, 251 aa, Homo sapiens
MSFLGGFFGPICEIDIVLNDGETRKMAEMKTEDGKVEKHYLFYDGESVSGKVNLAFKQPGKRLEHQGIRIEFVGQIELFNDKSNTHEFVNLVKELALPGELTQSRSYDFEFMQVEKPYESYIGANVRLRYFLKVTIVRRLTDLVKEYDLIVHQLATYPDVNNSIKMEVGIEDCLHIEFEYNKSKYHLKDVIVGKIYFLLVRIKIQHMELQLIKKEITGIGPSTTTETETIAKYEIMDGAPVKGDNFMEKSS

SEQ ID NO: 3451 - protein, 280 aa, Homo sapiens
MELGHGAGTTTFTRAHLNDKEGQQDLDPWKAAYSSLDTSKFKNQGLSSPQPLPLGASAQGSSLGQCHLKEIPPPPPTAASRDSLGMDPQSRSLKNAGSRSSSRENRATSGEGAQPCQGTDDGPSLGAQDQRSTPTNQKGSIIPNNIRHKFGSNVVDQLVSEEQAQKAIDEVFEGQKRASSWPSRTQNPVEISSVFSDYYDLGYNMRSNLFRGAAEETKSLMKASYTPEVIEKSVRDLEHWHGRKTDDLGRWHQKNAMNLNLQKALEEKYGENSKSKSSKY

SEQ ID NO: 3452 - protein, 195 aa, Homo sapiens
MDPQSRSLKNAGSRSSSRENRATSGEGAQPCQGTDDGPSLGAQDQRSTPTNQKGSIIPNNIRHKFGSNVVDQLVSEEQAQKAIDEVFEGQKRASSWPSRTQNPVEISSVFSDYYDLGYNMRSNLFRGAAEETKSLMKASYTPEVIEKSVRDLEHWHGRKTDDLGRWHQKNAMNLNLQKALEEKYGENSKSKSSKY

SEQ ID NO: 3453 - protein, 465 aa, Homo sapiens
MENQEFLSSSAPSEVTDGQVSTEISTCSEVFQKPIVLRILDTHRELEESEDPEKHENPEEPEEVREQDQRDESEECDEPHESYEPHAPYAPHKPRDSYAPYELHGPHAAPKLLKAREPRQLRHTREPRKSREAKETELLPSAAVMISPSLITRAPPRPQLSFLGANPVSCDFVRKCFSSRKRTPNLSKPKKQWGTPDRKLFWGNQDPIRPVSQGALKAQLTKRLENLAQPKEVSCHYVPNRAQYYHSCGRESVIWEITPPALFRQPSKRIQRLSQPNGFKRQCLLNRPFSDNSARDSLRISDPSPRILQLSVAKGTDPNYHPSKKMQTKISLSTLSAIATPRIIELAHPRIKLEGLCYERQRSELPIRPVPPAAMIAKPSPRTIALAKSKSVHQDYLPDRDAHWPVSYATTHSKASPRIQELANPNKRAPVRIVYYDPDVFKTKPAALKAQCSQRIWELSQPLTR

SEQ ID NO: 3454 - protein, 384 aa, Homo sapiens; identical to SEQ ID NO: 227

SEQ ID NO: 3455 - protein, 269 aa, Homo sapiens; identical to SEQ ID NO: 228

SEQ ID NO: 3456 - protein, 495 aa, Homo sapiens; identical to SEQ ID NO: 229

SEQ ID NO: 3457 - protein, 380 aa, Homo sapiens; identical to SEQ ID NO: 230

SEQ ID NO: 3458 - protein, 365 aa, Homo sapiens; identical to SEQ ID NO: 231

SEQ ID NO: 3459 - protein, 250 aa, Homo sapiens; identical to SEQ ID NO: 232

SEQ ID NO: 3460 - protein, 494 aa, Homo sapiens; identical to SEQ ID NO: 233

SEQ ID NO: 3461 - protein, 379 aa, Homo sapiens; identical to SEQ ID NO: 234

SEQ ID NO: 3462 - protein, 369 aa, Homo sapiens; identical to SEQ ID NO: 235

SEQ ID NO: 3463 - protein, 254 aa, Homo sapiens; identical to SEQ ID NO: 236

SEQ ID NO: 3464 - protein, 370 aa, Homo sapiens; identical to SEQ ID NO: 237

SEQ ID NO: 3465 - protein, 255 aa, Homo sapiens
MYKETVYSAFNLLMHYPPPSGAGQHPQPQPPLHKANQPPHGVPQLSLYEHFNSPHPTPAPADISQKQVHRPLQTPDLSGFYSLTSGSMGQLPHTVSWFTHPSLMLGSGVPGHPAAIPHPAIVPPSGKQELQPFDRNLKTQAESKAEKEAKKPTIKKPLNAFMLYMKEMRAKVIAECTLKESAAINQILGRRWHALSREEQAKYYELARKERQLHMQLYPGWSARDNYGKKKRRSREKHQESTTQLEDWDGWARKP

SEQ ID NO: 3466 - protein, 384 aa, Homo sapiens; identical to SEQ ID NO: 239

SEQ ID NO: 3467 - protein, 269 aa, Homo sapiens; identical to SEQ ID NO: 240

SEQ ID NO: 3468 - protein, 383 aa, Homo sapiens; identical to SEQ ID NO: 241

SEQ ID NO: 3469 - protein, 268 aa, Homo sapiens; identical to SEQ ID NO: 242

SEQ ID NO: 3470 - protein, 1177 aa, Homo sapiens
MLQLLVLKIEDPGCFWVIIKGCSPFLDHDVDYQKLNSAMNDFYNSTCQDIEIKPLTLEEGQVCVVYCEELKCWCRAIVKSITSSADQYLAECFLVDFAKNIPVKSKNIRVVVESFMQLPYRAKKFSLYCTKPVTLHIDFCRDSTDIVPAKKWDNAAIQYFQNLLKATTQVEARLCAVEEDTFEVYLYVTIKDEKVCVNDDLVAKNYACYMSPTKNKNLDYLEKPRLNIKSAPSFNKLNPALTLWPMFLQGKDVQGMEDSHGVNFPAQSLQHTWCKGIVGDLRPTATAQDKAVKCNMDSLRDSPKDKSEKKHHCISLKDTNKRVESSVYWPAKRGITIYADPDVPEASALSQKSNEKPLRLTEKKEYDEKNSCVKLLQFLNPDPLRADGISDLQQLQKLKGLQPPVVVLRNKIKPCLTIDSSPLSADLKKALQRNKFPGPSHTESYSWPPIARGCDVVVISHCESNPLLYLLPVLTVLQTGACYKSLPSRNGPLAVIVCPGWKKAQFIFELLGEYSMSSRPLHPVLLTIGLHKEEAKNTKLPRGCDVIVTTPYSLLRLLACQSLLFLRLCHLILDEVEVLFLEANEQMFAILDNFKKNIEVEERESAPHQIVAVGVHWNKHIEHLIKEFMNDPYIVITAMEEAALYGNVQQVVHLCLECEKTSSLLQALDFIPSQAQKTLIFTCSVAETEIVCKVVESSSIFCLKMHKEMIFNLQNVLEQWKKKLSSGSQIILALTDDCVPLLAITDATCVIHFSFPASPKVFGGRLYCMSDHFHAEQGSPAEQGDKKAKSVLLLTEKDASHAVGVLRYLERADAKVPAELYEFTAGVLEAKEDKKAGRPLCPYLKAFGFCKDKRICPDRHRINPETDLPRKLSSQALPSFGYIKIIPFYILNATNYFGRIVDKHMDLYATLNAEMNEYFKDSNKTTVEKVEKFGLYGLAEKTLFHRVQVLEVNQKEDAWALDDILVEFIDEGRTGLVTRDQLLHLPEHFHTLPPQAVEFIVCRVKPADNEIEWNPKVTRYIHHKIVGKLHDAKVILALGNTVWIDPMVHITNLSSLKTSVIDYNVRAEILSMGMGIDNPEHIEQLKKLREDAKIPACEESLSQTPPRVTGTSPAQDQDHPSEEQGGQGTPPAEDAACLQSPQPEDTGAEGGAESKTSSENQKPGGYLVFKRWLSSNR

SEQ ID NO: 3471 - protein, 395 aa, Homo sapiens
MLQLLVLKIEDPGCFWVIIKGCSPFLDHDVDYQKLNSAMNDFYNSTCQDIEIKPLTLEEGQVCVVYCEELKCWCRAIVKSITSSADQYLAECFLVDFAKNIPVKSKNIRVVVESFMQLPYRAKKFSLYCTKPVTLHIDFCRDSTDIVPAKKWDNAAIQYFQNLLKATTQVEARLCAVEEDTFEVYLYVTIKDEKVCVNDDLVAKNYACYMSPTKNKNLDYLEKPRLNIKSAPSFNKLNPALTLWPMFLQGKDVQGMEDSHGVNFPAQSLQHTWCKGIVGDLRPTATAQDKAVKCNMDSLRDSPKDKSEKKHHCISLKDTNKRVESSVYWPAKRGITIYADPDVPEASALSQKSNEKPLRLTEKKEYDEKNSCVKLLQFLNPDPLRADGISDLQQT

SEQ ID NO: 3472 - protein, 435 aa, Homo sapiens
MAQTVPPCELPCKEYDVARNTGAYTSSGLATASFRTSKYLLEEWFQNCYARYHQAFADRDQSERQRHESQQLATETQALAQRTQQDSTRTVGERLQDTHSWKSELQREMEALAAETNLLLAQKQRLERALDATEVPFSITTDNLQCRERREHPNLVRDHVETELLKEAELIRNIQELLKRTIMQAVSQIRLNREHKETCEMDWSDKMEAYNIDETCGRHHSQSTEVQAHPYSTTFQESASTPETRAKFTQDNLCRAQRERLASANLRVLVDCILRDTSEDLRLQCDAVNLAFGRRCEELEDARYKLHHHLHKTLREITDQEHNVAALKQAIKDKEAPLHVAQTRLYLRSHRPNMELCRDAAQFRLLSEVEELNMSLTALREKLLEAEQSLRNLEDIHMSLEKDIAAMTNSLFIDRQKCMAHRTRYPTILQLAGYQ

SEQ ID NO: 3473 - protein, 490 aa, Homo sapiens
MERVGCTLTTTYAHPRPTPTNFLPAISTMASSYRDRFPHSNLTHSLSLPWRPSTYYKVASNSPSVAPYCTRSQRVSENTMLPFVSNRTTFFTRYTPDDWYRSNLTNYQESNTSRHNSEKLRVDTSRLIQDKYQQTRKTQADTTQNLGERVNDIGFWKSEIIHELDEMIGETNALTDVKKRLERALMETEAPLQVARECLFHREKRMGIDLVHDEVEAQLLTEVDTILCCQERMKLHLDKAIAQLAANRASQHELEKDLSDKQTAYRIDDKCHHLRNTSDGVGYFRGVERVDATVSVPESWAKFTDDNILRSQSERAASAKLRDDIENLLVVTANEMWNQFNKVNLSFTNRIAETADAKNKIQTHLAKTLQEIFQTEMTIESIKKAIKDKTAFLKVAQTRLDERTRRPNIELCRDMAQLRLVNEVHEVDDTIQTLQQRLRDAEDTLQSLVHIKATLEYDLAVKANSLYIDQEKCMSMRKSYPNTLRLVGFC

SEQ ID NO: 3474 - protein, 723 aa, Homo sapiens
MAAAATMAAAARELVLRAGTSDMEEEEGPLAGGPGLQEPLQLGELDITSDEFILDEVDVHIQANLEDELVKEALKTGVDLRHYSKQVELELQQIEQKSIRDYIQESENIASLHNQITACDAVLERMEQMLGAFQSDLSSISSEIRTLQEQSGAMNIRLRNRQAVRGKLGELVDGLVVPSALVTAILEAPVTEPRFLEQLQELDAKAAAVREQEARGTAACADVRGVLDRLRVKAVTKIREFILQKIYSFRKPMTNYQIPQTALLKYRFFYQFLLGNERATAKEIRDEYVETLSKIYLSYYRSYLGRLMKVQYEEVAEKDDLMGVEDTAKKGFFSKPSLRSRNTIFTLGTRGSVISPTELEAPILVPHTAQRGEQRYPFEALFRSQHYALLDNSCREYLFICEFFVVSGPAAHDLFHAVMGRTLSMTLKHLDSYLADCYDAIAVFLCIHIVLRFRNIAAKRDVPALDRYWEQVLALLWPRFELILEMNVQSVRSTDPQRLGGLDTRPHYITRRYAEFSSALVSINQTIPNERTMQLLGQLQVEVENFVLRVAAEFSSRKEQLVFLINNYDMMLGVLMERAADDSKEVESFQQLLNARTQEFIEELLSPPFGGLVAFVKEAEALIERGQAERLRGEEARVTQLIRGFGSSWKSSVESLSQDVMRSFTNFRNGTSIIQGALTQLIQLYHRFHRVLSQPQLRALPARAELINIHHLMVELKKHKPNF

SEQ ID NO: 3475 - protein, 598 aa, Homo sapiens
MEQMLGAFQSDLSSISSEIRTLQEQSGAMNIRLRNRQAVRGKLGELVDGLVVPSALVTAILEAPVTEPRFLEQLQELDAKAAAVREQEARGTAACADVRGVLDRLRVKAVTKIREFILQKIYSFRKPMTNYQIPQTALLKYRFFYQFLLGNERATAKEIRDEYVETLSKIYLSYYRSYLGRLMKVQYEEVAEKDDLMGVEDTAKKGFFSKPSLRSRNTIFTLGTRGSVISPTELEAPILVPHTAQRGEQRYPFEALFRSQHYALLDNSCREYLFICEFFVVSGPAAHDLFHAVMGRTLSMTLKHLDSYLADCYDAIAVFLCIHIVLRFRNIAAKRDVPALDRYWEQVLALLWPRFELILEMNVQSVRSTDPQRLGGLDTRPHYITRRYAEFSSALVSINQTIPNERTMQLLGQLQVEVENFVLRVAAEFSSRKEQLVFLINNYDMMLGVLMERAADDSKEVESFQQLLNARTQEFIEELLSPPFGGLVAFVKEAEALIERGQAERLRGEEARVTQLIRGFGSSWKSSVESLSQDVMRSFTNFRNGTSIIQGALTQLIQLYHRFHRVLSQPQLRALPARAELINIHHLMVELKKHKPNF

SEQ ID NO: 3476 - protein, 434 aa, Homo sapiens
MEGTAGTITSNEWSSPTSPEGSTASGGSQALDKPIDNDAEGVWSPDIEQSFQEALAIYPPCGRRKIILSDEGKMYGRNELIARYIKLRTGKTRTRKQVSSHIQVLARRKAREIQAKLKDQAAKDKALQSMAAMSSAQIISATAFHSSMALARGPGRPAVSGFWQGALPGQAGTSHDVKPFSQQTYAVQPPLPLPGFESPAGPAPSPSAPPAPPWQGRSVASSKLWMLEFSAFLEQQQDPDTYNKHLFVHIGQSSPSYSDPYLEAVDIRQIYDKFPEKKGGLKDLFERGPSNAFFLVKFWADLNTNIEDEGSSFYGVSSQYESPENMIITCSTKVCSFGKQVVEKVETEYARYENGHYSYRIHRSPLCEYMINFIHKLKHLPEKYMMNSVLENFTILQVVTNRDTQETLLCIAYVFEVSASEHGAQHHIYRLVKE

SEQ ID NO: 3477 - protein, 305 aa, Homo sapiens
MAAMSSAQIISATAFHSSMALARGPGRPAVSGFWQGALPGQAGTSHDVKPFSQQTYAVQPPLPLPGFESPAGPAPSPSAPPAPPWQGRSVASSKLWMLEFSAFLEQQQDPDTYNKHLFVHIGQSSPSYSDPYLEAVDIRQIYDKFPEKKGGLKDLFERGPSNAFFLVKFWADLNTNIEDEGSSFYGVSSQYESPENMIITCSTKVCSFGKQVVEKVETEYARYENGHYSYRIHRSPLCEYMINFIHKLKHLPEKYMMNSVLENFTILQVVTNRDTQETLLCIAYVFEVSASEHGAQHHIYRLVKE

SEQ ID NO: 3478 - protein, 391 aa, Homo sapiens
MEGTAGTITSNEWSSPTSPEGSTASGGSQALDKPIDNDAEGVWSPDIEQSFQEALAIYPPCGRRKIILSDEGKMYGRNELIARYIKLRTGKTRTRKQVSSHIQVLARRKAREIQAKLKFWQGALPGQAGTSHDVKPFSQQTYAVQPPLPLPGFESPAGPAPSPSAPPAPPWQGRSVASSKLWMLEFSAFLEQQQDPDTYNKHLFVHIGQSSPSYSDPYLEAVDIRQIYDKFPEKKGGLKDLFERGPSNAFFLVKFWADLNTNIEDEGSSFYGVSSQYESPENMIITCSTKVCSFGKQVVEKVETEYARYENGHYSYRIHRSPLCEYMINFIHKLKHLPEKYMMNSVLENFTILQVVTNRDTQETLLCIAYVFEVSASEHGAQHHIYRLVKE

SEQ ID NO: 3479 - protein, 400 aa, Homo sapiens
MNGQLDLSGKLIIKAQLGEDIRRIPIHNEDITYDELVLMMQRVFRGKLLSNDEVTIKYKDEDGDLITIFDSSDLSFAIQCSRILKLTLFVNGQPRPLESSQVKYLRRELIELRNKVNRLLDSLEPPGEPGPSTNIPENDTVDGREEKSASDSSGKQSTQVMAASMSAFDPLKNQDEINKNVMSAFGLTDDQVSGPPSAPAEDRSGTPDSIASSSSAAHPPGVQPQQPPYTGAQTQAGQIEGQMYQQYQQQAGYGAQQPQAPPQQPQQYGIQYSASYSQQTGPQQPQQFQGYGQQPTSQAPAPAFSGQPQQLPAQPPQQYQASNYPAQTYTAQTSQPTNYTVAPASQPGMAPSQPGAYQPRPGFTSLPGSTMTPPPSGPNPYARNRPPFGQGYTQPGPGYR

SEQ ID NO: 3480 - protein, 396 aa, Homo sapiens
MNGQLDLSGKLIIKAQLGEDIRRIPIHNEDITYDELVLMMQRVFRGKLLSNDEVTIKYKDEDGDLITIFDSSDLSFAIQCSRILKLTLFVNGQPRPLESSQVKYLRRELIELRNKVNRLLDSLEPPGEPGPSTNIPENDTVDGREEKSASDSSGKQSTQVMAASMSAFDPLKNQDEINKNVMSAFGLTDDQVSGPPSAPAEDRSGTPDSIASSSSAAHPPGVQPQQPPYTGAQTQAGQMYQQYQQQAGYGAQQPQAPPQQPQQYGIQYSASYSQQTGPQQPQQFQGYGQQPTSQAPAPAFSGQPQQLPAQPPQQYQASNYPAQTYTAQTSQPTNYTVAPASQPGMAPSQPGAYQPRPGFTSLPGSTMTPPPSGPNPYARNRPPFGQGYTQPGPGYR

SEQ ID NO: 3481 - protein, 284 aa, Homo sapiens
MNGQLDLSGKLIIKAQLGEDIRRIPIHNEDITYDELVLMMQRVFRGKLLSNDEVTIKYKDEDGDLITIFDSSDLSFAIQCSRILKLTLFVNGQPRPLESSQVKYLRRELIELRNKVNRLLDSLEPPGEPGPSTNIPENDTVDGREEKSASDSSGKQSTQVMAASMSAFDPLKNQDEINKNVMSAFGLTDDQVSGPPSAPAEDRSGTPDSIASSSSAAHPPGVQPQQPPYTGAQTQAGQIEGQMYQQYQQQAGYGAQQPQAPPQQPQQYGIQYSGFQSMERFHCK

SEQ ID NO: 3482 - protein, 280 aa, Homo sapiens
MNGQLDLSGKLIIKAQLGEDIRRIPIHNEDITYDELVLMMQRVFRGKLLSNDEVTIKYKDEDGDLITIFDSSDLSFAIQCSRILKLTLFVNGQPRPLESSQVKYLRRELIELRNKVNRLLDSLEPPGEPGPSTNIPENDTVDGREEKSASDSSGKQSTQVMAASMSAFDPLKNQDEINKNVMSAFGLTDDQVSGPPSAPAEDRSGTPDSIASSSSAAHPPGVQPQQPPYTGAQTQAGQMYQQYQQQAGYGAQQPQAPPQQPQQYGIQYSGFQSMERFHCK

SEQ ID NO: 3483 - protein, 84 aa, Homo sapiens
MATMENKVICALVLVSMLALGTLAEAQTETCTVAPRERQNCGFPGVTPSQCANKGCCFDDTVRGVPWCFYPNTIDVPPEEECEF

SEQ ID NO: 3484 - protein, 1358 aa, Homo sapiens
MGADGETVVLKNMLIGINLILLGSMIKPSECQLEVTTERVQRQSVEEEGGIANYNTSSKEQPVVFNHVYNINVPLDNLCSSGLEASAEQEVSAEDETLAEYMGQTSDHESQVTFTHRINFPKKACPCASSAQVLQELLSRIEMLEREVSVLRDQCNANCCQESAATGQLDYIPHCSGHGNFSFESCGCICNEGWFGKNCSEPYCPLGCSSRGVCVDGQCICDSEYSGDDCSELRCPTDCSSRGLCVDGECVCEEPYTGEDCRELRCPGDCSGKGRCANGTCLCEEGYVGEDCGQRQCLNACSGRGQCEEGLCVCEEGYQGPDCSAVAPPEDLRVAGISDRSIELEWDGPMAVTEYVISYQPTALGGLQLQQRVPGDWSGVTITELEPGLTYNISVYAVISNILSLPITAKVATHLSTPQGLQFKTITETTVEVQWEPFSFSFDGWEISFIPKNNEGGVIAQVPSDVTSFNQTGLKPGEEYIVNVVALKEQARSPPTSASVSTVIDGPTQILVRDVSDTVAFVEWIPPRAKVDFILLKYGLVGGEGGRTTFRLQPPLSQYSVQALRPGSRYEVSVSAVRGTNESDSATTQFTTEIDAPKNLRVGSRTATSLDLEWDNSEAEVQEYKVVYSTLAGEQYHEVLVPRGIGPTTRATLTDLVPGTEYGVGISAVMNSQQSVPATMNARTELDSPRDLMVTASSETSISLIWTKASGPIDHYRITFTPSSGIASEVTVPKDRTSYTLTDLEPGAEYIISVTAERGRQQSLESTVDAFTGFRPISHLHFSHVTSSSVNITWSDPSPPADRLILNYSPRDEEEEMMEVSLDATKRHAVLMGLQPATEYIVNLVAVHGTVTSEPIVGSITTGIDPPKDITISNVTKDSVMVSWSPPVASFDYYRVSYRPTQVGRLDSSVVPNTVTEFTITRLNPATEYEISLNSVRGREESERICTLVHTAMDNPVDLIATNITPTEALLQWKAPVGEVENYVIVLTHFAVAGETILVDGVSEEFRLVDLLPSTHYTATMYATNGPLTSGTISTNFSTLLDPPANLTASEVTRQSALISWQPPRAEIENYVLTYKSTDGSRKELIVDAEDTWIRLEGLLENTDYTVLLQAAQDTTWSSITSTAFTTGGRVFPHPQDCAQHLMNGDTLSGVYPIFLNGELSQKLQVYCDMTTDGGGWIVFQRRQNGQTDFFRKWADYRVGFGNVEDEFWLGLDNIHRITSQGRYELRVDMRDGQEAAFASYDRFSVEDSRNLYKLRIGSYNGTAGDSLSYHQGRPFSTEDRDNDVAVTNCAMSYKGAWWYKNCHRTNLNGKYGESRHSQGINWYHWKGHEFSIPFVEMKMRPYNHRLMAGRKRQSLQF

SEQ ID NO: 3485 - protein, 1268 aa, Homo sapiens
MGADGETVVLKNMLIGINLILLGSMIKPSECQLEVTTERVQRQSVEEEGGIANYNTSSKEQPVVFNHVYNINVPLDNLCSSGLEASAEQEVSAEDETLAEYMGQTSDHESQVTFTHRINFPKKACPCASSAQVLQELLSRIEMLEREVSVLRDQCNANCCQESAATGQLDYIPHCSGHGNFSFESCGCICNEGWFGKNCSEPYCPLGCSSRGVCVDGQCICDSEYSGDDCSELRCPTDCSSRGLCVDGECVCEEPYTGEDCRELRCPGDCSGKGRCANGTCLCEEGYVGEDCGQRQCLNACSGRGQCEEGLCVCEEGYQGPDCSAVAPPEDLRVAGISDRSIELEWDGPMAVTEYVISYQPTALGGLQLQQRVPGDWSGVTITELEPGLTYNISVYAVISNILSLPITAKVATHLSTPQGLQFKTITETTVEVQWEPFSFSFDGWEISFIPKNNEGGVIAQVPSDVTSFNQTGLKPGEEYIVNVVALKEQARSPPTSASVSTVIDGPTQILVRDVSDTVAFVEWIPPRAKVDFILLKYGLVGGEGGRTTFRLQPPLSQYSVQALRPGSRYEVSVSAVRGTNESDSATTQFTTEIDAPKNLRVGSRTATSLDLEWDNSEAEVQEYKVVYSTLAGEQYHEVLVPRGIGPTTRATLTDLVPGTEYGVGISAVMNSQQSVPATMNARTELDSPRDLMVTASSETSISLIWTKASGPIDHYRITFTPSSGIASEVTVPKDRTSYTLTDLEPGAEYIISVTAERGRQQSLESTVDAFTGIDPPKDITISNVTKDSVMVSWSPPVASFDYYRVSYRPTQVGRLDSSVVPNTVTEFTITRLNPATEYEISLNSVRGREESERICTLVHTAMDNPVDLIATNITPTEALLQWKAPVGEVENYVIVLTHFAVAGETILVDGVSEEFRLVDLLPSTHYTATMYATNGPLTSGTISTNFSTLLDPPANLTASEVTRQSALISWQPPRAEIENYVLTYKSTDGSRKELIVDAEDTWIRLEGLLENTDYTVLLQAAQDTTWSSITSTAFTTGGRVFPHPQDCAQHLMNGDTLSGVYPIFLNGELSQKLQVYCDMTTDGGGWIVFQRRQNGQTDFFRKWADYRVGFGNVEDEFWLGLDNIHRITSQGRYELRVDMRDGQEAAFASYDRFSVEDSRNLYKLRIGSYNGTAGDSLSYHQGRPFSTEDRDNDVAVTNCAMSYKGAWWYKNCHRTNLNGKYGESRHSQGINWYHWKGHEFSIPFVEMKMRPYNHRLMAGRKRQSLQF

SEQ ID NO: 3486 - protein, 265 aa, Homo sapiens
MSAAPLVGYSSSGSEDESEDGMRTRPGDGSHRRGQSPLPRQRFPVPDSVLNMFPGTEEGPEDDSTKHGGRVRTFPHERGNWATHVYVPYEAKEEFLDLLDVLLPHAQTYVPRLVRMKVFHLSLSQSVVLRHHWILPFVQALKARMTSFHRFFFTANQVKIYTNQEKTRTFIGLEVTSGHAQFLDLVSEVDRVMEEFNLTTFYQDPSFHLSLAWCVGDARLQLEGQCLQELQAIVDGFEDAEVLLRVHTEQVRCKSGNKFFSMPLK

SEQ ID NO: 3487 - protein, 247 aa, Homo sapiens
MSAAPLVGYSSSGSEDESEDGMRTRPGDGSHRRGQSPLPRQRFPVPDSVLNMFPGTEEGPEDDSTKHGGRVRTFPHERGNWATHVYVPYEAKEEFLDLLDVLLPHAQTYVPRLVRMKVFHLSLSQSVVLRHHWILPFVQALKARMTSFHRTFIGLEVTSGHAQFLDLVSEVDRVMEEFNLTTFYQDPSFHLSLAWCVGDARLQLEGQCLQELQAIVDGFEDAEVLLRVHTEQVRCKSGNKFFSMPLK

SEQ ID NO: 3488 - protein, 186 aa, Homo sapiens
MSAAPLVGYSSSGSEDESEDGMRTRPGDGSHRRGQSPLPRQRFPVPDSVLNMFPGTEEGPEDDSTKHGGRVRTFPHERGNWATHVYVPYEAKEEFLDLLDVLLPHAQTYVPRLVRMKVFHLSLSQSVVLRHHWILPFVQALKARMTSFHSPHPGPHCLIGTKDAPVTQEIPKDLGALRQEPGSQTR

SEQ ID NO: 3489 - protein, 962 aa, Homo sapiens
MNFLRGVMGGQSAGPQHTEAETIQKLCDRVASSTLLDDRRNAVRALKSLSKKYRLEVGIQAMEHLIHVLQTDRSDSEIIGYALDTLYNIISNEEEEEVEENSTRQSEDLGSQFTEIFIKQQENVTLLLSLLEEFDFHVRWPGVKLLTSLLKQLGPQVQQIILVSPMGVSRLMDLLADSREVIRNDGVLLLQALTRSNGAIQKIVAFENAFERLLDIISEEGNSDGGIVVEDCLILLQNLLKNNNSNQNFFKEGSYIQRMKPWFEVGDENSGWSAQKVTNLHLMLQLVRVLVSPTNPPGATSSCQKAMFQCGLLQQLCTILMATGVPADILTETINTVSEVIRGCQVNQDYFASVNAPSNPPRPAIVVLLMSMVNERQPFVLRCAVLYCFQCFLYKNQKGQGEIVSTLLPSTIDATGNSVSAGQLLCGGLFSTDSLSNWCAAVALAHALQENATQKEQLLRVQLATSIGNPPVSLLQQCTNILSQGSKIQTRVGLLMLLCTWLSNCPIAVTHFLHNSANVPFLTGQIAENLGEEEQLVQGLCALLLGISIYFNDNSLESYMKEKLKQLIEKRIGKENFIEKLGFISKHELYSRASQKPQPNFPSPEYMIFDHEFTKLVKELEGVITKAIYKSSEEDKKEEEVKKTLEQHDNIVTHYKNMIREQDLQLEELRQQVSTLKCQNEQLQTAVTQQVSQIQQHKDQYNLLKIQLGKDNQHQGSYSEGAQMNGIQPEEIGRLREEIEELKRNQELLQSQLTEKDSMIENMKSSQTSGTNEQSSAIVSARDSEQVAELKQELATLKSQLNSQSVEITKLQTEKQELLQKTEAFAKSVEVQGETETIIATKTTDVEGRLSALLQETKELKNEIKALSEERTAIKEQLDSSNSTIAILQTEKDKLELEITDSKKEQDDLLVLLADQDQKILSLKNKLKDLGHPVEEEDELESGDQEDEDDESEDPGKDLDHI

SEQ ID NO: 3490 - protein, 973 aa, Homo sapiens
MNFLRGVMGGQSAGPQHTEAETIQKLCDRVASSTLLDDRRNAVRALKSLSKKYRLEVGIQAMEHLIHVLQTDRSDSEIIGYALDTLYNIISNEEEEEVDDVEEENSTRQSEDLGSQFTEIFIKQQENVTLLLSLLEEFDFHVRWPGVKLLTSLLKQLGPQVQQIILVSPMGVSRLMDLLADSREVIRNDGVLLLQALTRSNGAIQKIVAFENAFERLLDIISEEGNSDGGIVVEDCLILLQNLLKNNNSNQNFFKEGSYIQRMKPWFEVGDENSGWSAQKVTNLHLMLQLVRVLVSPTNPPGATSSCQKAMFQCGLLQQLCTILMATGVPADILTETINTVSEVIRGCQVNQDYFASVNAPSNPPRPAIVVLLMSMVNERQPFVLRCAVLYCFQCFLYKNQKGQGEIVSTLLPSTIDATGNSVSAGQLLCGGLFSTDSLSNWCAAVALAHALQENATQKEQLLRVQLATSIGNPPVSLLQQCTNILSQGDKIDRRGSKIQTRVGLLMLLCTWLSNCPIAVTHFLHNSANVPFLTGQIAENLGEEEQLVQGLCALLLGISIYFNDNSLESYMKEKLKQLIEKRIGKENFIEKLGFISKHELYSRASQKPQPNFPSPEYMIFDHEFTKLVKELEGVITKAIYKSSEEDKKEEEVKKTLEQHDNIVTHYKNMIREQDLQLEELRQQVSTLKCQNEQLQTAVTQQVSQIQQHKDQYNLLKIQLGKDNQHQGSYSEGAQMNGIQPEEIGRLREEIEELKRNQELLQSQLTEKDSMIENMKSSQTSGTNEQSSAIVSARDSEQVAELKQELATLKSQLNSQSVEITKLQTEKQELLQKTEAFAKSVEVQGETETIIATKTTDVEGRLSALLQETKELKNEIKALSEERTAIKEQLDSSNSTIAILQTEKDKLELEITDSKKEQDDLLVLLADQDQKILSLKNKLKDLGHPVEEEDELESGDQEDEDDESEDPGKDLDHI

SEQ ID NO: 3491 - protein, 582 aa, Homo sapiens
MESVKQRILAPGKEGLKNFAGKSLGQIYRVLEKKQDTGETIELTEDGKPLEVPERKAPLCDCTCFGLPRRYIIAIMSGLGFCISFGIRCNLGVAIVDMVNNSTIHRGGKVIKEKAKFNWDPETVGMIHGSFFWGYIITQIPGGYIASRLAANRVFGAAILLTSTLNMLIPSAARVHYGCVIFVRILQGLVEGVTYPACHGIWSKWAPPLERSRLATTSFCGSYAGAVIAMPLAGILVQYTGWSSVFYVYGSFGMVWYMFWLLVSYESPAKHPTITDEERRYIEESIGESANLLGAMEKFKTPWRKFFTSMPVYAIIVANFCRSWTFYLLLISQPAYFEEVFGFEISKVGMLSAVPHLVMTIIVPIGGQIADFLRSKQILSTTTVRKIMNCGGFGMEATLLLVVGYSHTRGVAISFLVLAVGFSGFAISGFNVNHLDIAPRYASILMGISNGVGTLSGMVCPIIVGAMTKNKSREEWQYVFLIAALVHYGGVIFYAIFASGEKQPWADPEETSEEKCGFIHEDELDEETGDITQNYINYGTTKSYGATTQANGGWPSGWEKKEEFVQGEVQDSHSYKDRVDYS

SEQ ID NO: 3492 - protein, 589 aa, Homo sapiens
MPFKAFDTFKEKILKPGKEGVKNAVGDSLGILQRKIDGTTEEEDNIELNEEGRPVQTSRPSPPLCDCHCCGLPKRYIIAIMSGLGFCISFGIRCNLGVAIVEMVNNSTVYVDGKPEIQTAQFNWDPETVGLIHGSFFWGYIMTQIPGGFISNKFAANRVFGAAIFLTSTLNMFIPSAARVHYGCVMCVRILQGLVEGVTYPACHGMWSKWAPPLERSRLATTSFCGSYAGAVVAMPLAGVLVQYIGWSSVFYIYGMFGIIWYMFWLLQAYECPAAHPTISNEEKTYIETSIGEGANVVSLSKFSTPWKRFFTSLPVYAIIVANFCRSWTFYLLLISQPAYFEEVFGFAISKVGLLSAVPHMVMTIVVPIGGQLADYLRSRQILTTTAVRKIMNCGGFGMEATLLLVVGFSHTKGVAISFLVLAVGFSGFAISGFNVNHLDIAPRYASILMGISNGVGTLSGMVCPLIVGAMTRHKTREEWQNVFLIAALVHYSGVIFYGVFASGEKQEWADPENLSEEKCGIIDQDELAEEIELNHESFASPKKKMSYGATSQNCEVQKKEWKGQRGATLDEEELTSYQNEERNFSTIS

SEQ ID NO: 3493 - protein, 539 aa, Homo sapiens
MPFKAFDTFKEKILKPGKEGVKNAVGDSLGILQRKIDGTTEEEDNIELNEEGRPVQTSRPSPPLCDCHCCGLPKRYIIAIMSGLGFCISFGIRCNLGVAIVEMVNNSTVYVDGKPEIQTAQFNWDPETVGLIHGSFFWGYIMTQIPGGFISNKFAANRVFGAAIFLTSTLNMFIPSAARVHYGCVMCVRILQGLVEGVTYPACHGMWSKWAPPLERSRLATTSFCGSYAGAVVAMPLAGVLVQYIGWSSVFYIYGMFGIIWYMFWLLQAYECPAAHPTISNEEKTYIETSIGEGANVVSLSVGLLSAVPHMVMTIVVPIGGQLADYLRSRQILTTTAVRKIMNCGGFGMEATLLLVVGFSHTKGVAISFLVLAVGFSGFAISGFNVNHLDIAPRYASILMGISNGVGTLSGMVCPLIVGAMTRHKTREEWQNVFLIAALVHYSGVIFYGVFASGEKQEWADPENLSEEKCGIIDQDELAEEIELNHESFASPKKKMSYGATSQNCEVQKKEWKGQRGATLDEEELTSYQNEERNFSTIS

SEQ ID NO: 3494 - protein, 344 aa, Homo sapiens
MNLLPCNPHGNGLLYAGFNQDHGCFACGMENGFRVYNTDPLKEKEKQEFLEGGVGHVEMLFRCNYLALVGGGKKPKYPPNKVMIWDDLKKKTVIEIEFSTEVKAVKLRRDRIVVVLDSMIKVFTFTHNPHQLHVFETCYNPKGLCVLCPNSNNSLLAFPGTHTGHVQLVDLASTEKPPVDIPAHEGVLSCIALNLQGTRIATASEKGTLIRIFDTSSGHLIQELRRGSQAANIYCINFNQDASLICVSSDHGTVHIFAAEDPKRNKQSSLASASFLPKYFSSKWSFSKFQVPSGSPCICAFGTEPNAVIAICADGSYYKFLFNPKGECIRDVYAQFLEMTDDKL

SEQ ID NO: 3495 - protein, 565 aa, Homo sapiens
MAKLWFKFQRYFRRKPVRFFTFLALYLTAGSLVFLHSGFVGQPAVSGNQANPAAAGGPAEGAELSFLGDMHLGRGFRDTGEASSIARRYGPWFKGKDGNERAKLGDYGGAWSRALKGRVVREKEEERAKYIGCYLDDTQSRALRGVSFFDYKKMTIFRCQDNCAERGYLYGGLEFGAECYCGHKIQATNVSEAECDMECKGERGSVCGGANRLSVYRLQLAQESARRYGSAVFRGCFRRPDNLSLALPVTAAMLNMSVDKCVDFCTEKEYPLAALAGTACHCGFPTTRFPLHDREDEQLCAQKCSAEEFESCGTPSYFIVYQTQVQDNRCMDRRFLPGKSKQLIALASFPGAGNTWARHLIELATGFYTGSYYFDGSLYNKGFKGERDHWRSGRTICIKTHESGQKEIEAFDAAILLIRNPYKALMAEFNRKYGGHIGFAAHAHWKGKEWPEFVRNYAPWWATHTLDWLKFGKKVLVVHFEDLKQDLFVQLGRMVSLLGVAVREDRLLCVESQKDGNFKRSGLRKLEYDPYTADMQKTISAYIKMVDAALKGRNLTGVPDDYYPR

SEQ ID NO: 3496 - protein, 585 aa, Homo sapiens
MAKLWFKFQRYFRRKPVRFFTFLALYLTAGSLVFLHSGFVGQPAVSGNQANPAAAGGPAEGAELSFLGDMHLGRGFRDTGEASSIARRYGPWFKGKDGNERAKLGDYGGAWSRALKGRVVREKEEERAKYIGCYLDDTQSRALRGVSFFDYKKMTIFRCQDNCAERGYLYGGLEFGAECYCGHKIQATNVSEAECDMECKGERGSVCGGANRLSVYRLQLAQESARRYGSAVFRGCFRRPDNLSLALPVTAAMLNMSVDKCVDFCTEKEYPLAALAGTACHCGFPTTRFPLHDREDEQLCAQKCSAEEFESCGTPSYFIVYQTQVQDNRCMDRRFLPGKSKQLIALASFPGAGNTWARHLIELATGFYTGSYYFDGSLYNKGFKGERDHWRSGRTICIKTHESGQKEIEAFDAAILLIRNPYKALMAEFNRKYGGHIGFAAHAHWKGKGAVPGSLQILFRSICTASVGEWPEFVRNYAPWWATHTLDWLKFGKKVLVVHFEDLKQDLFVQLGRMVSLLGVAVREDRLLCVESQKDGNFKRSGLRKLEYDPYTADMQKTISAYIKMVDAALKGRNLTGVPDDYYPR

SEQ ID NO: 3497 - protein, 228 aa, Homo sapiens
MQRPHRRQSQMDAASTRAPPRPSAPQQGRRQPSMPGSAQCHHRPDPHPPAPGKKKSSPVGRFFPASAMAPPWLPGIVSAAQLKPVLSDLPPHCTRAQCQPLTQRPHSLHLQDSRNASSLPHKGWRCNFPLQGPAGLTHKSACVGRMGHCCGSAGNVPELSPRPASPRGQQVTQDGPLQTPELPSECNVGPVMSRQPFPEQSQQGECAIDPRGPPRLELSWGEDPLSGV

SEQ ID NO: 3498 - protein, 536 aa, Homo sapiens
MAEHAPRRCCLGWDFSTQQVKVVAVDAELNVFYEESVHFDRDLPEFGTQGGVHVHKDGLTVTSPVLMWVQALDIILEKMKASGFDFSQVLALSGAGQQHGSIYWKAGAQQALTSLSPDLRLHQQLQDCFSISDCPVWMDSSTTAQCRQLEAAVGGAQALSCLTGSRAYERFTGNQIAKIYQQNPEAYSHTERISLVSSFAASLFLGSYSPIDYSDGSGMNLLQIQDKVWSQACLGACAPHLEEKLSPPVPSCSVVGAISSYYVQRYGFPPGCKVVAFTGDNPASLAGMRLEEGDIAVSLGTSDTLFLWLQEPMPALEGHIFCNPVDSQHYMALLCFKNGSLMREKIRNESVSRSWSDFSKALQSTEMGNGGNLGFYFDVMEITPEIIGRHRFNTENHKVAAFPGDVEVRALIEGQFMAKRIHAEGLGYRVMSKTKILATGGASHNREILQVLADVFDAPVYVIDTANSACVGSAYRAFHGLAGGTDVPFSEVVKLAPNPRLAATPSPGASQVYEALLPQYAKLEQRILSQTRGPPE

SEQ ID NO: 3499 - protein, 399 aa, Homo sapiens
MDSSTTAQCRQLEAAVGGAQALSCLTGSRAYERFTGNQIAKIYQQNPEAYSHTERISLVSSFAASLFLGSYSPIDYSDGSGMNLLQIQDKVWSQACLGACAPHLEEKLSPPVPSCSVVGAISSYYVQRYGFPPGCKVVAFTGDNPASLAGMRLEEGDIAVSLGTSDTLFLWLQEPMPALEGHIFCNPVDSQHYMALLCFKNGSLMREKIRNESVSRSWSDFSKALQSTEMGNGGNLGFYFDVMEITPEIIGRHRFNTENHKVAAFPGDVEVRALIEGQFMAKRIHAEGLGYRVMSKTKILATGGASHNREILQVLADVFDAPVYVIDTANSACVGSAYRAFHGLAGGTDVPFSEVVKLAPNPRLAATPSPGASQVYEALLPQYAKLEQRILSQTRGPPE

SEQ ID NO: 3500 - protein, 221 aa, Homo sapiens
MFHGIPATPGIGAPGNKPELYEEVKLYKNAREREKYDNMAELFAVVKTMQALEKAYIKDCVSPSEYTAACSRLLVQYKAAFRQVQGSEISSIDEFCRKFRLDCPLAMERIKEDRPITIKDDKGNLNRCIADVVSLFITVMDKLRLEIRAMDEIQPDLRELMETMHRMSHLPPDFEGRQTVSQWLQTLSGMSASDELDDSQVRQMLFDLESAYNAFNRFLHA

SEQ ID NO: 3501 - protein, 233 aa, Homo sapiens
MFHGIPATPGIGAPGNKPELYEEVKLYKNAREREKYDNMAELFAVVKTMQALEKAYIKDCVSPSEYTAACSRLLVQYKAAFRQVQGSEISSIDEFCRKFRLDCPLAMERIKEDRPITIKDDKGNLNRCIADVVSLFITVMDKLRLEIRAMDEIQPDLRELMETMHRMSHLPPDFEGRQTVSQWWVSLPARQSPAVPETLPARRSPAVPLRPSAPTCPVLHSQAADPERHVGVR

SEQ ID NO: 3502 - protein, 400 aa, Homo sapiens
MNPASAPPPLPPPGQQVIHVTQDLDTDLEALFNSVMNPKPSSWRKKILPESFFKEPDSGSHSRQSSTDSSGGHPGPRLAGGAQHVRSHSSPASLQLGTGAGAAGSPAQQHAHLRQQSYDVTDELPLPPGWEMTFTATGQRYFLNHIEKITTWQDPRKAMNQPLNHMNLHPAVSSTPVPQRSMAVSQPNLVMNHQHQQQMAPSTLSQQNHPTQNPPAGLMSMPNALTTQQQQQQKLRLQRIQMERERIRMRQEELMRQEAALCRQLPMEAETLAPVQAAVNPPTMTPDMRSITNNSSDPFLNGGPYHSREQSTDSGLGLGCYSVPTTPEDFLSNVDEMDTGENAGQTPMNINPQQTRFPDFLDCLPGTNVDLGTLESEDLIPLFNDVESALNKSEPFLTWL

SEQ ID NO: 3503 - protein, 466 aa, Homo sapiens
MSTRSVSSSSYRRMFGGPGTASRPSSSRSYVTTSTRTYSLGSALRPSTSRSLYASSPGGVYATRSSAVRLRSSVPGVRLLQDSVDFSLADAINTEFKNTRTNEKVELQELNDRFANYIDKVRFLEQQNKILLAELEQLKGQGKSRLGDLYEEEMRELRRQVDQLTNDKARVEVERDNLAEDIMRLREKLQEEMLQREEAENTLQSFRQDVDNASLARLDLERKVESLQEEIAFLKKLHEEEIQELQAQIQEQHVQIDVDVSKPDLTAALRDVRQQYESVAAKNLQEAEEWYKSKFADLSEAANRNNDALRQAKQESTEYRRQVQSLTCEVDALKGTNESLERQMREMEENFAVEAANYQDTIGRLQDEIQNMKEEMARHLREYQDLLNVKMALDIEIATYRKLLEGEESRISLPLPNFSSLNLRETNLDSLPLVDTHSKRTLLIKTVETRDGQVINETSQHHDDLE

SEQ ID NO: 3504 - protein, 1677 aa, Homo sapiens
MEVPEPTCPAPPARDQPAPTPGPPGAPGGQASPHLTLGPVLLPPEQGLAPPTVFLKALPIPLYHTVPPGGLQPRAPLVTGSLDGGNVPFILSPVLQPEGPGPTQVGKPAAPTLTVNIVGTLPVLSPGLGPTLGSPGKVRNAGKYLCPHCGRDCLKPSVLEKHIRSHTGERPFPCATCGIAFKTQSNLYKHRRTQTHLNNSRLSSESEGAGGGLLEEGDKAGEPPRPEGRGESRCQGMHEGASERPLSPGAHVPLLAKNLDVRTEAAPCPGSAFADREAPWDSAPMASPGLPAASTQPWRKLPEQKSPTAGKPCALQRQQATAAEKPWDAKAPEGRLRKCESTDSGYLSRSDSAEQPHAPCSPLHSLSEHSAESEGEGGPGPGPGVAGAEPGAREAGLELEKKRLEERIAQLISHNQAVVDDAQLDNVRPRKTGLSKQGSIDLPTPYTYKDSFHFDIRALEPGRRRAPGPVRSTWTPPDKSRPLFFHSVPTQLSTTVECVPVTRSNSLPFVEGSRTWLEPREPRDPWSRTQKPLSPRPGPARLGCRSGLSSTDVPSGHPRALVRQAAVEDLPGTPIGDALVPAEDTDAKRTAAREAMAGKGRAGGRKCGQRRLKMFSQEKWQVYGDETFKRIYQKMKASPHGGKKAREVGMGSGAELGFPLQKEAAGSSGTVPTQDRRTPVHEDISAGATPEPWGNPPALEASLVTEPTKHGETVARRGDSDRPRVEEAVSSPALGGRDSPCSGSRSPLVSPNGRLELGWQMPPAPGPLKGGDVEAPRPVWPDPKLEGGARGVGDVQETCLWAQTVLRWPSRGSGEDKLPSERKKLKVEDLHSWKQPEPVSAETPGGPTQPASLSSQKQDADPGEVPGGSKESARQVGEPLESSGASLAAASVALKRVGPRDKATPLHPAAPAPAEHPSLATPPQAPRVLSALADNAFSPKYLLRLPQAETPLPLPIPWGPRHSQDSLCSSGWPEERASFVGSGLGTPLSPSPASGPSPGEADSILEDPSCSRPQDGRKGAQLGGDKGDRMATSRPAARELPISAPGAPREATSSPPTPTCEAHLVQDMEGDSHRIHRLCMGSTLARARLSGDVLNPWVPNWELGEPPGNAPEDPSSGPLVGPDPCSPLQPGSFLTALTRPQGVPPGWPELALSSHSGTSRSHSTRSPHSTQNPFPSLKAEPRLTWCCLSRSVPLPAEQKAKAASVYLAVHFPGSSLRDEGPNGPPGSNGGWTWTSPGEGGPAQMSKFSYPTVPGVMPQHQVSEPEWKKGLPWRAKMSRGNSKQRKLKINPKRYKGNFLQSCVQLRASRLRTPTWVRRRSRHPPALEGLKPCRTPGQTSSEIAGLNLQEEPSCATSESPPCCGKEEKKEGDCRQTLGTLSLGTSSRIVREMDKRTVKDISPSAGEHGDCTTHSTAATSGLSLQSDTCLAVVNDVPLPPGKGLDLGLLETQLLASQDSVSTDPKPYIFSDAQRPSSFGSKGTFPHHDIATSVAAVCISLPVRTDHIAQEIHSAESRDHSQTAGRTLTSSSPDSKVTEEGRAQTLLPGRPSSGQRISDSVPLESTEKTHLEIPASGPSSASSHHKEGRHKTFFPSRGQYGCGEMTVPCPSLGSDGRKRQVSGLITRKDSVVPSKPEQPIEIPEAPSKSLKKRSLEGMRKQTRVEFSDTSSDDEDRLVIEI

SEQ ID NO: 3505 - protein, 382 aa, Homo sapiens
MELREEAWSPGPLDSEDQQMASHENPVDILIMDDDDVPSWPPTKLSPPQSAPPAGPPPRPRPPAPYICNECGKSFSHWSKLTRHQRTHTGERPNACADCGKTFSQSSHLVQHRRIHTGEKPYACLECGKRFSWSSNLMQHQRIHTGEKPYTCPDCGRSFTQSKSLAKHRRSHSGLKPFVCPRCGRGFSQPKSLARHLRLHPELSGPGVAAKVLAASVRRAKGPEEAVAADGEIAIPVGDGEGIIVVGAPGEGAAAAAAMAGAGAKAAGPRSRRAPAPKPYVCLECGKGFGHGAGLLAHQRAQHGDGLGAAGGEEPAHICVECGEGFVQGAALRRHKKIHAVGAPSVCSSCGQSYYRAGGEEEDDDDEAAGGRCPECRGGEGR

SEQ ID NO: 3506 - protein, 680 aa, Homo sapiens
MKMKKFQIPVSFQDLTVNFTQEEWQQLDPAQRLLYRDVMLENYSNLVSVGYHVSKPDVIFKLEQGEEPWIVEEFSNQNYPDIDDALEKNKEIQDKHLTQTVFFSNKTLITERENVFGKTLNLGMNSVPSRKMPYKCNPGGNSLKTNSEVIVAKKSKENRKIPDGYSGFGKHEKSHLGMKKYRYNPMRKASNQNENLILHQNIQILKQPFDYNKCGKTFFKRAILITQKGRQTERKPNECNECRKTFSKRSTLIVHQRIHTGEKPYVCSDCRKTFRVKTSLTRHRRIHTGERPYECSECRKTFIDKSALIVHQKIHGGEKSYECNECGKTFFRKSALAEHFRSHTGEKPYECKECGNAFSKKSYLVVHQRTHRGEKPNECKECGKTFFCQSALTAHQRIHTGEKPYECSECEKTFFCQSALNVHRRSHTGEKPYECSQCGKFLCTKSALIAHQITHRGKKSYECNECGKFFCHKSTLTIHQRTHTGEKHGVFNKCGRISIVKSNCSQCKRMNTKENLYECSEHGHAVSKNSHLIVHQRTIWERPYECNECGRTYCRKSALTHHQRTHTGQRPYECNECGKTFCQKFSFVEHQRTHTGEKPYECNECGKSFCHKSAFRVHRRIHTGEKPYECNQCGKTYRRLWTLTEHQKIHTGEKPYECNKCEKTFRHKSNFLLHQKSHKE

SEQ ID NO: 3507 - protein, 705 aa, Homo sapiens
MLREEAAQKRKGKEPGMALPQGRLTFRDVAIEFSLAEWKCLNPSQRALYREVMLENYRNLEAVDISSKCMMKEVLSTGQGNTEVIHTGTLQRHESHHIGDFCFQEIEKEIHDIEFQCQEDERNGLEAPMTKIKKLTGSTDQHDHRHAGNKPIKDQLGSSFYSHLPELHIFQIKGEIGNQLEKSTNDAPSVSTFQRISCRPQTQISNNYGNNPLNSSLLPQKQEVHMREKSFQCNKSGKAFNCSSLLRKHQIPHLGDKQYKCDVCGKLFNHEQYLACHDRCHTVEKPYKCKECGKTFSQESSLTCHRRLHTGVKRYNCNECGKIFGQNSALLIDKAIDTGENPYKCNECDKAFNQQSQLSHHRIHTGEKPYKCEECDKVFSRKSTIETHKRIHTGEKPYRCKVCDTAFTWHSQLARHRRIHTAKKTYKCNECGKTFSHKSSLVCHHRLHGGEKSYKCKVCDKAFVWSSQLAKHTRIDCGEKPYKCNECGKTFGQNSDLLIHKSIHTGEQPYKCDECEKVFSRKSSLETHKIGHTGEKPYKCKVCDKAFACHSYLAKHTRIHSGEKPYKCNECSKTFSHRSYLVCHHRVHSGEKPYKCNECSKTFSRRSSLHCHRRLHSGEKPYKCNECGNTFRHCSSLIYHRRLHTGEKSYKCTICDKAFVRNSLLSRHTRIHTAEKPYKCNECGKAFNQQSHLSRHHRIHTGEKP

SEQ ID NO: 3508 - protein, 636 aa, Homo sapiens
MMKEVLSTGQGNTEVIHTGTLQRHESHHIGDFCFQEIEKEIHDIEFQCQEDERNGLEAPMTKIKKLTGSTDQHDHRHAGNKPIKDQLGSSFYSHLPELHIFQIKGEIGNQLEKSTNDAPSVSTFQRISCRPQTQISNNYGNNPLNSSLLPQKQEVHMREKSFQCNKSGKAFNCSSLLRKHQIPHLGDKQYKCDVCGKLFNHEQYLACHDRCHTVEKPYKCKECGKTFSQESSLTCHRRLHTGVKRYNCNECGKIFGQNSALLIDKAIDTGENPYKCNECDKAFNQQSQLSHHRIHTGEKPYKCEECDKVFSRKSTIETHKRIHTGEKPYRCKVCDTAFTWHSQLARHRRIHTAKKTYKCNECGKTFSHKSSLVCHHRLHGGEKSYKCKVCDKAFVWSSQLAKHTRIDCGEKPYKCNECGKTFGQNSDLLIHKSIHTGEQPYKCDECEKVFSRKSSLETHKIGHTGEKPYKCKVCDKAFACHSYLAKHTRIHSGEKPYKCNECSKTFSHRSYLVCHHRVHSGEKPYKCNECSKTFSRRSSLHCHRRLHSGEKPYKCNECGNTFRHCSSLIYHRRLHTGEKSYKCTICDKAFVRNSLLSRHTRIHTAEKPYKCNECGKAFNQQSHLSRHHRIHTGEKP

SEQ ID NO: 3509 - protein, 525 aa, Homo sapiens
MGTISLCIGVCAFEGANTSTSFYKLVYTAILSYSIQDLLPEQDMKDLCQKVTLTRHRSWGLDNLHLVKDWRTVNEGKGQKEYCNRLTQCSSTKSKIFQCIECGRNFSWRSILTEHKRIHTGEKPYKCEECGKVFNRCSNLTKHKRIHTGEKPYKCDECGKVFNWWSQLTNHKKIHTGEKPYKCDECDKVFNWWSQLTSHKKIHSGEKPYPCEECGKAFTQFSNLTQHKRIHTGEKPYKCKECCKAFNKFSNLTQHKRIHTGEKPYKCEECGNVFNECSHLTRHRRIHTGEKPYKCEECGKAFTQFASLTRHKRIHTGEKPYQCEECGKTFNRCSHLSSHKRIHTGEKPYKCEECGRTFTQFSNLTQHKRIHTGEKPYKCKECGKAFNKFSSLTQHRRIHTGVKPYKCEECGKVFKQCSHLTSHKRIHTGEKPYKCKECGKAFYQSSILSKHKRIHTEEKPYKCEECGKAFNQFSSLTRHKRIHTGEKRYKCKECGKGFYQSSIHSKYKRIYTGEEPDKCKKCGSL

SEQ ID NO: 3510 - protein, 299 aa, Homo sapiens
MEPRKNVTDFVLLGFTQNPKEQKVLFVMFLLFYILTMVGNLLIVVTVTVSETLGSPMSFFLAGLTFIDIIYSSSISPRLISDLFFGNNSISFQSFMAQLFIEHLFGGSEVFLLLVMAYDRYVAICKPLHYLVIMRQWVCVLLLVVSWVGGFLQSVFQLSIIYGLPFCGPNVIDHFFCDMYPLLKLACTDTHVIGLLVVANGGLSCTIAFLLLLISYGVILHSLKKLSQKGRQKAHSTCSSHITVVVFFFVPCIFMCARPARTFSIDKSVSVFYTVITPMLNPLIYTLRNSEMTSAMKKL

SEQ ID NO: 3511 - protein, 179 aa, Homo sapiens
MVVGAFPMAKLLYLGIRQVSKPLANRIKEAARRSEFFKTYICLPPAQLYHWVEMRTKMRIMGFRGTVIKPLNEEAAAELGAELLGEATIFIVGGGCLVLEYWRHQAQQRHKEEEQRAAWNALRDEVGHLALALEALQAQVQAAPPQGALEELRTELQEVRAQLCNPGRSASHAVPASKK

SEQ ID NO: 3512 - protein, 180 aa, Homo sapiens
MVVGAFPMAKLLYLGIRQVSKPLANRIKEAARRSEFFKTYICLPPAQLYHWLEMRTKMRIMGFNAAAIKPLNEGAAAELGAELLGEGIIFITACSCLMLEYWRHQLQQRRKEKERRVAREALRGEVGHLGLALEELQAQVQATSTQLALEELRAQLQEVRAHLCLRDPPPAPPVAPASEK

SEQ ID NO: 3513 - protein, 450 aa, Homo sapiens
MPHNSIRSGHGGLNQLGGAFVNGRPLPEVVRQRIVDLAHQGVRPCDISRQLRVSHGCVSKILGRYYETGSIRPGVIGGSKPKVATPKVVEKIGDYKRQNPTMFAWEIRDRLLAEGVCDNDTVPSVSSINRIIRTKVQQPFNLPMDSCVATKSLSPGHTLIPSSAVTPPESPQSDSLGSTYSINGLLGIAQPGSDKRKMDDSDQDSCRLSIDSQSSSSGPRKHLRTDAFSQHHLEPLECPFERQHYPEAYASPSHTKGEQGLYPLPLLNSTLDDGKATLTPSNTPLGRNLSTHQTYPVVADPHSPFAIKQETPEVSSSSSTPSSLSSSAFLDLQQVGSGVPPFNAFPHAASVYGQFTGQALLSGREMVGPTLPGYPPHIPTSGQGSYASSAIAGMVAGSEYSGNAYGHTPYSSYSEAWRFPNSSLLSSPYYYSSTSRPSAPPTTATAFDHL

SEQ ID NO: 3514 - protein, 387 aa, Homo sapiens
MPHNSIRSGHGGLNQLGGAFVNGRPLPEVVRQRIVDLAHQGVRPCDISRQLRVSHGCVSKILGRYYETGSIRPGVIGGSKPKVATPKVVEKIGDYKRQNPTMFAWEIRDRLLAEGVCDNDTVPSVSSINRIIRTKVQQPFNLPMDSCVATKSLSPGHTLIPSSAVTPPESPQSDSLGSTYSINGLLGIAQPGSDKRKMDDSDQDSCRLSIDSQSSSSGPRKHLRTDAFSQHHLEPLECPFERQHYPEAYASPSHTKGEQGLYPLPLLNSTLDDGKATLTPSNTPLGRNLSTHQTYPVVAGREMVGPTLPGYPPHIPTSGQGSYASSAIAGMVAGSEYSGNAYGHTPYSSYSEAWRFPNSSLLSSPYYYSSTSRPSAPPTTATAFDHL

SEQ ID NO: 3515 - protein, 398 aa, Homo sapiens
MPHNSIRSGHGGLNQLGGAFVNGRPLPEVVRQRIVDLAHQGVRPCDISRQLRVSHGCVSKILGRYYETGSIRPGVIGGSKPKVATPKVVEKIGDYKRQNPTMFAWEIRDRLLAEGVCDNDTVPSVSSINRIIRTKVQQPFNLPMDSCVATKSLSPGHTLIPSSAVTPPESPQSDSLGSTYSINGLLGIAQPGSDKRKMDDSDQDSCRLSIDSQSSSSGPRKHLRTDAFSQHHLEPLECPFERQHYPEAYASPSHTKGEQGLYPLPLLNSTLDDGKATLTPSNTPLGRNLSTHQTYPVVAAPPFWICSKSAPGSRPSMPFPMLPPCTGSSRARPSSQGERWWGPRCPDTHPTSPPADRAAMPPLPSQAWWQEVNTLAMPMATPPTPPTARPGASPTPAC

SEQ ID NO: 3516 - protein, 321 aa, Homo sapiens
MPHNSIRSGHGGLNQLGGAFVNGRPLPEVVRQRIVDLAHQGVRPCDISRQLRVSHGCVSKILGRYYETGSIRPGVIGGSKPKVATPKVVEKIGDYKRQNPTMFAWEIRDRLLAEGVCDNDTVPSVSSINRIIRTKVQQPFNLPMDSCVATKSLSPGHTLIPSSAVTPPESPQSDSLGSTYSINGLLGIAQPGSDKRKMDDSDQDSCRLSIDSQSSSSGPRKHLRTDAFSQHHLEPLECPFERQHYPEAYASPSHTKGEQGERWWGPRCPDTHPTSPPADRAAMPPLPSQAWWQEVNTLAMPMATPPTPPTARPGASPTPAC

SEQ ID NO: 3517 - protein, 287 aa, Homo sapiens
MPHNSIRSGHGGLNQLGGAFVNGRPLPEVVRQRIVDLAHQGVRPCDISRQLRVSHGCVSKILGRYYETGSIRPGVIGGSKPKVATPKVVEKIGDYKRQNPTMFAWEIRDRLLAEGVCDNDTVPSVSSINRIIRTKVQQPFNLPMDSCVATKSLSPGHTLIPSSAVTPPESPQSDSLGSTYSINGLLGIAQPGSDKRKMDDSDQDSCRLSIDSQSSSSGPRKHLRTDAFSQHHLEPLECPFERQHYPEAYASPSHTKGEQEVNTLAMPMATPPTPPTARPGASPTPAC

SEQ ID NO: 3518 - protein, 311 aa, Homo sapiens
MELGNVTRVKEFIFLGLTQSQDQSLVLFLFLCLVYMTTLLGNLLIMVTVTCESRLHTPMYFLLRNLAILDICFSSTTAPKVLLDLLSKKKTISYTSCMTQIFLFHLLGGADIFSLSVMAFDCYMAISKPLHYVTIMSRGQCTALISASWMGGFVHSIVQISLLLPLPFCGPNVLDTFYCDVPQVLKLTCTDTFALEFLMISNNGLVTTLWFIFLLVSYTVILMTLRSQAGGGRRKAISTCTSHITVVTLHFVPCIYVYARPFTALPTEKAISVTFTVISPLLNPLIYTLRNQEMKSAMRRLKRRLVPSERE

SEQ ID NO: 3519 - protein, 354 aa, Homo sapiens
MTTAILERLSTLSVSGQQLRRLPKILEDGLPKMPCTVPETDVPQLFREPYIRTGYRPTGHEWRYYFFSLFQKHNEVVNVWTHLLAALAVLLRFWAFAEAEALPWASTHSLPLLLFILSSITYLTCSLLAHLLQSKSELSHYTFYFVDYVGVSVYQYGSALAHFFYSSDQAWYDRFWLFFLPAAAFCGWLSCAGCCYAKYRYRRPYPVMRKICQVVPAGLAFILDISPVAHRVALCHLAGCQEQAAWYHTLQILFFLVSAYFFSCPVPEKYFPGSCDIVGHGHQIFHAFLSICTLSQLEAILLDYQGRQEIFLQRHGPLSVHMACLSFFFLAACSAATAALLRHKVKARLTKKDS

SEQ ID NO: 3520 - protein, 335 aa, Homo sapiens
MPQILIFTYLNMFYFFPPLQILAENLTMVTEFLLLGFSSLGEIQLALFVVFLFLYLVILSGNVTIISVIHLDKSLHTPMYFFLGILSTSETFYTFVILPKMLINLLSVARTISFNCCALQMFFFLGFAITNCLLLGVMGYDRYAAICHPLHYPTLMSWQVCGKLAAACAIGGFLASLTVVNLVFSLPFCSANKVNHYFCDISAVILLACTNTDVNEFVIFICGVLVLVVPFLFICVSYLCILRTILKIPSAEGRRKAFSTCASHLSVVIVHYGCASFIYLRPTANYVSNKDRLVTVTYTIVTPLLNPMVYSLRNKDVQLAIRKVLGKKGSLKLYN

SEQ ID NO: 3521 - protein, 397 aa, Homo sapiens
MNCISDFFTYETTKSVVVKSWTIGIINRVVQLLIISYFVGWVFLHEKAYQVRDTAIESSVVTKVKGSGLYANRVMDVSDYVTPPQGTSVFVIITKMIVTENQMQGFCPESEEKYRCVSDSQCGPERLPGGGILTGRCVNYSSVLRTCEIQGWCPTEVDTVETPIMMEAENFTIFIKNSIRFPLFNFEKGNLLPNLTARDMKTCRFHPDKDPFCPILRVGDVVKFAGQDFAKLARTGGVLGIKIGWVCDLDKAWDQCIPKYSFTRLDSVSEKSSVSPGYNFRFAKYYKMENGSEYRTLLKAFGIRFDVLVYGNAGKFNIIPTIISSVAAFTSVGVGTVLCDIILLNFLKGADQYKAKKFEEVNETTLKIAALTNPVYPSDQTTAEKQSTDSGAFSIGH

SEQ ID NO: 3522 - protein, 1955 aa, Homo sapiens
MFRQFYLWTCLASGIILGSLFEICLGQYDDDCKLARGGPPATIVAIDEESRNGTILVDNMLIKGTAGGPDPTIELSLKDNVDYWVLMDPVKQMLFLNSTGRVLDRDPPMNIHSIVVQVQCINKKVGTIIYHEVRIVVRDRNDNSPTFKHESYYATVNELTPVGTTIFTGFSGDNGATDIDDGPNGQIEYVIQYNPDDPTSNDTFEIPLMLTGNIVLRKRLNYEDKTRYFVIIQANDRAQNLNERRTTTTTLTVDVLDGDDLGPMFLPCVLVPNTRDCRPLTYQAAIPELRTPEELNPIIVTPPIQAIDQDRNIQPPSDRPGILYSILVGTPEDYPRFFHMHPRTAELSLLEPVNRDFHQKFDLVIKAEQDNGHPLPAFAGLHIEILDENNQSPYFTMPSYQGYILESAPVGATISDSLNLTSPLRIVALDKDIEDTKDPELHLFLNDYTSVFTVTQTGITRYLTLLQPVDREEQQTYTFSITAFDGVQESEPVIVNIQVMDANDNTPTFPEISYDVYVYTDMRPGDSVIQLTAVDADEGSNGEITYEILVGAQGDFIINKTTGLITIAPGVEMIVGRTYALTVQAADNAPPAERRNSICTVYIEVLPPNNQSPPRFPQLMYSLEISEAMRVGAVLLNLQATDREGDSITYAIENGDPQRVFNLSETTGILTLGKALDRESTDRYILIITASDGRPDGTSTATVNIVVTDVNDNAPVFDPYLPRNLSVVEEEANAFVGQVKATDPDAGINGQVHYSLGNFNNLFRITSNGSIYTAVKLNREVRDYYELVVVATDGAVHPRHSTLTLAIKVLDIDDNSPVFTNSTYTVLVEENLPAGTTILQIEAKDVDLGANVSYRIRSPEVKHFFALHPFTGELSLLRSLDYEAFPDQEASITFLVEAFDIYGTMPPGIATVTVIVKDMNDYPPVFSKRIYKGMVAPDAVKGTPITTVYAEDADPPGLPASRVRYRVDDVQFPYPASIFEVEEDSGRVITRVNLNEEPTTIFKLVVVAFDDGEPVMSSSATVKILVLHPGEIPRFTQEEYRPPPVSELATKGTMVGVISAAAINQSIVYSIVSGNEEDTFGINNITGVIYVNGPLDYETRTSYVLRVQADSLEVVLANLRVPSKSNTAKVYIEIQDENNHPPVFQKKFYIGGVSEDARMFTSVLRVKATDKDTGNYSVMAYRLIIPPIKEGKEGFVVETYTGLIKTAMLFHNMRRSYFKFQVIATDDYGKGLSGKADVLVSVVNQLDMQVIVSNVPPTLVEKKIEDLTEILDRYVQEQIPGAKVVVESIGARRHGDAFSLEDYTKCDLTVYAIDPQTNRAIDRNELFKFLDGKLLDINKDFQPYYGEGGRILEIRTPEAVTSIKKRGESLGYTEGALLALAFIIILCCIPAILVVLVSYRQFKVRQAECTKTARIQAALPAAKPAVPAPAPVAAPPPPPPPPPGAHLYEELGDSSILFLLYHFQQSRGNNSVSEDRKHQQVVMPFSSNTIEAHKSAHVDGSLKSNKLKSARKFTFLSDEDDLSAHNPLYKENISQVSTNSDISQRTDFVDPFSPKIQAKSKSLRGPREKIQRLWSQSVSLPRRLMRKVPNRPEIIDLQQWQGTRQKAENENTGICTNKRGSSNPLLTTEEANLTEKEEIRQGETLMIEGTEQLKSLSSDSSFCFPRPHFSFSTLPTVSRTVELKSEPNVISSPAECSLELSPSRPCVLHSSLSRRETPICMLPIETERNIFENFAHPPNISPSACPLPPPPPISPPSPPPAPAPLAPPPDISPFSLFCPPPSPPSIPLPLPPPTFFPLSVSTSGPPTPPLLPPFPTPLPPPPPSIPCPPPPSASFLSTECVCITGVKCTTNLMPAEKIKSSMTQLSTTTVCKTDPQREPKGILRHVKNLAELEKSVANMYSQIEKNYLRTNVSELQTMCPSEVTNMEITSEQNKGSLNNIVEGTEKQSHSQSTSL

SEQ ID NO: 3523 - protein, 837 aa, Homo sapiens
MTFSHSGNTAKVYIEIQDENNHPPVFQKKFYIGGVSEDARMFTSVLRVKATDKDTGNYSVMAYRLIIPPIKEGKEGFVVETYTGLIKTAMLFHNMRRSYFKFQVIATDDYGKGLSGKADVLVSVVNQLDMQVIVSNVPPTLVEKKIEDLTEILDRYVQEQIPGAKVVVESIGARRHGDAFSLEDYTKCDLTVYAIDPQTNRAIDRNELFKFLDGKLLDINKDFQPYYGEGGRILEIRTPEAVTSIKKRGESLGYTEGALLALAFIIILCCIPAILVVLVSYRQFKVRQAECTKTARIQAALPAAKPAVPAPAPVAAPPPPPPPPPGAHLYEELGDSSILFLLYHFQQSRGNNSVSEDRKHQQVVMPFSSNTIEAHKSAHVDGSLKSNKLKSARKFTFLSDEDDLSAHNPLYKENISQVSTNSDISQRTDFVDPFSPKIQAKSKSLRGPREKIQRLWSQSVSLPRRLMRKVPNRPEIIDLQQWQGTRQKAENENTGICTNKRGSSNPLLTTEEANLTEKEEIRQGETLMIEGTEQLKSLSSDSSFCFPRPHFSFSTLPTVSRTVELKSEPNVISSPAECSLELSPSRPCVLHSSLSRRETPICMLPIETERNIFENFAHPPNISPSACPLPPPPPISPPSPPPAPAPLAPPPDISPFSLFCPPPSPPSIPLPLPPPTFFPLSVSTSGPPTPPLLPPFPTPLPPPPPSIPCPPPPSASFLSTECVCITGVKCTTNLMPAEKIKSSMTQLSTTTVCKTDPQREPKGILRHVKNLAELEKSVANMYSQIEKNYLRTNVSELQTMCPSEVTNMEITSEQNKGSLNNIVEGTEKQSHSQSTSL

SEQ ID NO: 3524 - protein, 961 aa, Homo sapiens
MFRQFYLWTCLASGIILGSLFEICLGQYDDDCKLARGGPPATIVAIDEESRNGTILVDNMLIKGTAGGPDPTIELSLKDNVDYWVLMDPVKQMLFLNSTGRVLDRDPPMNIHSIVVQVQCINKKVGTIIYHEVRIVVRDRNDNSPTFKHESYYATVNELTPVGTTIFTGFSGDNGATDIDDGPNGQIEYVIQYNPDDPTSNDTFEIPLMLTGNIVLRKRLNYEDKTRYFVIIQANDRAQNLNERRTTTTTLTVDVLDGDDLGPMFLPCVLVPNTRDCRPLTYQAAIPELRTPEELNPIIVTPPIQAIDQDRNIQPPSDRPGILYSILVGTPEDYPRFFHMHPRTAELSLLEPVNRDFHQKFDLVIKAEQDNGHPLPAFAGLHIEILDENNQSPYFTMPSYQGYILESAPVGATISDSLNLTSPLRIVALDKDIEDTKDPELHLFLNDYTSVFTVTQTGITRYLTLLQPVDREEQQTYTFSITAFDGVQESEPVIVNIQVMDANDNTPTFPEISYDVYVYTDMRPGDSVIQLTAVDADEGSNGEITYEILVGAQGDFIINKTTGLITIAPGVEMIVGRTYALTVQAADNAPPAERRNSICTVYIEVLPPNNQSPPRFPQLMYSLEISEAMRVGAVLLNLQATDREGDSITYAIENGDPQRVFNLSETTGILTLGKALDRESTDRYILIITASDGRPDGTSTATVNIVVTDVNDNAPVFDPYLPRNLSVVEEEANAFVGQVKATDPDAGINGQVHYSLGNFNNLFRITSNGSIYTAVKLNREVRDYYELVVVATDGAVHPRHSTLTLAIKVLDIDDNSPVFTNSTYTVLVEENLPAGTTILQIEAKDVDLGANVSYRIRSPEVKHFFALHPFTGELSLLRSLDYEAFPDQEASITFLVEAFDIYGTMPPGIATVTVIVKDMNDYPPVFSKRIYKGMVAPDAVKGTPITTVYAEDADPPVSRRH

SEQ ID NO: 3525 - protein, 1783 aa, Homo sapiens
MFRQFYLWTCLASGIILGSLFEICLGQYDDDCKLARGGPPATIVAIDEESRNGTILVDNMLIKGTAGGPDPTIELSLKDNVDYWVLMDPVKQMLFLNSTGRVLDRDPPMNIHSIVVQVQCINKKVGTIIYHEVRIVVRDRNDNSPTFKHESYYATVNELTPVGTTIFTGFSGDNGATDIDDGPNGQIEYVIQYNPDDPTSNDTFEIPLMLTGNIVLRKRLNYEDKTRYFVIIQANDRAQNLNERRTTTTTLTVDVLDGDDLGPMFLPCVLVPNTRDCRPLTYQAAIPELRTPEELNPIIVTPPIQAIDQDRNIQPPSDRPGILYSILVGTPEDYPRFFHMHPRTAELSLLEPVNRDFHQKFDLVIKAEQDNGHPLPAFAGLHIEILDENNQSPYFTMPSYQGYILESAPVGATISDSLNLTSPLRIVALDKDIEDVPPSGVPTKDPELHLFLNDYTSVFTVTQTGITRYLTLLQPVDREEQQTYTFSITAFDGVQESEPVIVNIQVMDANDNTPTFPEISYDVYVYTDMRPGDSVIQLTAVDADEGSNGEITYEILVGAQGDFIINKTTGLITIAPGVEMIVGRTYALTVQAADNAPPAERRNSICTVYIEVLPPNNQSPPRFPQLMYSLEISEAMRVGAVLLNLQATDREGDSITYAIENGDPQRVFNLSETTGILTLGKALDRESTDRYILIITASDGRPDGTSTATVNIVVTDVNDNAPVFDPYLPRNLSVVEEEANAFVGQVKATDPDAGINGQVHYSLGNFNNLFRITSNGSIYTAVKLNREVRDYYELVVVATDGAVHPRHSTLTLAIKVLDIDDNSPVFTNSTYTVLVEENLPAGTTILQIEAKDVDLGANVSYRIRSPEVKHFFALHPFTGELSLLRSLDYEAFPDQEASITFLVEAFDIYGTMPPGIATVTVIVKDMNDYPPVFSKRIYKGMVAPDAVKGTPITTVYAEDADPPGLPASRVRYRVDDVQFPYPASIFEVEEDSGRVITRVNLNEEPTTIFKLVVVAFDDGEPVMSSSATVKILVLHPGEIPRFTQEEYRPPPVSELATKGTMVGVISAAAINQSIVYSIVSGNEEDTFGINNITGVIYVNGPLDYETRTSYVLRVQADSLEVVLANLRVPSKSNTAKVYIEIQDENNHPPVFQKKFYIGGVSEDARMFTSVLRVKATDKDTGNYSVMAYRLIIPPIKEGKEGFVVETYTGLIKTAMLFHNMRRSYFKFQVIATDDYGKGLSGKADVLVSVVNQLDMQVIVSNVPPTLVEKKIEDLTEILDRYVQEQIPGAKVVVESIGARRHGDAFSLEDYTKCDLTVYAIDPQTNRAIDRNELFKFLDGKLLDINKDFQPYYGEGGRILEIRTPEAVTSIKKRGESLGYTEGALLALAFIIILCCIPAILVVLVSYRQFKVRQAECTKTARIQAALPAAKPAVPAPAPVAAPPPPPPPPPGAHLYEELGDSSMYEMPQYGSRRRLLPPAGQEEYGEVVGEAEEEYEEEEEEPKKIKKPKVEIREPSEEEEVVVTIEKPPAAEPTYTTWKRARIFPMIFKKVRGLADKRGIVDLEGEEWQRRLEEEDKDYLKLTLDQEEATESTVESEEESSSDYTEYSEEESEFSESETTEEESESETPSEEEESSTPESEESESTESEGEKARKNIVLARRRPMVEEVKEVKGRKEEPQEEQKEPKMEEEEHSEEEESGPAPVEESTDPEAQDIPEEGSAESASVEGGVESEEESESGSSSSSSESQSGGPWGYQVPAYDRSKNANQKKSPGANSEGYNTAL

SEQ ID NO: 3526 - protein, 1675 aa, Homo sapiens
MFRQFYLWTCLASGIILGSLFEICLGQYDDDCKLARGGPPATIVAIDEESRNGTILVDNMLIKGTAGGPDPTIELSLKDNVDYWVLMDPVKQMLFLNSTGRVLDRDPPMNIHSIVVQVQCINKKVGTIIYHEVRIVVRDRNDNSPTFKHESYYATVNELTPVGTTIFTGFSGDNGATDIDDGPNGQIEYVIQYNPDDPTSNDTFEIPLMLTGNIVLRKRLNYEDKTRYFVIIQANDRAQNLNERRTTTTTLTVDVLDGDDLGPMFLPCVLVPNTRDCRPLTYQAAIPELRTPEELNPIIVTPPIQAIDQDRNIQPPSDRPGILYSILVGTPEDYPRFFHMHPRTAELSLLEPVNRDFHQKFDLVIKAEQDNGHPLPAFAGLHIEILDENNQSPYFTMPSYQGYILESAPVGATISDSLNLTSPLRIVALDKDIEDTKDPELHLFLNDYTSVFTVTQTGITRYLTLLQPVDREEQQTYTFSITAFDGVQESEPVIVNIQVMDANDNTPTFPEISYDVYVYTDMRPGDSVIQLTAVDADEGSNGEITYEILVGAQGDFIINKTTGLITIAPGVEMIVGRTYALTVQAADNAPPAERRNSICTVYIEVLPPNNQSPPRFPQLMYSLEISEAMRVGAVLLNLQATDREGDSITYAIENGDPQRVFNLSETTGILTLGKALDRESTDRYILIITASDGRPDGTSTATVNIVVTDVNDNAPVFDPYLPRNLSVVEEEANAFVGQVKATDPDAGINGQVHYSLGNFNNLFRITSNGSIYTAVKLNREVRDYYELVVVATDGAVHPRHSTLTLAIKVLDIDDNSPVFTNSTYTVLVEENLPAGTTILQIEAKDVDLGANVSYRIRSPEVKHFFALHPFTGELSLLRSLDYEAFPDQEASITFLVEAFDIYGTMPPGIATVTVIVKDMNDYPPVFSKRIYKGMVAPDAVKGTPITTVYAEDADPPGLPASRVRYRVDDVQFPYPASIFEVEEDSGRVITRVNLNEEPTTIFKLVVVAFDDGEPVMSSSATVKILVLHPGEIPRFTQEEYRPPPVSELATKGTMVGVISAAAINQSIVYSIVSGNEEDTFGINNITGVIYVNGPLDYETRTSYVLRVQADSLEVVLANLRVPSKSNTAKVYIEIQDENNHPPVFQKKFYIGGVSEDARMFTSVLRVKATDKDTGNYSVMAYRLIIPPIKEGKEGFVVETYTGLIKTAMLFHNMRRSYFKFQVIATDDYGKGLSGKADVLVSVVNQLDMQVIVSNVPPTLVEKKIEDLTEILDRYVQEQIPGAKVVVESIGARRHGDAFSLEDYTKCDLTVYAIDPQTNRAIDRNELFKFLDGKLLDINKDFQPYYGEGGRILEIRTPEAVTSIKKRGESLGYTEGALLALAFIIILCCIPAILVVLVSYRQFKVRQAECTKTARIQAALPAAKPAVPAPAPVAAPPPPPPPPPGAHLYEELGDSSMYEMPQYGSRRRLLPPAGQEEYGEVVGEAEEEYEEEEWARKRMIKLVVDREYETSSTGEDSAPECQRNRLHHPSIHSNINGNIYIAQNGSVVRTRRACLTDNLKVASPVRLGGPFKKLDKLAVTHEENVPLNTLSKGPFSTEKMNARPTLVTFAPCPVGTDNTAVKPLRNRLKSTVEQESMIDSKNIKEALEFHSDHTQSDDEELWMGPWNNLHIPMTKL

SEQ ID NO: 3527 - protein, 319 aa, Homo sapiens
MNLDSFFSFLLKSLIMALSNSSWRLPQPSFFLVGIPGLEESQHWIALPLGILYLLALVGNVTILFIIWMDPSLHQSMYLFLSMLAAIDLVVASSTAPKALAVLLVRAQEIGYTVCLIQMFFTHAFSSMESGVLVAMALDRYVAICHPLHHSTILHPGVIGHIGMVVLVRGLLLLIPFLILLRKLIFCQATIIGHAYCEHMAVVKLACSETTVNRAYGLTVALLVVGLDVLAIGVSYAHILQAVLKVPGNEARLKAFSTCGSHVCVILVFYIPGMFSFLTHRFGHHVPHHVHVLLAILYRLVPPALNPLVYRVKTQKIHQ

SEQ ID NO: 3528 - protein, 340 aa, Homo sapiens
MDSTFTGYNLYNLQVKTEMDKLSSGLDIYRNPLKNKTEVTMFILTGFTDDFELQVFLFLLFFAIYLFTLIGNLGLVVLVIEDSWLHNPMYYFLSVLSFLDACYSTVVTPKMLVNFLAKNKSISFIGCATQMLLFVTFGTTECFLLAAMAYDHYVAIYNPLLYSVSMSPRVYVPLITASYVAGILHATIHIVATFSLSFCGSNEIRHVFCDMPPLLAISCSDTHTNQLLLFYFVGSIEIVTILIVLISCDFILLSILKMHSAKGRQKAFSTCGSHLTGVTIYHGTILVSYMRPSSSYASDHDIIVSIFYTIVIPKLNPIIYSLRNKEVKKAVKKMLKLVYK

SEQ ID NO: 3529 - protein, 128 aa, Homo sapiens
MEHSEGAPGDPAGTVVPQELLEEMLWFFRVEDASPWNHSILALAAVVVIISMVLLGRSIQASRKEKMQPPEKETPEVLHLDEAKDHNSLNNLRETLLSEKPNLAQVELELKERDVLSVFLPDVPETES

SEQ ID NO: 3530 - protein, 321 aa, Homo sapiens
MESPNHTDVDPSVFFLLGIPGLEQFHLWLSLPVCGLGTATIVGNITILVVVATEPVLHKPVYLFLCMLSTIDLAASVSTVPKLLAIFWCGAGHISASACLAQMFFIHAFCMMESTVLLAMAFDRYVAICHPLRYATILTDTIIAHIGVAAVVRGSLLMLPCPFLIGRLNFCQSHVILHTYCEHMAVVKLACGDTRPNRVYGLTAALLVIGVDLFCIGLSYALSAQAVLRLSSHEARSKALGTCGSHVCVILISYTPALFSFFTHRFGHHVPVHIHILLANVYLLLPPALNPVVYGVKTKQIRKRVVRVFQSGQGMGIKASE

SEQ ID NO: 3531 - protein, 89 aa, Homo sapiens
MQACMVPGLALCLLLGPLAGAKPVQEEGDPYAELPAMPYWPFSTSDFWNYVQHFQALGAYPQIEDMARTFFAHFPLGSTLGFHVPYQED

SEQ ID NO: 3532 - protein, 314 aa, Homo sapiens
MRGFNKTTVVTQFILVGFSSLGELQLLLFVIFLLLYLTILVANVTIMAVIRFSWTLHTPMYGFLFILSFSESCYTFVIIPQLLVHLLSDTKTISFMACATQLFFFLGFACTNCLLIAVMGYDRYVAICHPLRYTLIINKRLGLELISLSGATGFFIALVATNLICDMRFCGPNRVNHYFCDMAPVIKLACTDTHVKELALFSLSILVIMVPFLLILISYGFIVNTILKIPSAEGKKAFVTCASHLTVVFVHYGCASIIYLRPKSKSASDKDQLVAVTYTVVTPLLNPLVYSLRNKEVKTALKRVLGMPVATKMS

SEQ ID NO: 3533 - protein, 324 aa, Homo sapiens
MQKPQLLVPIIATSNGNLVHAAYFLLVGIPGLGPTIHFWLAFPLCFMYALATLGNLTIVLIIRVERRLHEPMYLFLAMLSTIDLVLSSITMPKMASLFLMGIQEIEFNICLAQMFLIHALSAVESAVLLAMAFDRFVAICHPLRHASVLTGCTVAKIGLSALTRGFVFFFPLPFILKWLSYCQTHTVTHSFCLHQDIMKLSCTDTRVNVVYGLFIILSVMGVDSLFIGFSYILILWAVLELSSRRAALKAFNTCISHLCAVLVFYVPLIGLSVVHRLGGPTSLLHVVMANTYLLLPPVVNPLVYGAKTKEICSRVLCMFSQGGK

SEQ ID NO: 3534 - protein, 496 aa, Homo sapiens
MGRRALLLLLLSFLAPWATIALRPALRALGSLHLPTNPTSLPAVAKNYSVLYFQQKVDHFGFNTVKTFNQRYLVADKYWKKNGGSILFYTGNEGDIIWFCNNTGFMWDVAEELKAMLVFAEHRYYGESLPFGDNSFKDSRHLNFLTSEQALADFAELIKHLKRTIPGAENQPVIAIGGSYGGMLAAWFRMKYPHMVVGALAASAPIWQFEDLVPCGVFMKIVTTDFRKSGPHCSESIHRSWDAINRLSNTGSGLQWLTGALHLCSPLTSQDIQHLKDWISETWVNLAMVDYPYASNFLQPLPAWPIKVVCQYLKNPNVSDSLLLQNIFQALNVYYNYSGQVKCLNISETATSSLGTLGWSYQACTEVVMPFCTNGVDDMFEPHSWNLKELSDDCFQQWGVRPRPSWITTMYGGKNISSHTNIVFSNGELDPWSGGGVTKDITDTLVAVTISEGAHHLDLRTKNALDPMSVLLARSLEVRHMKNWIRDFYDSAGKQH

SEQ ID NO: 3535 - protein, 517 aa, Homo sapiens
MGRRALLLLLLSFLAPWATIALRPALRALGSLHLPTNPTSLPAVAKNYSVLYFQQKALAAGQLHICIIQLNHYKTPLVDHFGFNTVKTFNQRYLVADKYWKKNGGSILFYTGNEGDIIWFCNNTGFMWDVAEELKAMLVFAEHRYYGESLPFGDNSFKDSRHLNFLTSEQALADFAELIKHLKRTIPGAENQPVIAIGGSYGGMLAAWFRMKYPHMVVGALAASAPIWQFEDLVPCGVFMKIVTTDFRKSGPHCSESIHRSWDAINRLSNTGSGLQWLTGALHLCSPLTSQDIQHLKDWISETWVNLAMVDYPYASNFLQPLPAWPIKVVCQYLKNPNVSDSLLLQNIFQALNVYYNYSGQVKCLNISETATSSLGTLGWSYQACTEVVMPFCTNGVDDMFEPHSWNLKELSDDCFQQWGVRPRPSWITTMYGGKNISSHTNIVFSNGELDPWSGGGVTKDITDTLVAVTISEGAHHLDLRTKNALDPMSVLLARSLEVRHMKNWIRDFYDSAGKQH

SEQ ID NO: 3536 - protein, 388 aa, Homo sapiens
MAGCCAALAAFLFEYDTPRIVLIRSRKVGLMNRAVQLLILAYVIGWVFVWEKGYQETDSVVSSVTTKVKGVAVTNTSKLGFRIWDVADYVIPAQEENSLFVMTNVILTMNQTQGLCPEIPDATTVCKSDASCTAGSAGTHSNGVSTGRCVAFNGSVKTCEVAAWCPVEDDTHVPQPAFLKAAENFTLLVKNNIWYPKFNFSKRNILPNITTTYLKSCIYDAKTDPFCPIFRLGKIVENAGHSFQDMAVEGGIMGIQVNWDCNLDRAASLCLPRYSFRRLDTRDVEHNVSPGYNFRFAKYYRDLAGNEQRTLIKAYGIRFDIIVFGKAGKFDIIPTMINIGSGLALLGMATVLCDIIVLYCMKKRLYYREKKYKYVEDYEQGLASELDQ

SEQ ID NO: 3537 - protein, 404 aa, Homo sapiens
MAGCCAALAAFLFEYDTPRIVLIRSRKVGLMNRAVQLLILAYVIGCYHPHLAEVEMESPRRWVFVWEKGYQETDSVVSSVTTKVKGVAVTNTSKLGFRIWDVADYVIPAQEENSLFVMTNVILTMNQTQGLCPEIPDATTVCKSDASCTAGSAGTHSNGVSTGRCVAFNGSVKTCEVAAWCPVEDDTHVPQPAFLKAAENFTLLVKNNIWYPKFNFSKRNILPNITTTYLKSCIYDAKTDPFCPIFRLGKIVENAGHSFQDMAVEGGIMGIQVNWDCNLDRAASLCLPRYSFRRLDTRDVEHNVSPGYNFRFAKYYRDLAGNEQRTLIKAYGIRFDIIVFGKAGKFDIIPTMINIGSGLALLGMATVLCDIIVLYCMKKRLYYREKKYKYVEDYEQGLASELDQ

SEQ ID NO: 3538 - protein, 361 aa, Homo sapiens
MAGCCAALAAFLFEYDTPRIVLIRSRKVGLMNRAVQLLILAYVIGWVFVWEKGYQETDSVVSSVTTKVKGVAVTNTSKLGFRIWDVADYVIPAQEENSLFVMTNVILTMNQTQGLCPEIPDATTVCKSDASCTAGSAGTHSNGVSTGRPAFLKAAENFTLLVKNNIWYPKFNFSKRNILPNITTTYLKSCIYDAKTDPFCPIFRLGKIVENAGHSFQDMAVEGGIMGIQVNWDCNLDRAASLCLPRYSFRRLDTRDVEHNVSPGYNFRFAKYYRDLAGNEQRTLIKAYGIRFDIIVFGKAGKFDIIPTMINIGSGLALLGMATVLCDIIVLYCMKKRLYYREKKYKYVEDYEQGLASELDQ

SEQ ID NO: 3539 - protein, 809 aa, Homo sapiens
MEAEGSSAPARAGSGEGSDSAGGATLKAPKHLWRHEQHHQYPLRQPQFRLLHPHHHLPPPPPPSPQPQPQCPLQPPPPPPLPPPPPPPGAARGRYASSGATGRVRHRGYSDTERYLYCRAMDRTSYAVETGHRPGLKKSRMSWPSSFQGLRRFDVDNGTSAGRSPLDPMTSPGSGLILQANFVHSQRRESFLYRSDSDYDLSPKSMSRNSSIASDIHGDDLIVTPFAQVLASLRTVRNNFAALTNLQDRAPSKRSPMCNQPSINKATITEEAYQKLASETLEELDWCLDQLETLQTRHSVSEMASNKFKRMLNRELTHLSEMSRSGNQVSEFISNTFLDKQHEVEIPSPTQKEKEKKKRPMSQISGVKKLMHSSSLTNSSIPRFGVKTEQEDVLAKELEDVNKWGLHVFRIAELSGNRPLTVIMHTIFQERDLLKTFKIPVDTLITYLMTLEDHYHADVAYHNNIHAADVVQSTHVLLSTPALEAVFTDLEILAAIFASAIHDVDHPGVSNQFLINTNSELALMYNDSSVLENHHLAVGFKLLQEENCDIFQNLTKKQRQSLRKMVIDIVLATDMSKHMNLLADLKTMVETKKVTSSGVLLLDNYSDRIQVLQNMVHCADLSNPTKPLQLYRQWTDRIMEEFFRQGDRERERGMEISPMCDKHNASVEKSQVGFIDYIVHPLWETWADLVHPDAQDILDTLEDNREWYQSTIPQSPSPAPDDPEEGRQGQTEKFQFELTLEEDGESDTEKDSGSQVEEDTSCSDSKTLCTQDSESTEIPLDEQVEEEAVGEEEESQPEACVIDDRSPDT

SEQ ID NO: 3540 - protein, 673 aa, Homo sapiens
MMHVNNFPFRRHSWICFDVDNGTSAGRSPLDPMTSPGSGLILQANFVHSQRRESFLYRSDSDYDLSPKSMSRNSSIASDIHGDDLIVTPFAQVLASLRTVRNNFAALTNLQDRAPSKRSPMCNQPSINKATITEEAYQKLASETLEELDWCLDQLETLQTRHSVSEMASNKFKRMLNRELTHLSEMSRSGNQVSEFISNTFLDKQHEVEIPSPTQKEKEKKKRPMSQISGVKKLMHSSSLTNSSIPRFGVKTEQEDVLAKELEDVNKWGLHVFRIAELSGNRPLTVIMHTIFQERDLLKTFKIPVDTLITYLMTLEDHYHADVAYHNNIHAADVVQSTHVLLSTPALEAVFTDLEILAAIFASAIHDVDHPGVSNQFLINTNSELALMYNDSSVLENHHLAVGFKLLQEENCDIFQNLTKKQRQSLRKMVIDIVLATDMSKHMNLLADLKTMVETKKVTSSGVLLLDNYSDRIQVLQNMVHCADLSNPTKPLQLYRQWTDRIMEEFFRQGDRERERGMEISPMCDKHNASVEKSQVGFIDYIVHPLWETWADLVHPDAQDILDTLEDNREWYQSTIPQSPSPAPDDPEEGRQGQTEKFQFELTLEEDGESDTEKDSGSQVEEDTSCSDSKTLCTQDSESTEIPLDEQVEEEAVGEEEESQPEACVIDDRSPDT

SEQ ID NO: 3541 - protein, 604 aa, Homo sapiens
MSRNSSIASDIHGDDLIVTPFAQVLASLRTVRNNFAALTNLQDRAPSKRSPMCNQPSINKATITEEAYQKLASETLEELDWCLDQLETLQTRHSVSEMASNKFKRMLNRELTHLSEMSRSGNQVSEFISNTFLDKQHEVEIPSPTQKEKEKKKRPMSQISGVKKLMHSSSLTNSSIPRFGVKTEQEDVLAKELEDVNKWGLHVFRIAELSGNRPLTVIMHTIFQERDLLKTFKIPVDTLITYLMTLEDHYHADVAYHNNIHAADVVQSTHVLLSTPALEAVFTDLEILAAIFASAIHDVDHPGVSNQFLINTNSELALMYNDSSVLENHHLAVGFKLLQEENCDIFQNLTKKQRQSLRKMVIDIVLATDMSKHMNLLADLKTMVETKKVTSSGVLLLDNYSDRIQVLQNMVHCADLSNPTKPLQLYRQWTDRIMEEFFRQGDRERERGMEISPMCDKHNASVEKSQVGFIDYIVHPLWETWADLVHPDAQDILDTLEDNREWYQSTIPQSPSPAPDDPEEGRQGQTEKFQFELTLEEDGESDTEKDSGSQVEEDTSCSDSKTLCTQDSESTEIPLDEQVEEEAVGEEEESQPEACVIDDRSPDT

SEQ ID NO: 3542 - protein, 584 aa, Homo sapiens
MKEQPSCAGTGHPMAGYGRMAPFELASGPVKRLRTESPFPCLFAEEAYQKLASETLEELDWCLDQLETLQTRHSVSEMASNKFKRMLNRELTHLSEMSRSGNQVSEFISNTFLDKQHEVEIPSPTQKEKEKKKRPMSQISGVKKLMHSSSLTNSSIPRFGVKTEQEDVLAKELEDVNKWGLHVFRIAELSGNRPLTVIMHTIFQERDLLKTFKIPVDTLITYLMTLEDHYHADVAYHNNIHAADVVQSTHVLLSTPALEAVFTDLEILAAIFASAIHDVDHPGVSNQFLINTNSELALMYNDSSVLENHHLAVGFKLLQEENCDIFQNLTKKQRQSLRKMVIDIVLATDMSKHMNLLADLKTMVETKKVTSSGVLLLDNYSDRIQVLQNMVHCADLSNPTKPLQLYRQWTDRIMEEFFRQGDRERERGMEISPMCDKHNASVEKSQVGFIDYIVHPLWETWADLVHPDAQDILDTLEDNREWYQSTIPQSPSPAPDDPEEGRQGQTEKFQFELTLEEDGESDTEKDSGSQVEEDTSCSDSKTLCTQDSESTEIPLDEQVEEEAVGEEEESQPEACVIDDRSPDT

SEQ ID NO: 3543 - protein, 507 aa, Homo sapiens
MASNKFKRMLNRELTHLSEMSRSGNQVSEFISNTFLDKQHEVEIPSPTQKEKEKKKRPMSQISGVKKLMHSSSLTNSSIPRFGVKTEQEDVLAKELEDVNKWGLHVFRIAELSGNRPLTVIMHTIFQERDLLKTFKIPVDTLITYLMTLEDHYHADVAYHNNIHAADVVQSTHVLLSTPALEAVFTDLEILAAIFASAIHDVDHPGVSNQFLINTNSELALMYNDSSVLENHHLAVGFKLLQEENCDIFQNLTKKQRQSLRKMVIDIVLATDMSKHMNLLADLKTMVETKKVTSSGVLLLDNYSDRIQVLQNMVHCADLSNPTKPLQLYRQWTDRIMEEFFRQGDRERERGMEISPMCDKHNASVEKSQVGFIDYIVHPLWETWADLVHPDAQDILDTLEDNREWYQSTIPQSPSPAPDDPEEGRQGQTEKFQFELTLEEDGESDTEKDSGSQVEEDTSCSDSKTLCTQDSESTEIPLDEQVEEEAVGEEEESQPEACVIDDRSPDT

SEQ ID NO: 3544 - protein, 745 aa, Homo sapiens
MAQQTSPDTLTVPEVDNPHCPNPWLNEDLVKSLRENLLQHEKSKTARKSVSPKLSPVISPRNSPRLLRRMLLSSNIPKQRRFTVAHTCFDVDNGTSAGRSPLDPMTSPGSGLILQANFVHSQRRESFLYRSDSDYDLSPKSMSRNSSIASDIHGDDLIVTPFAQVLASLRTVRNNFAALTNLQDRAPSKRSPMCNQPSINKATITEEAYQKLASETLEELDWCLDQLETLQTRHSVSEMASNKFKRMLNRELTHLSEMSRSGNQVSEFISNTFLDKQHEVEIPSPTQKEKEKKKRPMSQISGVKKLMHSSSLTNSSIPRFGVKTEQEDVLAKELEDVNKWGLHVFRIAELSGNRPLTVIMHTIFQERDLLKTFKIPVDTLITYLMTLEDHYHADVAYHNNIHAADVVQSTHVLLSTPALEAVFTDLEILAAIFASAIHDVDHPGVSNQFLINTNSELALMYNDSSVLENHHLAVGFKLLQEENCDIFQNLTKKQRQSLRKMVIDIVLATDMSKHMNLLADLKTMVETKKVTSSGVLLLDNYSDRIQVLQNMVHCADLSNPTKPLQLYRQWTDRIMEEFFRQGDRERERGMEISPMCDKHNASVEKSQVGFIDYIVHPLWETWADLVHPDAQDILDTLEDNREWYQSTIPQSPSPAPDDPEEGRQGQTEKFQFELTLEEDGESDTEKDSGSQVEEDTSCSDSKTLCTQDSESTEIPLDEQVEEEAVGEEEESQPEACVIDDRSPDT

SEQ ID NO: 3545 - protein, 215 aa, Homo sapiens
MAQQTSPDTLTVPEVDNPHCPNPWLNEDLVKSLRENLLQHEKSKTARKSVSPKLSPVISPRNSPRLLRRMLLSSNIPKQRRFTVAHTCFDVDNGTSAGRSPLDPMTSPGSGLILQANFVHSQRRESFLYRSDSDYDLSPKSMSRNSSIASDIHGDDLIVTPFAQVLASLRTVRNNFAALTNLQDRAPSKRSPMCNQPSINKATITGLYNGIIAFL

SEQ ID NO: 3546 - protein, 518 aa, Homo sapiens
MPEANYLLSVSWGYIKFKRMLNRELTHLSEMSRSGNQVSEFISNTFLDKQHEVEIPSPTQKEKEKKKRPMSQISGVKKLMHSSSLTNSSIPRFGVKTEQEDVLAKELEDVNKWGLHVFRIAELSGNRPLTVIMHTIFQERDLLKTFKIPVDTLITYLMTLEDHYHADVAYHNNIHAADVVQSTHVLLSTPALEAVFTDLEILAAIFASAIHDVDHPGVSNQFLINTNSELALMYNDSSVLENHHLAVGFKLLQEENCDIFQNLTKKQRQSLRKMVIDIVLATDMSKHMNLLADLKTMVETKKVTSSGVLLLDNYSDRIQVLQNMVHCADLSNPTKPLQLYRQWTDRIMEEFFRQGDRERERGMEISPMCDKHNASVEKSQVGFIDYIVHPLWETWADLVHPDAQDILDTLEDNREWYQSTIPQSPSPAPDDPEEGRQGQTEKFQFELTLEEDGESDTEKDSGSQVEEDTSCSDSKTLCTQDSESTEIPLDEQVEEEAVGEEEESQPEACVIDDRSPDT

SEQ ID NO: 3547 - protein, 687 aa, Homo sapiens
MAFVWDPLGATVPGPSTRAKSRLRFSKSYSFDVDNGTSAGRSPLDPMTSPGSGLILQANFVHSQRRESFLYRSDSDYDLSPKSMSRNSSIASDIHGDDLIVTPFAQVLASLRTVRNNFAALTNLQDRAPSKRSPMCNQPSINKATITEEAYQKLASETLEELDWCLDQLETLQTRHSVSEMASNKFKRMLNRELTHLSEMSRSGNQVSEFISNTFLDKQHEVEIPSPTQKEKEKKKRPMSQISGVKKLMHSSSLTNSSIPRFGVKTEQEDVLAKELEDVNKWGLHVFRIAELSGNRPLTVIMHTIFQERDLLKTFKIPVDTLITYLMTLEDHYHADVAYHNNIHAADVVQSTHVLLSTPALEAVFTDLEILAAIFASAIHDVDHPGVSNQFLINTNSELALMYNDSSVLENHHLAVGFKLLQEENCDIFQNLTKKQRQSLRKMVIDIVLATDMSKHMNLLADLKTMVETKKVTSSGVLLLDNYSDRIQVLQNMVHCADLSNPTKPLQLYRQWTDRIMEEFFRQGDRERERGMEISPMCDKHNASVEKSQVGFIDYIVHPLWETWADLVHPDAQDILDTLEDNREWYQSTIPQSPSPAPDDPEEGRQGQTEKFQFELTLEEDGESDTEKDSGSQVEEDTSCSDSKTLCTQDSESTEIPLDEQVEEEAVGEEEESQPEACVIDDRSPDT

SEQ ID NO: 3548 - protein, 679 aa, Homo sapiens
MSIIMKPRSRSTSSLRTAEAVCFDVDNGTSAGRSPLDPMTSPGSGLILQANFVHSQRRESFLYRSDSDYDLSPKSMSRNSSIASDIHGDDLIVTPFAQVLASLRTVRNNFAALTNLQDRAPSKRSPMCNQPSINKATITEEAYQKLASETLEELDWCLDQLETLQTRHSVSEMASNKFKRMLNRELTHLSEMSRSGNQVSEFISNTFLDKQHEVEIPSPTQKEKEKKKRPMSQISGVKKLMHSSSLTNSSIPRFGVKTEQEDVLAKELEDVNKWGLHVFRIAELSGNRPLTVIMHTIFQERDLLKTFKIPVDTLITYLMTLEDHYHADVAYHNNIHAADVVQSTHVLLSTPALEAVFTDLEILAAIFASAIHDVDHPGVSNQFLINTNSELALMYNDSSVLENHHLAVGFKLLQEENCDIFQNLTKKQRQSLRKMVIDIVLATDMSKHMNLLADLKTMVETKKVTSSGVLLLDNYSDRIQVLQNMVHCADLSNPTKPLQLYRQWTDRIMEEFFRQGDRERERGMEISPMCDKHNASVEKSQVGFIDYIVHPLWETWADLVHPDAQDILDTLEDNREWYQSTIPQSPSPAPDDPEEGRQGQTEKFQFELTLEEDGESDTEKDSGSQVEEDTSCSDSKTLCTQDSESTEIPLDEQVEEEAVGEEEESQPEACVIDDRSPDT

SEQ ID NO: 3549 - protein, 748 aa, Homo sapiens
MKRNTCDLLSRSKSASEETLHSSNEEEDPFRGMEPYLVRRLSCRNIQLPPLAFRQLEQADLKSESENIQRPTSLPLKILPLIAITSAESSGFDVDNGTSAGRSPLDPMTSPGSGLILQANFVHSQRRESFLYRSDSDYDLSPKSMSRNSSIASDIHGDDLIVTPFAQVLASLRTVRNNFAALTNLQDRAPSKRSPMCNQPSINKATITEEAYQKLASETLEELDWCLDQLETLQTRHSVSEMASNKFKRMLNRELTHLSEMSRSGNQVSEFISNTFLDKQHEVEIPSPTQKEKEKKKRPMSQISGVKKLMHSSSLTNSSIPRFGVKTEQEDVLAKELEDVNKWGLHVFRIAELSGNRPLTVIMHTIFQERDLLKTFKIPVDTLITYLMTLEDHYHADVAYHNNIHAADVVQSTHVLLSTPALEAVFTDLEILAAIFASAIHDVDHPGVSNQFLINTNSELALMYNDSSVLENHHLAVGFKLLQEENCDIFQNLTKKQRQSLRKMVIDIVLATDMSKHMNLLADLKTMVETKKVTSSGVLLLDNYSDRIQVLQNMVHCADLSNPTKPLQLYRQWTDRIMEEFFRQGDRERERGMEISPMCDKHNASVEKSQVGFIDYIVHPLWETWADLVHPDAQDILDTLEDNREWYQSTIPQSPSPAPDDPEEGRQGQTEKFQFELTLEEDGESDTEKDSGSQVEEDTSCSDSKTLCTQDSESTEIPLDEQVEEEAVGEEEESQPEACVIDDRSPDT

SEQ ID NO: 3550 - protein, 219 aa, Homo sapiens
MAQQTSPDTLTVPEVDNPHCPNPWLNEDLVKSLRENLLQHEKSKTARKSVSPKLSPVISPRNSPRLLRRMLLSSNIPKQRRFTVAHTCFDVDNGTSAGRSPLDPMTSPGSGLILQANFVHSQRRESFLYRSDSDYDLSPKSMSRNSSIASDIHGDDLIVTPFAQVLASLRTVRNNFAALTNLQDRAPSKRSPMCNQPSINKATITGSWMELNPYTLLDM

SEQ ID NO: 3551 - protein, 481 aa, Homo sapiens
MEDPSEPDRLASADGGSPEEEEDGEREPLLPRIAWAHPRRGAPGSAVRLLDAAGEEGEAGDEELPLPPGDVGVSRSSSAELDRSRPAVSVTIGTSEMNAFLDDPEFADIMLRAEQAIEVGIFPERISQGSSGSYFVKDPKRKIIGVFKPKSEEPYGQLNPKWTKYVHKVCCPCCFGRGCLIPNQGYLSEAGAYLVDNKLHLSIVPKTKVVWLVSETFNYNAIDRAKSRGKKYALEKVPKVGRKFHRIGLPPKIGSFQLFVEGYKEAEYWLRKFEADPLPENIRKQFQSQFERLVILDYIIRNTDRGNDNWLVRYEKQKCEKEIDHKESKWIDDEEFLIKIAAIDNGLAFPFKHPDEWRAYPFHWAWLPQAKVPFSEEIRNLILPYISDMNFVQDLCEDLYELFKTDKGFDKATFESQMSVMRGQILNLTQALRDGKSPFQLVQIPCVIVERSQGGSQGRIVHLSNSFTQTVNCRKPFFSSW

SEQ ID NO: 3552 - protein, 860 aa, Homo sapiens
MGEVTAEEVEKFLDSNIGFAKQYYNLHYRAKLISDLLGAKEAAVDFSNYHSPSSMEESEIIFDLLRDFQENLQTEKCIFNVMKKLCFLLQADRMSLFMYRTRNGIAELATRLFNVHKDAVLEDCLVMPDQEIVFPLDMGIVGHVAHSKKIANVPNTEEDEHFCDFVDILTEYKTKNILASPIMNGKDVVAIIMAVNKVDGSHFTKRDEEILLKYLNFANLIMKVYHLSYLHNCETRRGQILLWSGSKVFEELTDIERQFHKALYTVRAFLNCDRYSVGLLDMTKQKEFFDVWPVLMGEVPPYSGPRTPDGREINFYKVIDYILHGKEDIKVIPNPPPDHWALVSGLPAYVAQNGLICNIMNAPAEDFFAFQKEPLDESGWMIKNVLSMPIVNKKEEIVGVATFYNRKDGKPFDEMDETLMESLTQFLGWSVLNPDTYESMNKLENRKDIFQDIVKYHVKCDNEEIQKILKTREVYGKEPWECEEEELAEILQAELPDADKYEINKFHFSDLPLTELELVKCGIQMYYELKVVDKFHIPQEALVRFMYSLSKGYRKITYHNWRHGFNVGQTMFSLLVTGKLKRYFTDLEALAMVTAAFCHDIDHRGTNNLYQMKSQNPLAKLHGSSILERHHLEFGKTLLRDESLNIFQNLNRRQHEHAIHMMDIAIIATDLALYFKKRTMFQKIVDQSKTYESEQEWTQYMMLEQTRKEIVMAMMMTACDLSAITKPWEVQSQVALLVAAEFWEQGDLERTVLQQNPIPMMDRNKADELPKLQVGFIDFVCTFVYKEFSRFHEEITPMLDGITNNRKEWKALADEYDAKMKVQEEKKQKQQSAKSAAAGNQPGGNPSPGGATTSKSCCIQ

SEQ ID NO: 3553 - protein, 736 aa, Homo sapiens
MKKSRSVMTVMADDNVKDYFECSLSKSYSSSSNTLGIDLWRGRRCCSGNLQLPPLSQRQSERARTPEGDGISRPTTLPLTTLPSIAITTVSQECFDVENGPSPGRSPLDPQASSSAGLVLHATFPGHSQRRESFLYRSDSDYDLSPKAMSRNSSLPSEQHGDDLIVTPFAQVLASLRSVRNNFTILTNLHGTSNKRSPAASQPPVSRVNPQEESYQKLAMETLEELDWCLDQLETIQTYRSVSEMASNKFKRMLNRELTHLSEMSRSGNQVSEYISNTFLDKQNDVEIPSPTQKDREKKKKQQLMTQISGVKKLMHSSSLNNTSISRFGVNTENEDHLAKELEDLNKWGLNIFNVAGYSHNRPLTCIMYAIFQERDLLKTFRISSDTFITYMMTLEDHYHSDVAYHNSLHAADVAQSTHVLLSTPALDAVFTDLEILAAIFAAAIHDVDHPGVSNQFLINTNSELALMYNDESVLENHHLAVGFKLLQEEHCDIFMNLTKKQRQTLRKMVIDMVLATDMSKHMSLLADLKTMVETKKVTSSGVLLLDNYTDRIQVLRNMVHCADLSNPTKSLELYRQWTDRIMEEFFQQGDKERERGMEISPMCDKHTASVEKSQVGFIDYIVHPLWETWADLVQPDAQDILDTLEDNRNWYQSMIPQSPSPPLDEQNRDCQGLMEKFQFELTLDEEDSEGPEKEGEGHSYFSSTKTLCVIDPENRDSLGETDIDIATEDKSPVDT

SEQ ID NO: 3554 - protein, 564 aa, Homo sapiens
MKEHGGTFSSTGISGGSGDSAMDSLQPLQPNYMPVCLFAEESYQKLAMETLEELDWCLDQLETIQTYRSVSEMASNKFKRMLNRELTHLSEMSRSGNQVSEYISNTFLDKQNDVEIPSPTQKDREKKKKQQLMTQISGVKKLMHSSSLNNTSISRFGVNTENEDHLAKELEDLNKWGLNIFNVAGYSHNRPLTCIMYAIFQERDLLKTFRISSDTFITYMMTLEDHYHSDVAYHNSLHAADVAQSTHVLLSTPALDAVFTDLEILAAIFAAAIHDVDHPGVSNQFLINTNSELALMYNDESVLENHHLAVGFKLLQEEHCDIFMNLTKKQRQTLRKMVIDMVLATDMSKHMSLLADLKTMVETKKVTSSGVLLLDNYTDRIQVLRNMVHCADLSNPTKSLELYRQWTDRIMEEFFQQGDKERERGMEISPMCDKHTASVEKSQVGFIDYIVHPLWETWADLVQPDAQDILDTLEDNRNWYQSMIPQSPSPPLDEQNRDCQGLMEKFQFELTLDEEDSEGPEKEGEGHSYFSSTKTLCVIDPENRDSLGETDIDIATEDKSPVDT

SEQ ID NO: 3555 - protein, 721 aa, Homo sapiens
MTAKDSSKELTASEPEVCIKTFKEQMHLELELPRLPGNRPTSPKISPRSSPRNSPCFFRKLLVNKSIRQRRRFTVAHTCFDVENGPSPGRSPLDPQASSSAGLVLHATFPGHSQRRESFLYRSDSDYDLSPKAMSRNSSLPSEQHGDDLIVTPFAQVLASLRSVRNNFTILTNLHGTSNKRSPAASQPPVSRVNPQEESYQKLAMETLEELDWCLDQLETIQTYRSVSEMASNKFKRMLNRELTHLSEMSRSGNQVSEYISNTFLDKQNDVEIPSPTQKDREKKKKQQLMTQISGVKKLMHSSSLNNTSISRFGVNTENEDHLAKELEDLNKWGLNIFNVAGYSHNRPLTCIMYAIFQERDLLKTFRISSDTFITYMMTLEDHYHSDVAYHNSLHAADVAQSTHVLLSTPALDAVFTDLEILAAIFAAAIHDVDHPGVSNQFLINTNSELALMYNDESVLENHHLAVGFKLLQEEHCDIFMNLTKKQRQTLRKMVIDMVLATDMSKHMSLLADLKTMVETKKVTSSGVLLLDNYTDRIQVLRNMVHCADLSNPTKSLELYRQWTDRIMEEFFQQGDKERERGMEISPMCDKHTASVEKSQVGFIDYIVHPLWETWADLVQPDAQDILDTLEDNRNWYQSMIPQSPSPPLDEQNRDCQGLMEKFQFELTLDEEDSEGPEKEGEGHSYFSSTKTLCVIDPENRDSLGETDIDIATEDKSPVDT

SEQ ID NO: 3556 - protein, 503 aa, Homo sapiens
MPEANYLLSVSWGYIKFKRMLNRELTHLSEMSRSGNQVSEYISNTFLDKQNDVEIPSPTQKDREKKKKQQLMTQISGVKKLMHSSSLNNTSISRFGVNTENEDHLAKELEDLNKWGLNIFNVAGYSHNRPLTCIMYAIFQERDLLKTFRISSDTFITYMMTLEDHYHSDVAYHNSLHAADVAQSTHVLLSTPALDAVFTDLEILAAIFAAAIHDVDHPGVSNQFLINTNSELALMYNDESVLENHHLAVGFKLLQEEHCDIFMNLTKKQRQTLRKMVIDMVLATDMSKHMSLLADLKTMVETKKVTSSGVLLLDNYTDRIQVLRNMVHCADLSNPTKSLELYRQWTDRIMEEFFQQGDKERERGMEISPMCDKHTASVEKSQVGFIDYIVHPLWETWADLVQPDAQDILDTLEDNRNWYQSMIPQSPSPPLDEQNRDCQGLMEKFQFELTLDEEDSEGPEKEGEGHSYFSSTKTLCVIDPENRDSLGETDIDIATEDKSPVDT

SEQ ID NO: 3557 - protein, 818 aa, Homo sapiens
MESLSPGGPPGHPYQGEASTCWQLTVRVLEARNLRWADLLSEADPYVILQLSTAPGMKFKTKTLTDTSHPVWNEAFRFLIQSQVKNVLELSIYDEDSVTEDDICFKVLYDISEVLPGKLLRKTFSQSPQGEEELDVEFLMEETSDRPENLITNKVIVARELSCLDVHLDSTGSTAVVADQDKLELELVLKGSYEDTQTSFLGTASAFRFHYMAALETELSGRLRSSRSNGWNGDNSAGYLTVPLRPLTIGKEVTMDVPAPNAPGVRLQLKAEGCPEELAVHLGFNLCAEEQAFLSRRKQVVAKALKQALQLDRDLQEDEVPVVGIMATGGGARAMTSLYGHLLALQKLGLLDCVTYFSGISGSTWTMAHLYGDPEWSQRDLEGPIRYAREHLAKSKLEVFSPERLASYRRELELRAEQGHPTTFVDLWALVLESMLHGQVMDQKLSGQRAALERGQNPLPLYLSLNVKENNLETLDFKEWVEFSPYEVGFLKYGAFVPPELFGSEFFMGRLMRRIPEPRICFLEAIWSNIFSLNLLDAWYDLTSSGESWKQHIKDKTRSLEKEPLTTSGTSSRLEASWLQPGTALAQAFKGFLTGRPLHQRSPNFLQGLQLHQDYCSHKDFSTWADYQLDSMPSQLTPKEPRLCLVDAAYFINTSSPSMFRPGRRLDLILSFDYSLSAPFEALQQTELYCRARGLPFPRVEPSPQDQHQPRECHLFSDPACPEAPILLHFPLVNASFKDHSAPGVQRSPAELQGGQVDLTGATCPYTLSNMTYKEEDFERLLRLSDYNVQTSQGAILQALRTALKHRTLEARPPRAQT

SEQ ID NO: 3558 - protein, 723 aa, Homo sapiens
MESLSPGGPPGHPYQGEASTCWQLTVRVLEARNLRWADLLSEADPYVILQLSTAPGMKFKTKTLTDTSHPVWNEAFRFLIQSQVKNVLELSIYDEDSVTEDDICFKVLYDISEVLPGKLLRKTFSQSPQGEEELDVEFLMEETSDRPENLITNKVIVARELSCLDVHLDSTGSTAVVADQDKLELELVLKGSYEDTQTSFLGTASAFRFHYMAALETELSGRLRSSRSNGWNGDNSAGYLTVPLRPLTIGKEVTMDVPAPNAPGVRLQLKAEGCPEELAVHLGFNLCAEEQAFLSRRKQVVAKALKQALQLDRDLQEDEVPVVGIMATGGGARAMTSLYGHLLALQKLGLLDCVTYFSGISGSTWTMAHLYGDPEWSQRDLEGPIRYAREHLAKSKLEVFSPERLASYRRELELRAEQGHPTTFVDLWALVLESMLHGQVMDQKLSGQRAALERGQNPLPLYLSLNVKENNLETLDFKEWVEFSPYEVGFLKYGAFVPPELFGSEFFMGRLMRRIPEPRICFLEAIWSNIFSLNLLDAWYDLTSSGESWKQHIKDKTRSLEKEPLTTSGTSSRLEASWLQPGTALAQAFKGFLTGRPLHQRSPNFLQGLQLHQDYCSHKDFSTWADYQLDSMPSQLTPKEPRLCLVDAAYFINTSSPSMFRPGRRLDLILSFDYSLSAPFEVPWSPQGNPSAQPGQAPEASSRATEPLPHTAGVPKGRRGVRP

SEQ ID NO: 3559 - protein, 415 aa, Homo sapiens
MEDLCVANTLFALNLFKHLAKASPTQNLFLSPWSISSTMAMVYMGSRGSTEDQMAKVLQFNEVGANAVTPMTPENFTSCGFMQQIQKGSYPDAILQAQAADKIHSSFRSLSSAINASTGNYLLESVNKLFGEKSASFREEYIRLCQKYYSSEPQAVDFLECAEEARKKINSWVKTQTKGKIPNLLPEGSVDGDTRMVLVNAVYFKGKWKTPFEKKLNGLYPFRVNSAQRTPVQMMYLREKLNIGYIEDLKAQILELPYAGDVSMFLLLPDEIADVSTGLELLESEITYDKLNKWTSKDKMAEDEVEVYIPQFKLEEHYELRSILRSMGMEDAFNKGRANFSGMSERNDLFLSEVFHQAMVDVNEEGTEAAAGTGGVMTGRTGHGGPQFVADHPFLFLIMHKITNCILFFGRFSSP

SEQ ID NO: 3560 - protein, 374 aa, Homo sapiens
MAAPPRPAPSPPAPRRLDTSDVLQQIMAITDQSLDEAQARKHALNCHRMKPALFSVLCEIKEKTVVSIRGIQDEDPPDAQLLRLDNMLLAEGVCRPEKRGRGGAVARAGTATPGGCPNDNSIEHSDYRAKLSQIRQIYHSELEKYEQACREFTTHVTNLLQEQSRMRPVSPKEIERMVGAIHGKFSAIQMQLKQSTCEAVMTLRSRLLDARRKRRNFSKQATEVLNEYFYSHLNNPYPSEEAKEELARKGGLTISQVSNWFGNKRIRYKKNMGKFQEEATIYTGKTAVDTTEVGVPGNHASCLSTPSSGSSGPFPLPSAGDAFLTLRTLASLQPPPGGGCLQSQAQGSWQGATPQPATASPAGDPGSINSSTSN

SEQ ID NO: 3561 - protein, 123 aa, Homo sapiens
MNGSNMANTSPSVKSKEDQGLSGHDEKENPFAEYMWMENEEDFNRQVEEELQEQDFLDRCFQEMLDEEDQDWFIPSRDLPQAMGQLQQQLNGLSVSEGHDSEDILSKSNLNPDAKEFIPGEKY

SEQ ID NO: 3562 - protein, 127 aa, Homo sapiens
MKDPSRSSTSPSIINEDVIINGHSHEDDNPFAEYMWMENEEEFNRQIEEELWEEEFIERCFQEMLEEEEEHEWFIPARDLPQTMDQIQDQFNDLVISDGSSLEDLVVKSNLNPNAKEFVPGVKYGNI

SEQ ID NO: 3563 - protein, 832 aa, Homo sapiens
MAGLRYSVKVYVLNEDEEWNNLGTGQVSSTYDEQFQGMSLLVRSDSDGSVILRSQIPPDRPYGKYQETLIVWYEAENQGLVLKFQDPAGCQDIWKEICQAQGKDPSIQTTVNISDEPEEDFNEMSVISNMVVLPDCELNTLDQIADIVTSVFSSPVTDRERLAEILKNEAYIPKLLQLFHTCENLENTEGLHHLYEIIKGILFLNEACLFEIMFSDECIMDVVGCLEYDPALDQPKRHRDFLTNDAKFKEVIPITNSELRQKIHQTYRLQYIYDILLPVPSIFEDNFLSTLTTFIFSNKAEIVSMLQKDHKFLYEVFAQLKDETTHDDRRCELLFFFKELCSFSQALQPQSKDALFETLIQLGVLPALKIVMIRDDLQVRSAAAVICAYLVEYSPSRIREFIISEAHVCKDSDLFINVIIKQMICDTDPELGGAVHLMVVLHTLLDPRNMLTTPEKSERSEFLHFFYKHCMHKFTAPLLAATSEHNCEEDDIAGYDKSKNCPNDNQTAQLLALILELLTFCIQHHTFYIRSYILNKDLLRKALILMNSKHTHLILCVLRFMRRMICLNDEAYNNYIIKGNLFEPVVNALLDNGTRYNMLNSAILELFEYIRVENIKPLVSHIVEKFYNTLESIEYVQTFKGLKIKYEKERDRQSQIQKNLHSVLQNIVVFRGTIEEIGLEEEICFMEDAGEVVMPPLEDDDEFMETKRTQEGEAVMPPLEDDDKFTETKRTHQEGEAVMPPLEDDDEFMETKRNQEHEGKVDSPKRTSSGDFKFSSSYSACAAIGTGSPSGSSVVRLVDHPDDEEEKEEDEEEKEEDKEDETSPKKKPHLSS

SEQ ID NO: 3564 - protein, 756 aa, Homo sapiens
MAGLRYSVKVYVLNEDEEWNNLGTGQVSSTYDEQFQGMSLLVRSDSDGSVILRSQIPPDRPYGKYQETLIVWYEAENQGLVLKFQDPAGCQDIWKEICQAQGKDPSIQTTVNISDEPEEDFNEMSVISNMVVLPDCELNTLDQIADIVTSVFSSPVTDRERLAEILKNEAYIPKLLQLFHTCENLENTEGLHHLYEIIKGILFLNEACLFEIMFSDECIMDVVGCLEYDPALDQPKRHRDFLTNDAKFKEVIPITNSELRQKIHQTYRLQYIYDILLPVPSIFEDNFLSTLTTFIFSNKAEIVSMLQKDHKFLYEVFAQLKDETTHDDRRCELLFFFKELCSFSQALQPQSKDALFETLIQLGVLPALKIVMIRDDLQVRSAAAVICAYLVEYSPSRIREFIISEAHVCKDSDLFINVIIKQMICDTDPELGGAVHLMVVLHTLLDPRNMLTTPEKSERSEFLHFFYKHCMHKFTAPLLAATSEHNCEEDDIAGYDKSKNCPNDNQTAQLLALILELLTFCIQHHTFYIRSYILNKDLLRKALILMNSKHTHLILCVLRFMRRMICLNDEAYNNYIIKGNLFEPVVNALLDNGTRYNMLNSAILELFEYIRVENIKPLVSHIVEKFYNTLESIEYVQTFKGLKIKYEKERDRQSQIQKNLHSVLQNIVVFRGTIEEIGLEEEICFMEDAGEVVMPPLEDDDEFMETKRTQEGEAVMPPLEDDDKFTETKRTHQDEEEKEEDKEDETSPKKKPHLSS

SEQ ID NO: 3565 - protein, 524 aa, Homo sapiens
MSDNGELEDKPPAPPVRMSSTIFSTGGKDPLSANHSLKPLPSVPEEKKPRHKIISIFSGTEKGSKKKEKERPEISPPSDFEHTIHVGFDAVTGEFTGMPEQWARLLQTSNITKLEQKKNPQAVLDVLKFYDSNTVKQKYLSFTPPEKDGFPSGTPALNAKGTEAPAVVTEEEDDDEETAPPVIAPRPDHTKSIYTRSVIDPVPAPVGDSHVDGAAKSLDKQKKKTKMTDEEIMEKLRTIVSIGDPKKKYTRYEKIGQGASGTVFTATDVALGQEVAIKQINLQKQPKKELIINEILVMKELKNPNIVNFLDSYLVGDELFVVMEYLAGGSLTDVVTETCMDEAQIAAVCRECLQALEFLHANQVIHRDIKSDNVLLGMEGSVKLTDFGFCAQITPEQSKRSTMVGTPYWMAPEVVTRKAYGPKVDIWSLGIMAIEMVEGEPPYLNENPLRALYLIATNGTPELQNPEKLSPIFRDFLNRCLEMDVEKRGSAKELLQHPFLKLAKPLSSLTPLIMAAKEAMKSNR

SEQ ID NO: 3566 - protein, 969 aa, Homo sapiens
MPPRAPPAPGPRPPPRAAAATDTAAGAGGAGGAGGAGGPGFRPLAPRPWRWLLLLALPAACSAPPPRPVYTNHWAVQVLGGPAEADRVAAAHGYLNLGQIGNLEDYYHFYHSKTFKRSTLSSRGPHTFLRMDPQVKWLQQQEVKRRVKRQVRSDPQALYFNDPIWSNMWYLHCGDKNSRCRSEMNVQAAWKRGYTGKNVVVTILDDGIERNHPDLAPNYDSYASYDVNGNDYDPSPRYDASNENKHGTRCAGEVAASANNSYCIVGIAYNAKIGGIRMLDGDVTDVVEAKSLGIRPNYIDIYSASWGPDDDGKTVDGPGRLAKQAFEYGIKKGRQGLGSIFVWASGNGGREGDYCSCDGYTNSIYTISVSSATENGYKPWYLEECASTLATTYSSGAFYERKIVTTDLRQRCTDGHTGTSVSAPMVAGIIALALEANSQLTWRDVQHLLVKTSRPAHLKASDWKVNGAGHKVSHFYGFGLVDAEALVVEAKKWTAVPSQHMCVAASDKRPRSIPLVQVLRTTALTSACAEHSDQRVVYLEHVVVRTSISHPRRGDLQIYLVSPSGTKSQLLAKRLLDLSNEGFTNWEFMTVHCWGEKAEGQWTLEIQDLPSQVRNPEKQGKLKEWSLILYGTAEHPYHTFSAHQSRSRMLELSAPELEPPKAALSPSQVEVPEDEEDYTAQSTPGSANILQTSVCHPECGDKGCDGPNADQCLNCVHFSLGSVKTSRKCVSVCPLGYFGDTAARRCRRCHKGCETCSSRAATQCLSCRRGFYHHQEMNTCVTLCPAGFYADESQKNCLKCHPSCKKCVDEPEKCTVCKEGFSLARGSCIPDCEPGTYFDSELIRCGECHHTCGTCVGPGREECIHCAKNFHFHDWKCVPACGEGFYPEEMPGLPHKVCRRCDENCLSCAGSSRNCSRCKTGFTQLGTSCITNHTCSNADETFCEMVKSNRLCERKLFIQFCCRTCLLAG

SEQ ID NO: 3567 - protein, 956 aa, Homo sapiens
MPPRAPPAPGPRPPPRAAAATDTAAGAGGAGGAGGAGGPGFRPLAPRPWRWLLLLALPAACSAPPPRPVYTNHWAVQVLGGPAEADRVAAAHGYLNLGQIGNLEDYYHFYHSKTFKRSTLSSRGPHTFLRMDPQVKWLQQQEVKRRVKRQVRSDPQALYFNDPIWSNMWYLHCGDKNSRCRSEMNVQAAWKRGYTGKNVVVTILDDGIERNHPDLAPNYDSYASYDVNGNDYDPSPRYDASNENKHGTRCAGEVAASANNSYCIVGIAYNAKIGGIRMLDGDVTDVVEAKSLGIRPNYIDIYSASWGPDDDGKTVDGPGRLAKQAFEYGIKKGRQGLGSIFVWASGNGGREGDYCSCDGYTNSIYTISVSSATENGYKPWYLEECASTLATTYSSGAFYERKIVTTDLRQRCTDGHTGTSVSAPMVAGIIALALEANSQLTWRDVQHLLVKTSRPAHLKASDWKVNGAGHKVSHFYGFGLVDAEALVVEAKKWTAVPSQHMCVAASDKRPRSIPLVQVLRTTALTSACAEHSDQRVVYLEHVVVRTSISHPRRGDLQIYLVSPSGTKSQLLAKRLLDLSNEGFTNWEFMTVHCWGEKAEGQWTLEIQDLPSQVRNPEKQGKLKEWSLILYGTAEHPYHTFSAHQSRSRMLELSAPELEPPKAALSPSQVEVPEDEEDYTGVCHPECGDKGCDGPNADQCLNCVHFSLGSVKTSRKCVSVCPLGYFGDTAARRCRRCHKGCETCSSRAATQCLSCRRGFYHHQEMNTCVTLCPAGFYADESQKNCLKCHPSCKKCVDEPEKCTVCKEGFSLARGSCIPDCEPGTYFDSELIRCGECHHTCGTCVGPGREECIHCAKNFHFHDWKCVPACGEGFYPEEMPGLPHKVCRRCDENCLSCAGSSRNCSRCKTGFTQLGTSCITNHTCSNADETFCEMVKSNRLCERKLFIQFCCRTCLLAG

SEQ ID NO: 3568 - protein, 487 aa, Homo sapiens
MPPRAPPAPGPRPPPRAAAATDTAAGAGGAGGAGGAGGPGFRPLAPRPWRWLLLLALPAACSAPPPRPVYTNHWAVQVLGGPAEADRVAAAHGYLNLGQIGNLEDYYHFYHSKTFKRSTLSSRGPHTFLRMDPQVKWLQQQEVKRRVKRQVRSDPQALYFNDPIWSNMWYLHCGDKNSRCRSEMNVQAAWKRGYTGKNVVVTILDDGIERNHPDLAPNYDSYASYDVNGNDYDPSPRYDASNENKHGTRCAGEVAASANNSYCIVGIAYNAKIGGIRMLDGDVTDVVEAKSLGIRPNYIDIYSASWGPDDDGKTVDGPGRLAKQAFEYGIKKGRQGLGSIFVWASGNGGREGDYCSCDGYTNSIYTISVSSATENGYKPWYLEECASTLATTYSSGAFYERKIVTTDLRQRCTDGHTGTSVSAPMVAGIIALALEANSQLTWRDVQHLLVKTSRPAHLKASDWKVNGAGHKGAAVAFWWTIGWPWNV

SEQ ID NO: 3569 - protein, 652 aa, Homo sapiens
MPPRAPPAPGPRPPPRAAAATDTAAGAGGAGGAGGAGGPGFRPLAPRPWRWLLLLALPAACSAPPPRPVYTNHWAVQVLGGPAEADRVAAAHGYLNLGQIGNLEDYYHFYHSKTFKRSTLSSRGPHTFLRMDPQVKWLQQQEVKRRVKRQVRSDPQALYFNDPIWSNMWYLHCGDKNSRCRSEMNVQAAWKRGYTGKNVVVTILDDGIERNHPDLAPNYDSYASYDVNGNDYDPSPRYDASNENKHGTRCAGEVAASANNSYCIVGIAYNAKIGGIRMLDGDVTDVVEAKSLGIRPNYIDIYSASWGPDDDGKTVDGPGRLAKQAFEYGIKKGRQGLGSIFVWASGNGGREGDYCSCDGYTNSIYTISVSSATENGYKPWYLEECASTLATTYSSGAFYERKIVTTDLRQRCTDGHTGTSVSAPMVAGIIALALEANSQLTWRDVQHLLVKTSRPAHLKASDWKVNGAGHKVSHFYGFGLVDAEALVVEAKKWTAVPSQHMCVAASDKRPRSIPLVQVLRTTALTSACAEHSDQRVVYLEHVVVRTSISHPRRGDLQIYLVSPSGTKSQLLAKRLLDLSNEGFTNWEFMTVHCWGEKAEGQWTLEIQDLPSQVRNPEKQGDLETPVANQLTTEEREPGLKHVFRWQIEQELW

SEQ ID NO: 3570 - protein, 623 aa, Homo sapiens
MPPRAPPAPGPRPPPRAAAATDTAAGAGGAGGAGGAGGPGFRPLAPRPWRWLLLLALPAACSAPPPRPVYTNHWAVQVLGGPAEADRVAAAHGYLNLGQIGNLEDYYHFYHSKTFKRSTLSSRGPHTFLRMDPQVKWLQQQEVKRRVKRQVRSDPQALYFNDPIWSNMWYLHCGDKNSRCRSEMNVQAAWKRGYTGKNVVVTILDDGIERNHPDLAPNYDSYASYDVNGNDYDPSPRYDASNENKHGTRCAGEVAASANNSYCIVGIAYNAKIGGIRMLDGDVTDVVEAKSLGIRPNYIDIYSASWGPDDDGKTVDGPGRLAKQAFEYGIKKGRQGLGSIFVWASGNGGREGDYCSCDGYTNSIYTISVSSATENGYKPWYLEECASTLATTYSSGAFYERKIVTTDLRQRCTDGHTGTSVSAPMVAGIIALALEANSQLTWRDVQHLLVKTSRPAHLKASDWKVNGAGHKVSHFYGFGLVDAEALVVEAKKWTAVPSQHMCVAASDKRPRSIPLVQVLRTTALTSACAEHSDQRVVYLEHVVVRTSISHPRRGDLQIYLVSPSGTKSQLLAKRLLDLSNEGFTNWEFMTVHCWGEKAEGQWTLEIQDLPSQVRNPEKQGNLD

SEQ ID NO: 3571 - protein, 497 aa, Homo sapiens
MWYLHCGDKNSRCRSEMNVQAAWKRGYTGKNVVVTILDDGIERNHPDLAPNYDSYASYDVNGNDYDPSPRYDASNENKHGTRCAGEVAASANNSYCIVGIAYNAKIGGIRMLDGDVTDVVEAKSLGIRPNYIDIYSASWGPDDDGKTVDGPGRLAKQAFEYGIKKGRQGLGSIFVWASGNGGREGDYCSCDGYTNSIYTISVSSATENGYKPWYLEECASTLATTYSSGAFYERKIVTTDLRQRCTDGHTGTSVSAPMVAGIIALALEANSQLTWRDVQHLLVKTSRPAHLKASDWKVNGAGHKVSHFYGFGLVDAEALVVEAKKWTAVPSQHMCVAASDKRPRSIPLVQVLRTTALTSACAEHSDQRVVYLEHVVVRTSISHPRRGDLQIYLVSPSGTKSQLLAKRLLDLSNEGFTNWEFMTVHCWGEKAEGQWTLEIQDLPSQVRNPEKQGDLETPVANQLTTEERFVSTPSILFHWSVYLSWSQYHIVLITVAL

SEQ ID NO: 3572 - protein, 975 aa, Homo sapiens
MPPRAPPAPGPRPPPRAAAATDTAAGAGGAGGAGGAGGPGFRPLAPRPWRWLLLLALPAACSAPPPRPVYTNHWAVQVLGGPAEADRVAAAHGYLNLGQIGNLEDYYHFYHSKTFKRSTLSSRGPHTFLRMDPQVKWLQQQEVKRRVKRQVRSDPQALYFNDPIWSNMWYLHCGDKNSRCRSEMNVQAAWKRGYTGKNVVVTILDDGIERNHPDLAPNYDSYASYDVNGNDYDPSPRYDASNENKHGTRCAGEVAASANNSYCIVGIAYNAKIGGIRMLDGDVTDVVEAKSLGIRPNYIDIYSASWGPDDDGKTVDGPGRLAKQAFEYGIKKGRQGLGSIFVWASGNGGREGDYCSCDGYTNSIYTISVSSATENGYKPWYLEECASTLATTYSSGAFYERKIVTTDLRQRCTDGHTGTSVSAPMVAGIIALALEANSQLTWRDVQHLLVKTSRPAHLKASDWKVNGAGHKVSHFYGFGLVDAEALVVEAKKWTAVPSQHMCVAASDKRPRSIPLVQVLRTTALTSACAEHSDQRVVYLEHVVVRTSISHPRRGDLQIYLVSPSGTKSQLLAKRLLDLSNEGFTNWEFMTVHCWGEKAEGQWTLEIQDLPSQVRNPEKQGKLKEWSLILYGTAEHPYHTFSAHQSRSRMLELSAPELEPPKAALSPSQVEVPEDEEDYTAQSTPGSANILQTSVCHPECGDKGCDGPNADQCLNCVHFSLGSVKTSRKCVSVCPLGYFGDTAARRCRRCHKGCETCSSRAATQCLSCRRGFYHHQEMNTCVTLCPAGFYADESQKNCLKCHPSCKKCVDEPEKCTVCKEGFSLARGSCIPDCEPGTYFDSELIRCGECHHTCGTCVGPGREECIHCAKNFHFHDWKCVPACGEGFYPEEMPGLPHKVCRRYGPPGGERQATVSSKGVPGGQSLSASSPGAGEGMLHHPTVDRSPFTELLRGLRPFVHWMHICWVPAVGRHRAAAG

SEQ ID NO: 3573 - protein, 962 aa, Homo sapiens
MPPRAPPAPGPRPPPRAAAATDTAAGAGGAGGAGGAGGPGFRPLAPRPWRWLLLLALPAACSAPPPRPVYTNHWAVQVLGGPAEADRVAAAHGYLNLGQIGNLEDYYHFYHSKTFKRSTLSSRGPHTFLRMDPQVKWLQQQEVKRRVKRQVRSDPQALYFNDPIWSNMWYLHCGDKNSRCRSEMNVQAAWKRGYTGKNVVVTILDDGIERNHPDLAPNYDSYASYDVNGNDYDPSPRYDASNENKHGTRCAGEVAASANNSYCIVGIAYNAKIGGIRMLDGDVTDVVEAKSLGIRPNYIDIYSASWGPDDDGKTVDGPGRLAKQAFEYGIKKGRQGLGSIFVWASGNGGREGDYCSCDGYTNSIYTISVSSATENGYKPWYLEECASTLATTYSSGAFYERKIVTTDLRQRCTDGHTGTSVSAPMVAGIIALALEANSQLTWRDVQHLLVKTSRPAHLKASDWKVNGAGHKVSHFYGFGLVDAEALVVEAKKWTAVPSQHMCVAASDKRPRSIPLVQVLRTTALTSACAEHSDQRVVYLEHVVVRTSISHPRRGDLQIYLVSPSGTKSQLLAKRLLDLSNEGFTNWEFMTVHCWGEKAEGQWTLEIQDLPSQVRNPEKQGKLKEWSLILYGTAEHPYHTFSAHQSRSRMLELSAPELEPPKAALSPSQVEVPEDEEDYTGVCHPECGDKGCDGPNADQCLNCVHFSLGSVKTSRKCVSVCPLGYFGDTAARRCRRCHKGCETCSSRAATQCLSCRRGFYHHQEMNTCVTLCPAGFYADESQKNCLKCHPSCKKCVDEPEKCTVCKEGFSLARGSCIPDCEPGTYFDSELIRCGECHHTCGTCVGPGREECIHCAKNFHFHDWKCVPACGEGFYPEEMPGLPHKVCRRYGPPGGERQATVSSKGVPGGQSLSASSPGAGEGMLHHPTVDRSPFTELLRGLRPFVHWMHICWVPAVGRHRAAAG

SEQ ID NO: 3574 - protein, 389 aa, Homo sapiens
MIRNGRGAAGGAEQPGPGGRRAVRVWCDGCYDMVHYGHSNQLRQARAMGDYLIVGVHTDEEIAKHKGPPVFTQEERYKMVQAIKWVDEVVPAAPYVTTLETLDKYNCDFCVHGNDITLTVDGRDTYEEVKQAGRYRECKRTQGVSTTDLVGRMLLVTKAHHSSQEMSSEYREYADSFGKCPGGRNPWTGVSQFLQTSQKIIQFASGKEPQPGETVIYVAGAFDLFHIGHVDFLEKVHRLAERPYIIAGLHFDQEVNHYKGKNYPIMNLHERTLSVLACRYVSEVVIGAPYAVTAELLSHFKVDLVCHGKTEIIPDRDGSDPYQEPKRRGIFRQIDSGSNLTTDLIVQRIITNRLEYEARNQKKEAKELAFLEAARQQAAQPLGERDGDF

SEQ ID NO: 3575 - protein, 311 aa, Homo sapiens
MVQAIKWVDEVVPAAPYVTTLETLDKYNCDFCVHGNDITLTVDGRDTYEEVKQAGRYRECKRTQGVSTTDLVGRMLLVTKAHHSSQEMSSEYREYADSFGKCPGGRNPWTGVSQFLQTSQKIIQFASGKEPQPGETVIYVAGAFDLFHIGHVDFLEKVHRLAERPYIIAGLHFDQEVNHYKGKNYPIMNLHERTLSVLACRYVSEVVIGAPYAVTAELLSHFKVDLVCHGKTEIIPDRDGSDPYQEPKRRGIFRQIDSGSNLTTDLIVQRIITNRLEYEARNQKKEAKELAFLEAARQQAAQPLGERDGDF

SEQ ID NO: 3576 - protein, 407 aa, Homo sapiens
MIRNGRGAAGGAEQPGPGGRRAVRVWCDGCYDMVHYGHSNQLRQARAMGDYLIVGVHTDEEIAKHKGPPVFTQEERYKMVQAIKWVDEVVPAAPYVTTLETLDKYNCDFCVHGNDITLTVDGRDTYEEVKQAGRYRECKRTQGVSTTDLVGRMLLVTKAHHSSQEMSSEYREYADSFGKPPHPIPAGDILSSEGCSQCPGGRNPWTGVSQFLQTSQKIIQFASGKEPQPGETVIYVAGAFDLFHIGHVDFLEKVHRLAERPYIIAGLHFDQEVNHYKGKNYPIMNLHERTLSVLACRYVSEVVIGAPYAVTAELLSHFKVDLVCHGKTEIIPDRDGSDPYQEPKRRGIFRQIDSGSNLTTDLIVQRIITNRLEYEARNQKKEAKELAFLEAARQQAAQPLGERDGDF

SEQ ID NO: 3577 - protein, 357 aa, Homo sapiens
MVHYGHSNQLRQARAMGDYLIVGVHTDEEIAKHKGPPVFTQEERYKMVQAIKWVDEVVPAAPYVTTLETLDKYNCDFCVHGNDITLTVDGRDTYEEVKQAGRYRECKRTQGVSTTDLVGRMLLVTKAHHSSQEMSSEYREYADSFGKCPGGRNPWTGVSQFLQTSQKIIQFASGKEPQPGETVIYVAGAFDLFHIGHVDFLEKVHRLAERPYIIAGLHFDQEVNHYKGKNYPIMNLHERTLSVLACRYVSEVVIGAPYAVTAELLSHFKVDLVCHGKTEIIPDRDGSDPYQEPKRRGIFRQIDSGSNLTTDLIVQRIITNRLEYEARNQKKEAKELAFLEAARQQAAQPLGERDGDF

SEQ ID NO: 3578 - protein, 164 aa, Homo sapiens
MVNSVVFFDITVDGKPLGRISIKLFADKILKTAENFRALSTGEKGFRYKGSCFHRIIPGFMCQGGDFTRHNGTGDKSIYGEKFDDENLIRKHTGSGILSMANAGPNTNGSQFFICAAKTEWLDGKHVAFGKVKERVNIVEAMEHFGYRNSKTSKKITIADCGQF

SEQ ID NO: 3579 - protein, 551 aa, Homo sapiens
MEEAELVKGRLQAITDKRKIQEEISQKRLKIEEDKLKHQHLKKKALREKWLLDGISSGKEQEEMKKQNQQDQHQIQVLEQSILRLEKEIQDLEKAELQISTKEEAILKKLKSIERTTEDIIRSVKVEREERAEESIEDIYANIPDLPKSYIPSRLRKEINEEKEDDEQNRKALYAMEIKVEKDLKTGESTVLSSIPLPSDDFKGTGIKVYDDGQKSVYAVSSNHSAAYNGTDGLAPVEVEELLRQASERNSKSPTEYHEPVYANPFYRPTTPQRETVTPGPNFQERIKIKTNGLGIGVNESIHNMGNGLSEERGNNFNHISPIPPVPHPRSVIQQAEEKLHTPQKRLMTPWEESNVMQDKDAPSPKPRLSPRETIFGKSEHQNSSPTCQEDEEDVRYNIVHSLPPDINDTEPVTMIFMGYQQAEDSEEDKKFLTGYDGIIHAELVVIDDEEEEDEGEAEKPSYHPIAPHSQVYQPAKPTPLPRKRSEASPHENTNHKSPHKNSISLKEQEESLGSPVHHSPFDAQTTGDGTEDPSLTALRMRMAKLGKKVI

SEQ ID NO: 3580 - protein, 471 aa, Homo sapiens
MASRWNQQRKRTGRDEEAKSTKEEAILKKLKSIERTTEDIIRSVKVEREERAEESIEDIYANIPDLPKSYIPSRLRKEINEEKEDDEQNRKALYAMEIKVEKDLKTGESTVLSSIPLPSDDFKGTGIKVYDDGQKSVYAVSSNHSAAYNGTDGLAPVEVEELLRQASERNSKSPTEYHEPVYANPFYRPTTPQRETVTPGPNFQERIKIKTNGLGIGVNESIHNMGNGLSEERGNNFNHISPIPPVPHPRSVIQQAEEKLHTPQKRLMTPWEESNVMQDKDAPSPKPRLSPRETIFGKSEHQNSSPTCQEDEEDVRYNIVHSLPPDINDTEPVTMIFMGYQQAEDSEEDKKFLTGYDGIIHAELVVIDDEEEEDEGEAEKPSYHPIAPHSQVYQPAKPTPLPRKRSEASPHENTNHKSPHKNSISLKEQEESLGSPVHHSPFDAQTTGDGTEDPSLTALRMRMAKLGKKVI

SEQ ID NO: 3581 - protein, 376 aa, Homo sapiens
MEIKVEKDLKTGESTVLSSIPLPSDDFKGTGIKVYDDGQKSVYAVSSNHSAAYNGTDGLAPVEVEELLRQASERNSKSPTEYHEPVYANPFYRPTTPQRETVTPGPNFQERIKIKTNGLGIGVNESIHNMGNGLSEERGNNFNHISPIPPVPHPRSVIQQAEEKLHTPQKRLMTPWEESNVMQDKDAPSPKPRLSPRETIFGKSEHQNSSPTCQEDEEDVRYNIVHSLPPDINDTEPVTMIFMGYQQAEDSEEDKKFLTGYDGIIHAELVVIDDEEEEDEGEAEKPSYHPIAPHSQVYQPAKPTPLPRKRSEASPHENTNHKSPHKNSISLKEQEESLGSPVHHSPFDAQTTGDGTEDPSLTALRMRMAKLGKKVI

SEQ ID NO: 3582 - protein, 377 aa, Homo sapiens
MAATEDERLAGSGEGERLDFLRDRHVRFFQRCLQVLPERYSSLETSRLTIAFFALSGLDMLDSLDVVNKDDIIEWIYSLQVLPTEDRSNLNRCGFRGSSYLGIPFNPSKAPGTAHPYDSGHIAMTYTGLSCLVILGDDLSRVNKEACLAGLRALQLEDGSFCAVPEGSENDMRFVYCASCICYMLNNWSGMDMKKAITYIRRSMSYDNGLAQGAGLESHGGSTFCGIASLCLMGKLEEVFSEKELNRIKRWCIMRQQNGYHGRPNKPVDTCYSFWVGATLKLLKIFQYTNFEKNRNYILSTQDRLVGGFAKWPDSHPDALHAYFGICGLSLMEESGICKVHPALNVSTRTSERLLDLHQSWKTKDSKQCSENVHIST

SEQ ID NO: 3583 - protein, 300 aa, Homo sapiens
MAATEDERLAGSGEGERLDFLRDRHVRFFQRCLQVLPERYSSLETSRLTIAFFALSGLDMLDSLDVVNKDDIIEWIYSLQVLPTEDRSNLNRCGFRGSSYLGIPFNPSKAPGTAHPYDSGHIAMTYTGLSCLVILGDDLSRVNKEACLAGLRALQLEDGSFCAVPEGSENDMRFVYCASCICYMLNNWSGMDMKKAITYIRRSMLLKIFQYTNFEKNRNYILSTQDRLVGGFAKWPDSHPDALHAYFGICGLSLMEESGICKVHPALNVSTRTSERLLDLHQSWKTKDSKQCSENVHIST

SEQ ID NO: 3584 - protein, 771 aa, Homo sapiens
MGRAGTGTGGEAVAAVVAGPLLLLLLARPPPASAGYSGKSEVGLVSEHFSQAPQRLSFYSWYGSARLFRFRVPPDAVLLRWLLQVSRESGAACTDAEITVHFRSGAPPVINPLGTSFPDDTAVQPSFQVGVPLSTTPRSNASVNVSHPAPGDWFVAAHLPPSSQKIELKGLAPTCAYVFQPELLVTRVVEISIMEPDVPLPQTLLSHPSYLKVFVPDYTRELLLELRDCVSNGSLGCPVRLTVGPVTLPSNFQKVLTCTGAPWPCRLLLPSPPWDRWLQVTAESLVGPLGTVAFSAVAALTACRPRSVTIQPLLQSSQNQSFNASSGLLSPSPDHQDLGRSGRVDRSPFCLTNYPVTREDMDVVSVHFQPLDRVSVRVCSDTPSVMRLRLNTGMDSGGSLTISLRANKTEMRNETVVVACVNAASPFLGFNTSLNCTTAFFQGYPLSLSAWSRRANLIIPYPETDNWYLSLQLMCPENAEDCEQAVVHVETTLYLVPCLNDCGPYGQCLLLRRHSYLYASCSCKAGWRGWSCTDNSTAQTVAQQRAATLLLTLSNLMFLAPIAVSVRRFFLVEASVYAYTMFFSTFYHACDQPGEAVLCILSYDTLQYCDFLGSGAAIWVTILCMARLKTVLKYVLFLLGTLVIAMSLQLDRRGMWNMLGPCLFAFVIMASMWAYRCGHRRQCYPTSWQRWAFYLLPGVSMASVGIAIYTSMMTSDNYYYTHSIWHILLAGSAALLLPPPDQPAEPWACSQKFPCHYQICKNDREELYAVT

SEQ ID NO: 3585 - protein, 593 aa, Homo sapiens
MPRTLSLHEITDLLETDDSIEASAIVIQPPENATAPVSDEESGDEEGGTINNLPGSLLHTAAYLIQDGSDAESDSDDPSYAPKDDSPDEVPSTFTVQQPPPSRRRKMTKILCKWKKADLTVQPVAGRVTAPPNDFFTVMRTPTEILELFLDDEVIELIVKYSNLYACSKGVHLGLTSSEFKCFLGIIFLSGYVSVPRRRMFWEQRTDVHNVLVSAAMRRDRFETIFSNLHVADNANLDPVDKFSKLRPLISKLNERCMKFVPNETYFSFDEFMVPYFGRHGCKQFIRGKPIRFGYKFWCGATCLGYICWFQPYQGKNPNTKHEEYGVGASLVLQFSEALTEAHPGQYHFVFNNFFTSIALLDKLSSMGHQATGTVRKDHIDRVPLESDVALKKKERGTFDYRIDGKGNIVCRWNDNSVVTVASSGAGIHPLCLVSRYSQKLKKKIQVQQPNMIKVYNQFMGGVDRADENIDKYRASIRGKKWYSSPLLFCFELVLQNAWQLHKTYDEKPVDFLEFRRRVVCHYLETHGHPPEPGQKGRPQKRNIDSRYDGINHVIVKQGKQTRCAECHKNTTFRCEKCDVALHVKCSVEYHTE

SEQ ID NO: 3586 - protein, 922 aa, Homo sapiens
MFLHSVNLWNLAFYVFMVFLATLGLWDVFFGFEENKCSMSYMFEYPEYQKIELPKKLAKRYPAYELYLYGEGSYAEEHKILPLTGIPVLFLPGNAGSYKQVRSIGSIALRKAEDIDFKYHFDFFSVNFNEELVALYGGSLQKQTKFVHECIKTILKLYKGQEFAPKSVAIIGHSMGGLVARALLTLKNFKHDLINLLITQATPHVAPVMPLDRFITDFYTTVNNYWILNARHINLTTLSVAGGFRDYQVRSGLTFLPKLSHHTSALSVVSSAVPKTWVSTDHLSIVWCKQLQLTTVRAFFDLIDADTKQITQNSKKKLSVLYHHFIRHPSKHFEENPAIISDLTGTSMWVLVKVSKWTYVAYNESEKIYFTFPLENHRKIYTHVYCQSTMLDTNSWIFACINSTSMCLQGVDLSWKAELLPTIKYLTLRLQDYPSLSHLVVYVPSVRGSKFVVDCEFFKKEKRYIQLPVTHLFSFGLSSRKVVLNTNGLYYNLELLNFGQIYQAFKINVVSKCSAVKEEITSIYRLHIPWSYEDSLTIAQAPSSTEISLKLHIAQPENNTHVALFKMYTSSDCRYEVTVKTSFSQILGQVVRFHGGALPAYVVSNILLAYRGQLYSLFSTGCCLEYATMLDKEAKPYKVDPFVIIIKFLLGYKWFKELWDVLLLPELDAVILTCQSMCFPLISLILFLFGTCTAYWSGLLSSASVRLLSSLWLALKRPSELPKDIKMISPDLPFLTIVLIIVSWTTCGALAILLSYLYYVFKVVHLQASLTTFKNSQPVNPKHSRRSEKKSNHHKDSSIHHLRLSANDAEDSLRMHSTVINLLTWIVLLSMPSLIYWLKNLRYYFKLNPDPCKPLAFILIPTMAILGNTYTVSIKSSKLLKTTSQFPLPLAVGVIAFGSAHLYRLPCFVFIPLLLHALCNFM

SEQ ID NO: 3587 - protein, 748 aa, Homo sapiens
MGGLVARALLTLKNFKHDLINLLITQATPHVAPVMPLDRFITDFYTTVNNYWILNARHINLTTLSVAGGFRDYQVRSGLTFLPKLSHHTSALSVVSSAVPKTWVSTDHLSIVWCKQLQLTTVRAFFDLIDADTKQITQNSKKKLSVLYHHFIRHPSKHFEENPAIISDLTGTSMWVLVKVSKWTYVAYNESEKIYFTFPLENHRKIYTHVYCQSTMLDTNSWIFACINSTSMCLQGVDLSWKAELLPTIKYLTLRLQDYPSLSHLVVYVPSVRGSKFVVDCEFFKKEKRYIQLPVTHLFSFGLSSRKVVLNTNGLYYNLELLNFGQIYQAFKINVVSKCSAVKEEITSIYRLHIPWSYEDSLTIAQAPSSTEISLKLHIAQPENNTHVALFKMYTSSDCRYEVTVKTSFSQILGQVVRFHGGALPAYVVSNILLAYRGQLYSLFSTGCCLEYATMLDKEAKPYKVDPFVIIIKFLLGYKWFKELWDVLLLPELDAVILTCQSMCFPLISLILFLFGTCTAYWSGLLSSASVRLLSSLWLALKRPSELPKDIKMISPDLPFLTIVLIIVSWTTCGALAILLSYLYYVFKVVHLQASLTTFKNSQPVNPKHSRRSEKKSNHHKDSSIHHLRLSANDAEDSLRMHSTVINLLTWIVLLSMPSLIYWLKNLRYYFKLNPDPCKPLAFILIPTMAILGNTYTVSIKSSKLLKTTSQFPLPLAVGVIAFGSAHLYRLPCFVFIPLLLHALCNFM

SEQ ID NO: 3588 - protein, 592 aa, Homo sapiens
MFLHSVNLWNLAFYVFMVFLATLGLWDVFFGFEENKCSMSYMFEYPEYQKIELPKKLAKRYPAYELYLYGEGSYAEEHKILPLTGIPVLFLPGNAGSYKQVRSIGSIALRKAEDIDFKYHFDFFSVNFNEELVALYGGSLQKQTKFVHECIKTILKLYKGQEFAPKSVAIIGHSMGGLVARALLTLKNFKHDLINLLITQATPHVAPVMPLDRFITDFYTTVNNYWILNARHINLTTLSVAGGFRDYQVRSGLTFLPKLSHHTSALSVVSSAVPKTWVSTDHLSIVWCKQLQLTTVRAFFDLIDADTKQITQNSKKKLSVLYHHFIRHPSKHFEENPAIISDLTGTSMWVLVKVSKWTYVAYNESEKIYFTFPLENHRKIYTHVYCQSTMLDTNSWIFACINSTSMCLQGVDLSWKAELLPTIKYLTLRLQDYPSLSHLVVYVPSVRGSKFVVDCEFFKKEKRYIQLPVTHLFSFGLSSRKVVLNTNGLYYNLELLNFGQIYQAFKINVVSKCSAVKEEITSIYRLHIPWSYEDSLTIAQAPSSTEISLKLHIAQPENNTHVALFKMYTSSDCRYEVTVKTSFSQILGQVVA

SEQ ID NO: 3589 - protein, 431 aa, Homo sapiens
MFLHSVNLWNLAFYVFMVFLATLGLWDVFFGFEENKCSMSYMFEYPEYQSSAVPKTWVSTDHLSIVWCKQLQLTTVRAFFDLIDADTKQITQNSKKKLSVLYHHFIRHPSKHFEENPAIISDLTGTSMWVLVKVSKWTYVAYNESEKIYFTFPLENHRKIYTHVYCQSTMLDTNSWIFACINSTSMCLQGVDLSWKAELLPTIKYLTLRLQDYPSLSHLVVYVPSVRGSKFVVDCEFFKKEKRYIQLPVTHLFSFGLSSRKVVLNTNGLYYNLELLNFGQIYQAFKINVVSKCSAVKEEITSIYRLHIPWSYEDSLTIAQAPSSTEISLKLHIAQPENNTHVALFKMYTSSDCRYEVTVKTSFSQILGQVVRFHGGALPAYVVSNILLAYRGQLYSLFSTGCCLEYATMLDKEAKPYKVDPFVIIIKFLLG

SEQ ID NO: 3590 - protein, 388 aa, Homo sapiens
MKWMVVVLVCLQLLEAAVVKVPLKKFKSIRETMKEKGLLGEFLRTHKYDPAWKYRFGDLSVTYEPMAYMDAAYFGEISIGTPPQNFLVLFDTGSSNLWVPSVYCQSQACTSHSRFNPSESSTYSTNGQTFSLQYGSGSLTGFFGYDTLTVQSIQVPNQEFGLSENEPGTNFVYAQFDGIMGLAYPALSVDEATTAMQGMVQEGALTSPVFSVYLSNQQGSSGGAVVFGGVDSSLYTGQIYWAPVTQELYWQIGIEEFLIGGQASGWCSEGCQAIVDTGTSLLTVPQQYMSALLQATGAQEDEYGQFLVNCNSIQNLPSLTFIINGVEFPLPPSSYILSNNGYCTVGVEPTYLSSQNGQPLWILGDVFLRSYYSVYDLGNNRVGFATAA

SEQ ID NO: 3591 - protein, 315 aa, Homo sapiens
MKWMVVVLVCLQLLEAAVVKVPLKKFKSIRETMKEKGLLGEFLRTHKYDPAWKYRFGDLSVTYEPMAYMDAAYFGEISIGTPPQNFLVLFDTGSSNLWVPSVYCQSQACTSHSRFNPSESSTYSTNGQTFSLQYGSGSLTGFFGYDTLTVQSIQVPNQEFGLSENEPGTNFVYAQFDGIMGLAYPALSVDEATTAMQGMVQEGALTSPVFSVYLSNLVLESSGLGPLLTPSRAAPPSSTLQLPEKPLEQTWNILTPFTKTLPVSNLSRKVTSWAGVGIPVTCLPEAGSGGERRAECGLGVPTTRGPPRSQHHSGA

SEQ ID NO: 3592 - protein, 375 aa, Homo sapiens
MKVWLLLGLLLVHEALEDVTGQHLPKNKRPKEPGENRIKPTNKKVKPKIPKMKDRDSANSAPKTQSIMMQVLDKGRFQKPAATLSLLAGQTVELRCKGSRIGWSYPAYLDTFKDSRLSVKQNERYGQLTLVNSTSADTGEFSCWVQLCSGYICRKDEAKTGSTYIFFTEKGELFVPSPSYFDVVYLNPDRQAVVPCRVTVLSAKVTLHREFPAKEIPANGTDIVYDMKRGFVYLQPHSEHQGVVYCRAEAGGRSQISVKYQLLYVAVPSGPPSTTILASSNKVKSGDDISVLCTVLGEPDVEVEFTWIFPGQKDERPVTIQDTWRLIHRGLGHTTRISQSVITVEDFETIDAGYYICTAQNLQGQTTVATTVEFS

SEQ ID NO: 3593 - protein, 858 aa, Homo sapiens
MENELPVPHTSSSACATSSTSGASSSSGCNNSSSGGSGRPTGPQISVYSGIPDRQTVQVIQQALHRQPSTAAQYLQQMYAAQQQHLMLQTAALQQQHLSSAQLQSLAAVQQASLVSNRQGSTSGSNVSAQAPAQSSSINLAASPAAAQLLNRAQSVNSAAASGIAQQAVLLGNTSSPALTASQAQMYLRAQMLIFTPTATVATVQPELGTGSPARPPTPAQVQNLTLRTQQTPAAAASGPTPTQPVLPSLALKPTPGGSQPLPTPAQSRNTAQASPAGAKPGIADSVMEPHKKGDGNSSVPGSMEGRAGLSRTVPAVAAHPLIAPAYAQLQPHQLLPQPSSKHLQPQFVIQQQPQPQQQQPPPQQSRPVLQAEPHPQLASVSPSVALQPSSEAHAMPLGPVTPALPLQCPTANLHKPGGSQQCHPPTPDTGPQNGHPEGVPHTPQRRFQHTSAVILQLQPASPPQQCVPDDWKEVAPGEKSVPETRSGPSPHQQAIVTAMPGGLPVPTSPNIQPSPAHETGQGIVHALTDLSSPGMTSGNGNSASSIAGTAPQNGENKPPQAIVKPQILTHVIEGFVIQEGAEPFPVGRSSLLVGNLKKKYAQGFLPEKLPQQDHTTTTDSEMEEPYLQESKEEGAPLKLKCELCGRVDFAYKFKRSKRFCSMACAKRYNVGCTKRVGLFHSDRSKLQKAGAATHNRRRASKASLPPLTKDTKKQPTGTVPLSVTAALQLTHSQEDSSRCSDNSSYEEPLSPISASSSTSRRRQGQRDLELPDMHMRDLVGMGHHFLPSEPTKWNVEDVYEFIRSLPGCQEIAEEFRAQEIDGQALLLLKEDHLMSAMNIKLGPALKIYARISMLKDS

SEQ ID NO: 3594 - protein, 323 aa, Homo sapiens
MTSGNGNSASSIAGTAPQNGENKPPQAIVKPQILTHVIEGFVIQEGAEPFPVGRSSLLVGNLKKKYAQGFLPEKLPQQDHTTTTDSEMEEPYLQESKEEGAPLKLKCELCGRVDFAYKFKRSKRFCSMACAKRYNVGCTKRVGLFHSDRSKLQKAGAATHNRRRASKASLPPLTKDTKKQPTGTVPLSVTAALQLTHSQEDSSRCSDNSSYEEPLSPISASSSTSRRRQGQRDLELPDMHMRDLVGMGHHFLPSEPTKWNVEDVYEFIRSLPGCQEIAEEFRAQEIDGQALLLLKEDHLMSAMNIKLGPALKIYARISMLKDS

SEQ ID NO: 3595 - protein, 267 aa, Homo sapiens
MVGRSSLLVGNLKKKYAQGFLPEKLPQQDHTTTTDSEMEEPYLQESKEEGAPLKLKCELCGRVDFAYKFKRSKRFCSMACAKRYNVGCTKRVGLFHSDRSKLQKAGAATHNRRRASKASLPPLTKDTKKQPTGTVPLSVTAALQLTHSQEDSSRCSDNSSYEEPLSPISASSSTSRRRQGQRDLELPDMHMRDLVGMGHHFLPSEPTKWNVEDVYEFIRSLPGLPSSFPKGHETSIYSLSKHLRHSRFPQSPSGSCLWPVLRPRPHL

SEQ ID NO: 3596 - protein, 829 aa, Homo sapiens
MENELPVPHTSSSACATSSTSGASSSSGCNNSSSGGSGRPTGPQISVYSGIPDRQTVQVIQQALHRQPSTAAQYLQQMYAAQQQHLMLQTAALQQQHLSSAQLQSLAAVQQASLVSNRQGSTSGSNVSAQAPAQSSSINLAASPAAAQLLNRAQSVNSAAASGIAQQAVLLGNTSSPALTASQAQMYLRAQMVQNLTLRTQQTPAAAASGPTPTQPVLPSLALKPTPGGSQPLPTPAQSRNTAQASPAGAKPGIADSVMEPHKKGDGNSSVPGSMEGRAGLSRTVPAVAAHPLIAPAYAQLQPHQLLPQPSSKHLQPQFVIQQQPQPQQQQPPPQQSRPVLQAEPHPQLASVSPSVALQPSSEAHAMPLGPVTPALPLQCPTANLHKPGGSQQCHPPTPDTGPQNGHPEGVPHTPQRRFQHTSAVILQLQPASPPQQCVPDDWKEVAPGEKSVPETRSGPSPHQQAIVTAMPGGLPVPTSPNIQPSPAHETGQGIVHALTDLSSPGMTSGNGNSASSIAGTAPQNGENKPPQAIVKPQILTHVIEGFVIQEGAEPFPVGRSSLLVGNLKKKYAQGFLPEKLPQQDHTTTTDSEMEEPYLQESKEEGAPLKLKCELCGRVDFAYKFKRSKRFCSMACAKRYNVGCTKRVGLFHSDRSKLQKAGAATHNRRRASKASLPPLTKDTKKQPTGTVPLSVTAALQLTHSQEDSSRCSDNSSYEEPLSPISASSSTSRRRQGQRDLELPDMHMRDLVGMGHHFLPSEPTKWNVEDVYEFIRSLPGCQEIAEEFRAQEIDGQALLLLKEDHLMSAMNIKLGPALKIYARISMLKDS

SEQ ID NO: 3597 - protein, 859 aa, Homo sapiens
MENELPVPHTSSSACATSSTSGASSSSGCNNSSSGGSGRPTGPQISVYSGIPDRQTVQVIQQALHRQPSTAAQYLQQMYAAQQQHLMLQTAALQQQHLSSAQLQSLAAVQQASLVSNRQGSTSGSNVSAQAPAQSSSINLAASPAAAQLLNRAQSVNSAAASGIAQQAVLLGNTSSPALTASQAQMYLRAQMLIFTPTATVATVQPELGTGSPARPPTPAQVQNLTLRTQQTPAAAASGPTPTQPVLPSLALKPTPGGSQPLPTPAQSRNTAQASPAGAKPGIADSVMEPHKKGDGNSSVPGSMEGRAGLSRTVPAVAAHPLIAPAYAQLQPHQLLPQPSSKHLQPQFVIQQQPQPQQQQPPPQQSRPVLQAEPHPQLASVSPSVALQPSSEAHAMPLGPVTPALPLQCPTANLHKPGGSQQCHPPTPDTGPQNGHPEGVPHTPQRRFQHTSAVILQLQPASPVPQQCVPDDWKEVAPGEKSVPETRSGPSPHQQAIVTAMPGGLPVPTSPNIQPSPAHETGQGIVHALTDLSSPGMTSGNGNSASSIAGTAPQNGENKPPQAIVKPQILTHVIEGFVIQEGAEPFPVGRSSLLVGNLKKKYAQGFLPEKLPQQDHTTTTDSEMEEPYLQESKEEGAPLKLKCELCGRVDFAYKFKRSKRFCSMACAKRYNVGCTKRVGLFHSDRSKLQKAGAATHNRRRASKASLPPLTKDTKKQPTGTVPLSVTAALQLTHSQEDSSRCSDNSSYEEPLSPISASSSTSRRRQGQRDLELPDMHMRDLVGMGHHFLPSEPTKWNVEDVYEFIRSLPGCQEIAEEFRAQEIDGQALLLLKEDHLMSAMNIKLGPALKIYARISMLKDS

SEQ ID NO: 3598 - protein, 784 aa, Homo sapiens
MDADDSRAPKGSLRKFLEHLSGAGKAIGVLTSGGDAQGMNAAVRAVVRMGIYVGAKVYFIYEGYQGMVDGGSNIAEADWESVSSILQVGGTIIGSARCQAFRTREGRLKAACNLLQRGITNLCVIGGDGSLTGANLFRKEWSGLLEELARNGQIDKEAVQKYAYLNVVGMVGSIDNDFCGTDMTIGTDSALHRIIEVVDAIMTTAQSHQRTFVLEVMGRHCGYLALVSALACGADWVFLPESPPEEGWEEQMCVKLSENRARKKRLNIIIVAEGAIDTQNKPITSEKIKELVVTQLGYDTRVTILGHVQRGGTPSAFDRILASRMGVEAVIALLEATPDTPACVVSLNGNHAVRLPLMECVQMTQDVQKAMDERRFQDAVRLRGRSFAGNLNTYKRLAIKLPDDQIPKTNCNVAVINVGAPAAGMNAAVRSAVRVGIADGHRMLAIYDGFDGFAKGQIKEIGWTDVGGWTGQGGSILGTKRVLPGKYLEEIATQMRTHSINALLIIGGFEAYLGLLELSAAREKHEEFCVPMVMVPATVSNNVPGSDFSIGADTALNTITDTCDRIKQSASGTKRRVFIIETMGGYCGYLANMGGLAAGADAAYIFEEPFDIRDLQSNVEHLTEKMKTTIQRGLVLRNESCSENYTTDFIYQLYSEEGKGVFDCRKNVLGHMQQGGAPSPFDRNFGTKISARAMEWITAKLKEARGRGKKFTTDDSICVLGISKRNVIFQPVAELKKQTDFEHRIPKEQWWLKLRPLMKILAKYKASYDVSDSGQLEHVQPWSV

SEQ ID NO: 3599 - protein, 776 aa, Homo sapiens
MCGYERCRPCRGAHGYLRGGQGVLHLRGLPGHGGRRLKHRRGRLGECLQHPASGAVRGDWREKPGCWSHRFPCPGRHALVGGTIIGSARCQAFRTREGRLKAACNLLQRGITNLCVIGGDGSLTGANLFRKEWSGLLEELARNGQIDKEAVQKYAYLNVVGMVGSIDNDFCGTDMTIGTDSALHRIIEVVDAIMTTAQSHQRTFVLEVMGRHCGYLALVSALACGADWVFLPESPPEEGWEEQMCVKLSENRARKKRLNIIIVAEGAIDTQNKPITSEKIKELVVTQLGYDTRVTILGHVQRGGTPSAFDRILASRMGVEAVIALLEATPDTPACVVSLNGNHAVRLPLMECVQMTQDVQKAMDERRFQDAVRLRGRSFAGNLNTYKRLAIKLPDDQIPKTNCNVAVINVGAPAAGMNAAVRSAVRVGIADGHRMLAIYDGFDGFAKGQIKEIGWTDVGGWTGQGGSILGTKRVLPGKYLEEIATQMRTHSINALLIIGGFEAYLGLLELSAAREKHEEFCVPMVMVPATVSNNVPGSDFSIGADTALNTITDTCDRIKQSASGTKRRVFIIETMGGYCGYLANMGGLAAGADAAYIFEEPFDIRDLQSNVEHLTEKMKTTIQRGLVLRNESCSENYTTDFIYQLYSEEGKGVFDCRKNVLGHMQQGGAPSPFDRNFGTKISARAMEWITAKLKEARGRGKKFTTDDSICVLGISKRNVIFQPVAELKKQTDFEHRIPKEQWWLKLRPLMKILAKYKASYDVSDSGQLEHVQPWSV

SEQ ID NO: 3600 - protein, 556 aa, Homo sapiens
MFYTHVLMSKRGPLAKIWLAAHWEKKLTKAHVFECNLEITIEKILSPKVKIALRTSGHLLLGVVRIYNRKAKYLLADCSEAFLKMKMTFCPGLVDLPKENFEASYNAITLPEEFHDFDTQNMNAIDVSEHFTQNQSRPEEITLRENFDNDLIFQAESFGEESEILRRHSFFDDNILLNSSGPLIEHSSGSLTGERSLFYDSGDGFGDEGAAGEMIDNLLQDDQNILLEDMHLNREISLPSEPPNSLAVEPDNSECICVPENEKMNETILLSTEEEGFTLDPIDISDIAEKRKGKKRRLLIDPIKELSSKVIHKQLTSFADTLMVLELAPPTQRLMMWKKRGGVHTLLSTAAQDLIHAELKMLFTKCFLSSGFKLGRKMIQKESVREEVGNQNIVETSMMQEPNYQQELSKPQTWKDVIGGSQHSSHEDTNKNINSEQDIVEMVSLAAEESSLMNDLFAQEIEYSPVELESLSNEENIETERWNGRILQMLNRLRESNKMGMQSFSLMKLCRNSDRKQAAAKFYSFLVLKKQLAIELSQSAPYADIIATMGPMFYNI

SEQ ID NO: 3601 - protein, 521 aa, Homo sapiens
MFYTHVLMSKRGPLAKIWLAAHWEKKLTKAHVFECNLEITIEKILSPKVKIALRTSGHLLLGVVRIYNRKAKYLLADCSEAFLKMKMTFCPGLVDLPKENFEASYNAITLPEEFHDFDTQNMNAIDVSEHFTQNQSRPEEITLRENFDNDLIFQAESFGEESEILRRHSFFDDNILLNSSGPLIEHSSGSLTGERSLFYDSGDGFGDEGAAGEMIDNLLQDDQNILLEDMHLNREISLPSEPPNSLAVEPDNSECICVPENEKMNETILLSTEEEGFTLDPIDISDIAEKRKGKKRRLLIDPIKELSSKVIHKQLTSFADTLMVLELAPPTQRLMMWKKRGGVHTLLSTAAQDLIHAELKMLFTKCFLSSGFKLGRKMIQKESVREEVGNQNIVETSMMQEPNYQQELSKPQTWKDVIGGSQHSSHEDTNKNINSEESLSNEENIETERWNGRILQMLNRLRVADQGQAAAAATAEALRQAGPEWCEPAGLRRASGLSPRDTAHPTPYSDPQPHGHVPARK

SEQ ID NO: 3602 - protein, 114 aa, Homo sapiens
MSALSLLILGLLTAVPPASCQQGLGNLQPWMQGLIAVAVFLVLVAIAFAVNHFWCQEEPEPAHMILTVGNKADGVLVGTDGRYSSMAASFRSSEHENAYENVPEEEGKVRSTPM

SEQ ID NO: 3603 - protein, 411 aa, Homo sapiens
MKAARFVLRSAGSLNGAGLVPREVEHFSRYSPSPLSMKQLLDFGSENACERTSFAFLRQELPVRLANILKEIDILPTQLVNTSSVQLVKSWYIQSLMDLVEFHEKSPDDQKALSDFVDTLIKVRNRHHNVVPTMAQGIIEYKDACTVDPVTNQNLQYFLDRFYMNRISTRMLMNQHILIFSDSQTGNPSHIGSIDPNCDVVAVVQDAFECSRMLCDQYYLSSPELKLTQVNGKFPDQPIHIVYVPSHLHHMLFELFKNAMRATVEHQENQPSLTPIEVIVVLGKEDLTIKISDRGGGVPLRIIDRLFSYTYSTAPTPVMDNSRNAPLAGFGYGLPISRLYAKYFQGDLNLYSLSGYGTDAIIYLKALSSESIEKLPVFNKSAFKHYQMSSEADDWCIPSREPKNLAKEVAM

SEQ ID NO: 3604 - protein, 1337 aa, Homo sapiens
MDFTAQPKPATALCGVVSADGKIAYPPGVKEITDKITTDEMIKRLKMVVKTFMDMDQDSEDEKQQYLPLALHLASEFFLRNPNKDVRLLVACCLADIFRIYAPEAPYTSHDKLKDIFLFITRQLKGLEDTKSPQFNRYFYLLENLAWVKSYNICFELEDCNEIFIQLFRTLFSVINNSHNKKVQMHMLDLMSSIIMEGDGVTQELLDSILINLIPAHKNLNKQSFDLAKVLLKRTVQTIEACIANFFNQVLVLGRSSVSDLSEHVFDLIQELFAIDPHLLLSVMPQLEFKLKSNDGEERLAVVRLLAKLFGSKDSDLATQNRPLWQCFLGRFNDIHVPVRLESVKFASHCLMNHPDLAKDLTEYLKVRSHDPEEAIRHDVIVTIITAAKRDLALVNDQLLGFVRERTLDKRWRVRKEAMMGLAQLYKKYCLHGEAGKEAAEKVSWIKDKLLHIYYQNSIDDKLLVEKIFAQYLVPHNLETEERMKCLYYLYASLDPNAVKALNEMWKCQNMLRSHVRELLDLHKQPTSEANCSAMFGKLMTIAKNLPDPGKAQDFVKKFNQVLGDDEKLRSQLELLISPTCSCKQADICVREIARKLANPKQPTNPFLEMVKFLLERIAPVHIDSEAISALVKLMNKSIEGTADDEEEGVSPDTAIRSGLELLKVLSFTHPTSFHSAETYESLLQCLRMEDDKVAEAAIQIFRNTGHKIETDLPQIRSTLIPILHQKAKRGTPHQAKQAVHCIHAIFTNKEVQLAQIFEPLSRSLNADVPEQLITPLVSLGHISMLAPDQFASPMKSVVANFIVKDLLMNDRSTGEKNGKLWSPDEEVSPEVLAKVQAIKLLVRWLLGMKNNQSKSANSTLRLLSAMLVSEGDLTEQKRISKSDMSRLRLAAGSAIMKLAQEPCYHEIITPEQFQLCALVINDECYQVRQIFAQKLHKALVKLLLPLEYMAIFALCAKDPVKERRAHARQCLLKNISIRREYIKQNPMATEKLLSLLPEYVVPYMIHLLAHDPDFTRSQDVDQLRDIKECLWFMLEVLMTKNENNSHAFMKKMAENIKLTRDAQSPDESKTNEKLYTVCDVALCVINSKSALCNADSPKDPVLPMKFFTQPEKDFCNDKSYISEETRVLLLTGKPKPAGVLGAVNKPLSATGRKPYVRSTGTETGSNINVNSELNPSTGNRSREQSSEAAETGVSENEENPVRIISVTPVKNIDPVKNKEINSDQATQGNISSDRGKKRTVTAAGAENIQQKTDEKVDESGPPAPSKPRRGRRPKSESQGNATKNDDLNKPINKGRKRAAVGQESPGGLEAGNAKAPKLQDLAKKAAPAERQIDLQR

SEQ ID NO: 3605 - protein, 600 aa, Homo sapiens
MDFTAQPKPATALCGVVSADGKIAYPPGVKEITDKITTDEMIKRLKMVVKTFMDMDQDSEDEKQQYLPLALHLASEFFLRNPNKDVRLLVACCLADIFRIYAPEAPYTSHDKLKDIFLFITRQLKGLEDTKSPQFNRYFYLLENLAWVKSYNICFELEDCNEIFIQLFRTLFSVINNSHNKKVQMHMLDLMSSIIMEGDGVTQELLDSILINLIPAHKNLNKQSFDLAKVLLKRTVQTIEACIANFFNQVLVLGRSSVSDLSEHVFDLIQELFAIDPHLLLSVMPQLEFKLKSNDGEERLAVVRLLAKLFGSKDSDLATQNRPLWQCFLGRFNDIHVPVRLESVKFASHCLMNHPDLAKDLTEYLKVRSHDPEEAIRHDVIVTIITAAKRDLALVNDQLLGFVRERTLDKRWRVRKEAMMGLAQLYKKYCLHGEAGKEAAEKVSWIKDKLLHIYYQNSIDDKLLVEKIFAQYLVPHNLETEERMKCLYYLYASLDPNAVKALNEMWKCQNMLRSHVRELLDLHKQPTSEANCSAMFGKLMTIAKNLPDPGKAQDFVKKFNQVLGDDEKLRSQLELLISPTCSCKQADICVVSKSYFTLFL

SEQ ID NO: 3606 - protein, 358 aa, Homo sapiens
MGNASNDSQSEDCETRQWLPPGESPAISSVMFSAGVLGNLIALALLARRWRGDVGCSAGRRSSLSLFHVLVTELVFTDLLGTCLISPVVLASYARNQTLVALAPESRACTYFAFAMTFFSLATMLMLFAMALERYLSIGHPYFYQRRVSRSGGLAVLPVIYAVSLLFCSLPLLDYGQYVQYCPGTWCFIRHGRTAYLQLYATLLLLLIVSVLACNFSVILNLIRMHRRSRRSRCGPSLGSGRGGPGARRRGERVSMAEETDHLILLAIMTITFAVCSLPFTIFAYMNETSSRKEKWDLQALRFLSINSIIDPWVFAILRPPVLRLMRSVLCCRISLRTQDATQTSCSTQSDASKQADL

SEQ ID NO: 3607 - protein, 162 aa, Homo sapiens
MALARPRPRLGDLIEISRFGYAHWAIYVGDGYVVHLAPASEIAGAGAASVLSALTNKAIVKKELLSVVAGGDNYRVNNKHDDRYTPLPSNKIVKRAEELVGQELPYSLTSDNCEHFVNHLRYGVSRSDQVTGAVTTVGVAAGLLAAASLVGILLARSKRERQ

SEQ ID NO: 3608 - protein, 164 aa, Homo sapiens
MASPHQEPKPGDLIEIFRLGYEHWALYIGDGYVIHLAPPSEYPGAGSSSVFSVLSNSAEVKRERLEDVVGGCCYRVNNSLDHEYQPRPVEVIISSAKEMVGQKMKYSIVSRNCEHFVTQLRYGKSRCKQVEKAKVEVGVATALGILVVAGCSFAIRRYQKKATA

SEQ ID NO: 3609 - protein, 156 aa, Homo sapiens
MASPHQEPKPGDLIEIFRLGYEHWALYIGDGYVIHLAPPSEYPGAGSSSVFSVLSNSAEVKRERLEDVVGGCCYRVNNSLDHEYQPRPVEVIISSAKEMVGQKMKYSIVSRNCEHFVTQLRYGKSRCKQVRTSLDNPSPSAWGWTHGAVQPGDHCE

SEQ ID NO: 3610 - protein, 289 aa, Homo sapiens
MENGYTYEDYKNTAEWLLSHTKHRPQVAIICGSGLGGLTDKLTQAQIFDYGEIPNFPRSTVPGHAGRLVFGFLNGRACVMMQGRFHMYEGYPLWKVTFPVRVFHLLGVDTLVVTNAAGGLNPKFEVGDIMLIRDHINLPGFSGQNPLRGPNDERFGDRFPAMSDAYDRTMRQRALSTWKQMGEQRELQEGTYVMVAGPSFETVAECRVLQKLGADAVGMSTVPEVIVARHCGLRVFGFSLITNKVIMDYESLEKANHEEVLAAGKQAAQKLEQFVSILMASIPLPDKAS

SEQ ID NO: 3611 - protein, 131 aa, Homo sapiens
MPPKGKSGSGKAGKGGAASGSDSADKKAQGPKGGGNAVKVRHILCEKHGKIMEAMEKLKSGMRFNEVAAQYSEDKARQGGDLGWMTRGSMVGPFQEAAFALPVSGMDKPVFTDPPVKTKFGYHIIMVEGRK

SEQ ID NO: 3612 - protein, 156 aa, Homo sapiens
MPMAGLLKGLVRQLERFSVQQQASKMPPKGKSGSGKAGKGGAASGSDSADKKAQGPKGGGNAVKVRHILCEKHGKIMEAMEKLKSGMRFNEVAAQYSEDKARQGGDLGWMTRGSMVGPFQEAAFALPVSGMDKPVFTDPPVKTKFGYHIIMVEGRK

SEQ ID NO: 3613 - protein, 133 aa, Homo sapiens
MPMAGLLKGLVRQLERFSVQQQASKMPPKGKSGSGKAGKGGAASGSDSADKKAQGPKGGGNAVKVRHILCEKHGKIMEAMEKLKSGMRFNEVAAQYSEDKARQGIPSLQQHAGHHRDLRSTLISLVSYLQTTP

SEQ ID NO: 3614 - protein, 544 aa, Homo sapiens
MVAEVCSMPAASAVKKPFDLRSKMGKWCHHRFPCCRGSGTSNVGTSGDHDDSFMKTLRSKMGKWCCHCFPCCRGSGKSNVGTWGDYDDSAFMEPRYHVRREDLDKLHRAAWWGKVPRKDLIVMLRDTDMNKRDKQKRTALHLASANGNSEVVQLLLDRRCQLNVLDNKKRTALIKAVQCQEDECVLMLLEHGADGNIQDEYGNTALHYAIYNEDKLMAKALLLYGADIESKNKCGLTPLLLGVHEQKQEVVKFLIKKKANLNALDRYGRTALILAVCCGSASIVNLLLEQNVDVSSQDLSGQTAREYAVSSHHHVICELLSDYKEKQMLKISSENSNPEQDLKLTSEEESQRLKVSENSQPEKMSQEPEINKDCDREVEEEIKKHGSNPVGLPENLTNGASAGNGDDGLIPQRKSRKPENQQFPDTENEEYHSDEQNDTQKQLSEEQNTGISQDEILTNKQKQIEVAEKEMNSELSLSHKKEEDLLRENSMLREEIAKLRLELDETKHQNQLRENKILEEIESVKEKLLKTIQLNEEALTKTSI

SEQ ID NO: 3615 - protein, 100 aa, Homo sapiens
MADEEKLPPGWEKRMSRPSGRGYYFNHITNPSQWERPSGNSSSGGKIWQGEPARVRRSHLLVKPVKAALDLAAGNHPDQGGGPGADQRLHPEDQGRREGL

SEQ ID NO: 3616 - protein, 321 aa, Homo sapiens
MASSQGKNELKLADWMATLPESMHSIPLTNLAIPGSHDSFSFYIDEASPVGPEQPETVQNFVSVFGTVAKKLMRKWLATQTMNFTGQLGAGIRYFDLRISTKPRDPDNELYFAHGLFSAKVNEGLEEINAFLTDHHKEVVFLDFNHFYGMQKYHHEKLVQMLKDIYGNKMCPAIFAQEVSLKYLWEKDYQVLVFYHSPVALEVPFLWPGQMMPAPWANTTDPEKLIQFLQASITERRKKGSFFISQVVLTPKASTVVKGVASGLRETITERALPAMMQWVRTQKPGESGINIVTADFVELGDFISTVIKLNYVFDEGEANT

SEQ ID NO: 3617 - protein, 630 aa, Homo sapiens
MDEMATTQISKDELDELKEAFAKVDLNSNGFICDYELHELFKEANMPLPGYKVREIIQKLMLDGDRNKDGKISFDEFVYIFQEVKSSDIAKTFRKAINRKEGICALGGTSELSSEGTQHSYSEEEKYAFVNWINKALENDPDCRHVIPMNPNTDDLFKAVGDGIVLCKMINLSVPDTIDERAINKKKLTPFIIQENLNLALNSASAIGCHVVNIGAEDLRAGKPHLVLGLLWQIIKIGLFADIELSRNEALAALLRDGETLEELMKLSPEELLLRWANFHLENSGWQKINNFSADIKDSKAYFHLLNQIAPKGQKEGEPRIDINMSGFNETDDLKRAESMLQQADKLGCRQFVTPADVVSGNPKLNLAFVANLFNKYPALTKPENQDIDWTLLEGETREERTFRNWMNSLGVNPHVNHLYADLQDALVILQLYERIKVPVDWSKVNKPPYPKLGANMKKLENCNYAVELGKHPAKFSLVGIGGQDLNDGNQTLTLALVWQLMRRYTLNVLEDLGDGQKANDDIIVNWVNRTLSEAGKSTSIQSFKDKTISSSLAVVDLIDAIQPGCINYDLVKSGNLTEDDKHNNAKYAVSMARRIGARVYALPEDLVEVKPKMVMTVFACLMGRGMKRV

SEQ ID NO: 3618 - protein, 617 aa, Homo sapiens
MEDLNSNGFICDYELHELFKEANMPLPGYKVREIIQKLMLDGDRNKDGKISFDEFVYIFQEVKSSDIAKTFRKAINRKEGICALGGTSELSSEGTQHSYSEEEKYAFVNWINKALENDPDCRHVIPMNPNTDDLFKAVGDGIVLCKMINLSVPDTIDERAINKKKLTPFIIQENLNLALNSASAIGCHVVNIGAEDLRAGKPHLVLGLLWQIIKIGLFADIELSRNEALAALLRDGETLEELMKLSPEELLLRWANFHLENSGWQKINNFSADIKLIDFSNSVKDSKAYFHLLNQIAPKGQKEGEPRIDINMSGFNETDDLKRAESMLQQADKLGCRQFVTPADVVSGNPKLNLAFVANLFNKYPALTKPENQDIDWTLLEGETREERTFRNWMNSLGVNPHVNHLYADLQDALVILQLYERIKVPVDWSKVNKPPYPKLGANMKKLENCNYAVELGKHPAKFSLVGIGGQDLNDGNQTLTLALVWQLMRRYTLNVLEDLGDGQKANDDIIVNWVNRTLSEAGKSTSIQSFKDKTISSSLAVVDLIDAIQPGCINYDLVKSGNLTEDDKHNNAKYAVSMARRIGARVYALPEDLVEVKPKMVMTVFACLMGRGMKRV

SEQ ID NO: 3619 - protein, 585 aa, Homo sapiens
MPLPGYKVREIIQKLMLDGDRNKDGKISFDEFVYIFQEVKSSDIAKTFRKAINRKEGICALGGTSELSSEGTQHSYSEEEKYAFVNWINKALENDPDCRHVIPMNPNTDDLFKAVGDGIVLCKMINLSVPDTIDERAINKKKLTPFIIQENLNLALNSASAIGCHVVNIGAEDLRAGKPHLVLGLLWQIIKIGLFADIELSRNEALAALLRDGETLEELMKLSPEELLLRWANFHLENSGWQKINNFSADIKDSKAYFHLLNQIAPKGQKEGEPRIDINMSGFNETDDLKRAESMLQQADKLGCRQFVTPADVVSGNPKLNLAFVANLFNKYPALTKPENQDIDWTLLEGETREERTFRNWMNSLGVNPHVNHLYADLQDALVILQLYERIKVPVDWSKVNKPPYPKLGANMKKLENCNYAVELGKHPAKFSLVGIGGQDLNDGNQTLTLALVWQLMRRYTLNVLEDLGDGQKANDDIIVNWVNRTLSEAGKSTSIQSFKDKTISSSLAVVDLIDAIQPGCINYDLVKSGNLTEDDKHNNAKYAVSMARRIGARVYALPEDLVEVKPKMVMTVFACLMGRGMKRV

SEQ ID NO: 3620 - protein, 271 aa, Homo sapiens
MPASQSRARARDRNNVLNRAEFLSLNQPPKGGPEPRSSGRKASGPSAQPPPAGDGARERRQSQQLPEEDCMQLNPSFKGIAFNSLLAIDICMSKRLGVCAGRAASWASARSMVKLIGITGHGIPWIGGTILCLVKSSTLAGQEVLMNLLLALLLDIMTVAGVQKLIKRRGPYETSPSLLDYLTMDIYAFPAGHASRAAMVSKFFLSHLVLAVPLRVLLVLWALCVGLSRVMIGRHHVTDVLSGFVIGYLQFRLVELVWMPSSTCQMLISAW

SEQ ID NO: 3621 - protein, 940 aa, Homo sapiens
MGSGPIDPKELLKGLDSFLNRDGEVKSVDGISKIFSLMKEARKMVSRCTYLNILLQTRSPEILVKFIDVGGYKLLNNWLTYSKTTNNIPLLQQILLTLQHLPLTVDHLKQNNTAKLVKQLSKSSEDEELRKLASVLVSDWMAVIRSQSSTQPAEKDKKKRKDEGKSRTTLPERPLTEVKAETRAEEAPEKKREKPKSLRTTAPSHAKFRSTGLELETPSLVPVKKNASTVVVSDKYNLKPIPLKRQSNVAAPGDATPPAEKKYKPLNTTPNATKEIKVKIIPPQPMEGLGFLDALNSAPVPGIKIKKKKKVLSPTAAKPSPFEGKTSTEPSTAKPSSPEPAPPSEAMDADRPGTPVPPVEVPELMDTASLEPGALDAKPVESPGDPNQLTRKGRKRKSVTWPEEGKLREYFYFELDETERVNVNKIKDFGEAAKREILSDRHAFETARRLSHDNMEEKVPWVCPRPLVLPSPLVTPGSNSQERYIQAEREKGILQELFLNKESPHEPDPEPYEPIPPKLIPLDEECSMDETPYVETLEPGGSGGSPDGAGGSKLPPVLANLMGSMGAGKGPQGPGGGGINVQEILTSIMGSPNSHPSEELLKQPDYSDKIKQMLVPHGLLGPGPIANGFPPGGPGGPKGMQHFPPGPGGPMPGPHGGPGGPVGPRLLGPPPPPRGGDPFWDGPGDPMRGGPMRGGPGPGPGPYHRGRGGRGGNEPPPPPPPFRGARGGRSGGGPPNGRGGPGGGMVGGGGHRPHEGPGGGMGNSSGHRPHEGPGGGMGSGHRPHEGPGGSMGGGGGHRPHEGPGGGISGGSGHRPHEGPGGGMGAGGGHRPHEGPGGSMGGSGGHRPHEGPGHGGPHGHRPHDVPGHRGHDHRGPPPHEHRGHDGPGHGGGGHRGHDGGHSHGGDMSNRPVCRHFMMKGNCRYENNCAFYHPGVNGPPLP

SEQ ID NO: 3622 - protein, 360 aa, Homo sapiens
MNYTESSPLRESTAIGFTPELESIIPVPSNKTTCENWREIHHLVFHVANICFAVGLVIPTTLHLHMIFLRGMLTLGCTLYIVWATLYRCALDIMIWNSVFLGVNILHLSYLLYKKRPVKIEKELSGMYRRLFEPLRVPPDLFRRLTGQFCMIQTLKKGQTYAAEDKTSVDDRLSILLKGKMKVSYRGHFLHNIYPCAFIDSPEFRSTQMHKGEKFQVTIIADDNCRFLCWSRERLTYFLESEPFLYEIFRYLIGKDITNKLYSLNDPTLNDKKAKKLEHQLSLCTQISMLEMRNSIASSSDSDDGLHQFLRGTSSMSSLHVSSPHQRASAKMKPIEEGAEDDDDVFEPASPNTLKVHQLP

SEQ ID NO: 3623 - protein, 358 aa, Homo sapiens
MEAPGLAQAAAAESDSRKVAEETPDGAPALCPSPEALSPEPPVYSLQDFDTLATVGTGTFGRVHLVKEKTAKHFFALKVMSIPDVIRLKQEQHVHNEKSVLKEVSHPFLIRLFWTWHDERFLYMLMEYVPGGELFSYLRNRGRFSSTTGLFYSAEIICAIEYLHSKEIVYRDLKPENILLDRDGHIKLTDFGFAKKLVDRTWTLCGTPEYLAPEVIQSKGHGRAVDWWALGILIFEMLSGFPPFFDDNPFGIYQKILAGKIDFPRHLDFHVKDLIKKLLVVDRTRRLGNMKNGANDVKHHRWFRSVDWEAVPQRKLKPPIVPKIAGDGDTSNFETYPENDWDTAAPVPQKDLEIFKNF

SEQ ID NO: 3624 - protein, 622 aa, Homo sapiens
MKENVASATVFTLLLFLNTCLLNGQLPPGKPEIFKCRSPNKETFTCWWRPGTDGGLPTNYSLTYHREGETLMHECPDYITGGPNSCHFGKQYTSMWRTYIMMVNATNQMGSSFSDELYVDVTYIVQPDPPLELAVEVKQPEDRKPYLWIKWSPPTLIDLKTGWFTLLYEIRLKPEKAAEWEIHFAGQQTEFKILSLHPGQKYLVQVRCKPDHGYWSAWSPATFIQIPSDFTMNDTTVWISVAVLSAVICLIIVWAVALKGYSMVTCIFPPVPGPKIKGFDAHLLEKGKSEELLSALGCQDFPPTSDYEDLLVEYLEVDDSEDQHLMSVHSKEHPSQGMKPTYLDPDTDSGRGSCDSPSLLSEKCEEPQANPSTFYDPEVIEKPENPETTHTWDPQCISMEGKIPYFHAGGSKCSTWPLPQPSQHNPRSSYHNITDVCELAVGPAGAPATLLNEAGKDALKSSQTIKSREEGKATQQREVESFHSETDQDTPWLLPQEKTPFGSAKPLDYVEIHKVNKDGALSLLPKQRENSGKPKKPGTPENNKEYAKVSGVMDNNILVLVPDPHAKNVACFEESAKEAPPSLEQNQAEKALANFTATSSKCRLQLGGLDYLDPACFTHSFH

SEQ ID NO: 3625 - protein, 521 aa, Homo sapiens
MKENVASATVFTLLLFLNTCLLNVQPDPPLELAVEVKQPEDRKPYLWIKWSPPTLIDLKTGWFTLLYEIRLKPEKAAEWEIHFAGQQTEFKILSLHPGQKYLVQVRCKPDHGYWSAWSPATFIQIPSDFTMNDTTVWISVAVLSAVICLIIVWAVALKGYSMVTCIFPPVPGPKIKGFDAHLLEKGKSEELLSALGCQDFPPTSDYEDLLVEYLEVDDSEDQHLMSVHSKEHPSQGMKPTYLDPDTDSGRGSCDSPSLLSEKCEEPQANPSTFYDPEVIEKPENPETTHTWDPQCISMEGKIPYFHAGGSKCSTWPLPQPSQHNPRSSYHNITDVCELAVGPAGAPATLLNEAGKDALKSSQTIKSREEGKATQQREVESFHSETDQDTPWLLPQEKTPFGSAKPLDYVEIHKVNKDGALSLLPKQRENSGKPKKPGTPENNKEYAKVSGVMDNNILVLVPDPHAKNVACFEESAKEAPPSLEQNQAEKALANFTATSSKCRLQLGGLDYLDPACFTHSFH

SEQ ID NO: 3626 - protein, 230 aa, Homo sapiens
MKENVASATVFTLLLFLNTCLLNGQLPPGKPEIFKCRSPNKETFTCWWRPGTDGGLPTNYSLTYHREGETLMHECPDYITGGPNSCHFGKQYTSMWRTYIMMVNATNQMGSSFSDELYVDVTYIVQPDPPLELAVEVKQPEDRKPYLWIKWSPPTLIDLKTGWFTLLYEIRLKPEKAAEWEIHFAGQQTEFKILSLHPGQKYLVQVRCKPDHGYWSAWSPATFIQIPSAW

SEQ ID NO: 3627 - protein, 376 aa, Homo sapiens
MKENVASATVFTLLLFLNTCLLNGQLPPGKPEIFKCRSPNKETFTCWWRPGTDGGLPTNYSLTYHREGETLMHECPDYITGGPNSCHFGKQYTSMWRTYIMMVNATNQMGSSFSDELYVDVTYIVQPDPPLELAVEVKQPEDRKPYLWIKWSPPTLIDLKTGWFTLLYEIRLKPEKAAEWEIHFAGQQTEFKILSLHPGQKYLVQVRCKPDHGYWSAWSPATFIQIPSDFTMNDTTVWISVAVLSAVICLIIVWAVALKGYSMVTCIFPPVPGPKIKGFDAHLLEKGKSEELLSALGCQDFPPTSDYEDLLVEYLEVDDSEDQHLMSVHSKEHPSQGDPLMLGASHYKNLKSYRPRKISSQGRLAVFTKATLTTVQ

SEQ ID NO: 3628 - protein, 349 aa, Homo sapiens
MKENVASATVFTLLLFLNTCLLNGQLPPGKPEIFKCRSPNKETFTCWWRPGTDGGLPTNYSLTYHREGETLMHECPDYITGGPNSCHFGKQYTSMWRTYIMMVNATNQMGSSFSDELYVDVTYIVQPDPPLELAVEVKQPEDRKPYLWIKWSPPTLIDLKTGWFTLLYEIRLKPEKAAEWEIHFAGQQTEFKILSLHPGQKYLVQVRCKPDHGYWSAWSPATFIQIPSDFTMNDTTVWISVAVLSAVICLIIVWAVALKGYSMVTCIFPPVPGPKIKGFDAHLLEKGKSEELLSALGCQDFPPTSDYEDLLVEYLEVDDSEDQHLMSVHSKEHPSQEREQRQAQEARDS

SEQ ID NO: 3629 - protein, 288 aa, Homo sapiens
MKENVASATVFTLLLFLNTCLLNGQLPPGKPEIFKCRSPNKETFTCWWRPGTDGGLPTNYSLTYHREGETLMHECPDYITGGPNSCHFGKQYTSMWRTYIMMVNATNQMGSSFSDELYVDVTYIVQPDPPLELAVEVKQPEDRKPYLWIKWSPPTLIDLKTGWFTLLYEIRLKPEKAAEWEIHFAGQQTEFKILSLHPGQKYLVQVRCKPDHGYWSAWSPATFIQIPSDFTMNDTTVWISVAVLSAVICLIIVWAVALKGYSMVTCIFPPVPGPKIKGFDAHLLEVTP

SEQ ID NO: 3630 - protein, 268 aa, Homo sapiens
MKENVASATVFTLLLFLNTCLLNGQLPPGKPEIFKCRSPNKETFTCWWRPGTDGGLPTNYSLTYHREGETLMHECPDYITGGPNSCHFGKQYTSMWRTYIMMVNATNQMGSSFSDELYVDVTYIVQPDPPLELAVEVKQPEDRKPYLWIKWSPPTLIDLKTGWFTLLYEIRLKPEKAAEWEIHFAGQQTEFKILSLHPGQKYLVQVRCKPDHGYWSAWSPATFIQIPSGDPLMLGASHYKNLKSYRPRKISSQGRLAVFTKATLTTVQ

SEQ ID NO: 3631 - protein, 217 aa, Homo sapiens
MHECPDYITGGPNSCHFGKQYTSMWRTYIMMVNATNQMGSSFSDELYVDVTYIVQPDPPLELAVEVKQPEDRKPYLWIKWSPPTLIDLKTGWFTLLYEIRLKPEKAAEWEIHFAGQQTEFKILSLHPGQKYLVQVRCKPDHGYWSAWSPATFIQIPSDFTMNDTTVWISVAVLSAVICLIIVWAVALKGYSMVTCIFPPVPGPKIKGFDAHLLEVTP

SEQ ID NO: 3632 - protein, 309 aa, Homo sapiens
MKENVASATVFTLLLFLNTCLLNGQLPPGKPEIFKCRSPNKETFTCWWRPGTDGGLPTNYSLTYHREGETLMHECPDYITGGPNSCHFGKQYTSMWRTYIMMVNATNQMGSSFSDELYVDVTYIVQPDPPLELAVEVKQPEDRKPYLWIKWSPPTLIDLKTGWFTLLYEIRLKPEKAAEWEIHFAGQQTEFKILSLHPGQKYLVQVRCKPDHGYWSAWSPATFIQIPSDFTMNDTTVWISVAVLSAVICLIIVWAVALKGYSMVTCIFPPVPGPKIKGFDAHLLEDRLCTPGRCCVSTGLTDLDYSCST

SEQ ID NO: 3633 - protein, 887 aa, Homo sapiens
MSLFKARDWWSTILGDKEEFDQGCLCLANVDNSGNGQDKIIVGSFMGYLRIFSPHPAKTGDGAQAEDLLLEVDLRDPVLQVEVGKFVSGTEMLHLAVLHSRKLCVYSVSGTLGNVEHGNQCQMKLMYEHNLQRTACNMTYGSFGGVKGRDLICIQSMDGMLMVFEQESYAFGRFLPGFLLPGPLAYSSRTDSFLTVSSCQQVESYKYQVLAFATDADKRQETEQQKLGSGKRLVVDWTLNIGEQALDICIVSFNQSASSVFVLGERNFFCLKDNGQIRFMKKLDWSPSCFLPYCSVSEGTINTLIGNHNNMLHIYQDVTLKWATQLPHIPVAVRVGCLHDLKGVIVTLSDDGHLQCSYLGTDPSLFQAPNVQSRELNYDELDVEMKELQKIIKDVNKSQGVWPMTEREDDLNVSVVVSPNFDSVSQATDVEVGTDLVPSVTVKVTLQNRVILQKAKLSVYVQPPLELTCDQFTFEFMTPDLTRTVSFSVYLKRSYTPSELEGNAVVSYSRPTDRNPDGIPRVIQCKFRLPLKLICLPGQPSKTASHKITIDTNKSPVSLLSLFPGFASQSDDDQVNVMGFHFLGGARITVLASKTSQRYRIQSEQFEDLWLITNELILRLQEYFEKQGVKDFACSFSGSIPLQEYFELIDHHFELRINGEKLEELLSERAVQFRAIQRRLLARFKDKTPAPLQHLDTLLDGTYKQVIALADAVEENQGNLFQSFTRLKSATHLVILLIALWQKLSADQVAILEAAFLPLQEDTQELGWEETVDAAISHLLKTCLSKSSKEQALNLNSQLNIPKDTSQLKKHITLLCDRLSKGGRLCLSTDAAAPQTMVMPGGCTTIPESDLEERSVEQDSTELFTNHRHLTAETPRPEVSPLQGVSE

SEQ ID NO: 3634 - protein, 847 aa, Homo sapiens
MSLFKARDWWSTILGDKEEFDQGCLCLANVDNSGNGQDKIIVGSFMGYLRIFSPHPAKTGDGAQAEDLLLEVDLRDPVLQVEVGKFVSGTEMLHLAVLHSRKLCVYSVSGTLGNVEHGNQCQMKLMYEHNLQRTACNMTYGSFGGVKGRDLICIQSMDGMLMVFEQESYAFGRFLPGFLLPGPLAYSSRTDSFLTVSSCQQVESYKYQVLAFATDADKRQETEQQKLGSGKRLVVDWTLNIGEQALDICIVSFNQSASSVFVLGERNFFCLKDNGQIRFMKKLDWSPSCFLPYCSVSEGTINTLIGNHNNMLHIYQDVTLKWATQLPHIPVAVRVGCLHDLKGVIVTLSDDGHLQCSYLGTDPSLFQAPNVQSRELNYDELDVEMKELQKIIKDVNKSQGVWPMTEREDDLNVSVVVSPNFDSVSQATDVEVGTDLVPSVTVKVTLQNRVILQKAKLSVYVQPPLELTCDQFTFEFMSIPRVIQCKFRLPLKLICLPGQPSKTASHKITIDTNKSPVSLLSLFPGFASQSDDDQVNVMGFHFLGGARITVLASKTSQRYRIQSEQFEDLWLITNELILRLQEYFEKQGVKDFACSFSGSIPLQEYFELIDHHFELRINGEKLEELLSERAVQFRAIQRRLLARFKDKTPAPLQHLDTLLDGTYKQVIALADAVEENQGNLFQSFTRLKSATHLVILLIALWQKLSADQVAILEAAFLPLQEDTQELGWEETVDAAISHLLKTCLSKSSKEQALNLNSQLNIPKDTSQLKKHITLLCDRLSKGGRLCLSTDAAAPQTMVMPGGCTTIPESDLEERSVEQDSTELFTNHRHLTAETPRPEVSPLQGVSE

SEQ ID NO: 3635 - protein, 887 aa, Homo sapiens
MSLFKARDWWSTILGDKEEFDQGCLCLANVDNSGNGQDKIIVGSFMGYLRIFSPHPAKTGDGAQAEDLLLEVDLRDPVLQVEVGKFVSGTEMLHLAVLHSRKLCVYSVSGTLGNVEHGNQCQMKLMYEHNLQRTACNMTYGSFGGVKGRDLICIQSMDGMLMVFEQESYAFGRFLPGFLLPGPLAYSSRTDSFLTVSSCQQVESYKYQVLAFATDADKRQETEQQKLGSGKRLVVDWTLNIGEQALDICIVSFNQSASSVFVLGERNFFCLKDNGQIRFMKKLDWSPSCFLPYCSVSEGTINTLIGNHNNMLHIYQDVTLKWATQLPHIPVAVRVGCLHDLKGVIVTLSDDGHLQCSYLGTDPSLFQAPNVQSRELNYDELDVEMKELQKIIKDVNKSQGVWPMTEREDDLNVSVVVSPNFDSVSQATDVEVGTDLVPSVTVKVTLQNRVILQKAKLSVYVQPPLELTCDQFTFEFMTPDLTRTVSFSVYLKRSYTPSELEGNAVVSYSRPTDRNPDGIPRVIQCKFRLPLKLICLPGQPSKTASHKITIDTNKSPVSLLSLFPGFASQSDDDQVNVMGFHFLGGARITVLASKTSQRYRIQSEQFEDLWLITNELILRLQEYFEKQGVKDFACSFSGSIPLQEYFELIDHHFELRINGEKLEELLSERAVQFRAIQRRLLARFKDKTPAPLQHLDTLLDGTYKQVIALADAVEENQGNLFQSFTRLKSATHLVILLIALWQKLSADQVAILEAAFLPLQEDTQELGWEETVDAAISHLLKTCLSKSSKEQALNLNSQLNIPKDTSQLKKHITLLCDRLSKGGRLCLSTDAAAPQTMVMPGGCTTIPESDLEERSVEQDSTELFTNHRHLTAETPRPGKRLDGLHKR

SEQ ID NO: 3636 - protein, 852 aa, Homo sapiens
MSLFKARDWWSTILGDKEEFDQGCLCLANVDNSGNGQDKIIVGSFMGYLRIFSPHPAKTGDGAQAEDLLLEVDLRDPVLQVEVGKFVSGTEMLHLAVLHSRKLCVYSVSGTLGNVEHGNQCQMKLMYEHNLQRTACNMTYGSFGGVKGRDLICIQSMDGMLMVFEQESYAFGRFLPGFLLPGPLAYSSRTDSFLTVSSCQQVESYKYQVLAFATDADKRQETEQQKLGSGKRLVVDWTLNIGEQALDICIVSFNQSASSVFVLGERNFFCLKDNGQIRFMKKLDWSPSCFLPYCSVSEGTINTLIGNHNNMLHIYQDVTLKWATQLPHIPVAVRVGCLHDLKGVIVTLSDDGHLQCSYLGTDPSLFQAPNVQSRELNYDELDVEMKELQKIIKDVNKSQGVWPMTEREDDLNVSVVVSPNFDSVSQATDVEVGTDLVPSVTVKVTLQNRVILQKAKLSVYVQPPLELTCDQFTFEFMNRNPDGIPRVIQCKFRLPLKLICLPGQPSKTASHKITIDTNKSPVSLLSLFPGFASQSDDDQVNVMGFHFLGGARITVLASKTSQRYRIQSEQFEDLWLITNELILRLQEYFEKQGVKDFACSFSGSIPLQEYFELIDHHFELRINGEKLEELLSERAVQFRAIQRRLLARFKDKTPAPLQHLDTLLDGTYKQVIALADAVEENQGNLFQSFTRLKSATHLVILLIALWQKLSADQVAILEAAFLPLQEDTQELGWEETVDAAISHLLKTCLSKSSKEQALNLNSQLNIPKDTSQLKKHITLLCDRLSKGGRLCLSTDAAAPQTMVMPGGCTTIPESDLEERSVEQDSTELFTNHRHLTAETPRPEVSPLQGVSE

SEQ ID NO: 3637 - protein, 310 aa, Homo sapiens
MGYLRIFSPHPAKTGDGAQAEDLLLEVDLRDPVLQVEVGKFVSGTEMLHLAVLHSRKLCVYSVSGTLGNVEHGNQCQMKLMYEHNLQRTACNMTYGSFGGVKGRDLICIQSMDGMLMVFEQESYAFGRFLPGFLLPGPLAYSSRTDSFLTVSSCQQVESYKYQVLAFATDADKRQETEQQKLGSGKRLVVDWTLNIGEQALDICIVSFNQSASSVFVLGERNFFCLKDNGQIRFMKKLDWSPSCFLPYCSVSEGTINTLIGNHNNMLHIYQDVTLKWATQLPHIPVAVRVGCLQFSLWKHLLPRSSTLEK

SEQ ID NO: 3638 - protein, 481 aa, Homo sapiens
MSLFKARDWWSTILGDKEEFDQGCLCLANVDNSGNGQDKIIVGSFMGYLRIFSPHPAKTGDGAQAEDLLLEVDLRDPVLQVEVGKFVSGTEMLHLAVLHSRKLCVYSVSGTLGNVEHGNQCQMKLMYEHNLQRTACNMTYGSFGGVKGRDLICIQSMDGMLMVFEQESYAFGRFLPGFLLPGPLAYSSRTDSFLTVSSCQQVESYKYQVLAFATDADKRQETEQQKLGSGKRLVVDWTLNIGEQALDICIVSFNQSASSVFVLGERNFFCLKDNGQIRFMKKLDWSPSCFLPYCSVSEGTINTLIGNHNNMLHIYQDVTLKWATQLPHIPVAVRVGCLHDLKGVIVTLSDDGHLQCSYLGTDPSLFQAPNVQSRELNYDELDVEMKELQKIIKDVNKSQGVWPMTEREDDLNVSVVVSPNFDSVSQATDVEVGTDLVPSVTVKVTLQNRVILQKAKLSVYVQPPLELTCDQFTFEFMIFSS

SEQ ID NO: 3639 - protein, 882 aa, Homo sapiens
MSLFKARDWWSTILGDKEEFDQGCLCLANVDNSGNGQDKIIVGSFMGYLRIFSPHPAKTGDGAQAEDLLLEVDLRDPVLQVEVGKFVSGTEMLHLAVLHSRKLCVYSVSGTLGNVEHGNQCQMKLMYEHNLQRTACNMTYGSFGGVKGRDLICIQSMDGMLMVFEQESYAFGRFLPGFLLPGPLAYSSRTDSFLTVSSCQQVESYKYQVLAFATDADKRQETEQQKLGSGKRLVVDWTLNIGEQALDICIVSFNQSASSVFVLGERNFFCLKDNGQIRFMKKLDWSPSCFLPYCSVSEGTINTLIGNHNNMLHIYQDVTLKWATQLPHIPVAVRVGCLHDLKGVIVTLSDDGHLQCSYLGTDPSLFQAPNVQSRELNYDELDVEMKELQKIIKDVNKSQGVWPMTEREDDLNVSVVVSPNFDSVSQATDVEVGTDLVPSVTVKVTLQNRVILQKAKLSVYVQPPLELTCDQFTFEFMTPDLTRTVSFSVYLKRSYTPSELEGNAVVSYSRPTGIPRVIQCKFRLPLKLICLPGQPSKTASHKITIDTNKSPVSLLSLFPGFASQSDDDQVNVMGFHFLGGARITVLASKTSQRYRIQSEQFEDLWLITNELILRLQEYFEKQGVKDFACSFSGSIPLQEYFELIDHHFELRINGEKLEELLSERAVQFRAIQRRLLARFKDKTPAPLQHLDTLLDGTYKQVIALADAVEENQGNLFQSFTRLKSATHLVILLIALWQKLSADQVAILEAAFLPLQEDTQELGWEETVDAAISHLLKTCLSKSSKEQALNLNSQLNIPKDTSQLKKHITLLCDRLSKGGRLCLSTDAAAPQTMVMPGGCTTIPESDLEERSVEQDSTELFTNHRHLTAETPRPEVSPLQGVSE

SEQ ID NO: 3640 - protein, 669 aa, Homo sapiens
MKIFVGNVDGADTTPEELAALFAPYGTVMSCAVMKQFAFVHMRENAGALRAIEALHGHELRPGRALVVEMSRPRPLNTWKIFVGNVSAACTSQELRSLFERRGRVIECDVVKDYAFVHMEKEADAKAAIAQLNGKEVKGKRINVELSTKGQKKGPGLAVQSGDKTKKPGAGDTAFPGTGGFSATFDYQQAFGNSTGGFDGQARQPTPPFFGRDRSPLRRSPPRASYVAPLTAQPATYRAQPSVSLGAAYRAQPSASLGVGYRTQPMTAQAASYRAQPSVSLGAPYRGQLASPSSQSAAASSLGPYGGAQPSASALSSYGGQAAAASSLNSYGAQGSSLASYGNQPSSYGAQAASSYGVRAAASSYNTQGAASSLGSYGAQAASYGAQSAASSLAYGAQAASYNAQPSASYNAQSAPYAAQQAASYSSQPAAYVAQPATAAAYASQPAAYAAQATTPMAGSYGAQPVVQTQLNSYGAQASMGLSGSYGAQSAAAATGSYGAAAAYGAQPSATLAAPYRTQSSASLAASYAAQQHPQAAASYRGQPGNAYDGAGQPSAAYLSMSQGAVANANSTPPPYERTRLSPPRASYDDPYKKAVAMSKRYGSDRRLAELSDYRRLSESQLSFRRSPTKSSLDYRRLPDAHSDYARYSGSYNDYLRAAQMHSGYQRRM

SEQ ID NO: 3641 - protein, 156 aa, Homo sapiens
MKIFVGNVDGADTTPEELAALFAPYGTVMSCAVMKQFAFVHMRENAGALRAIEALHGHELRPGRALVVEMSRPRPLNTWKIFVGNVSAACTSQELRSLFERRGRVIECDVVKDYAFVHMEKEADAKAAIAQLNGKEVKGKRINVELSTKGMVPTGV

SEQ ID NO: 3642 - protein, 118 aa, Homo sapiens
MKIFVGNVDGADTTPEELAALFAPYGTVMSCAVMKQFAFVHMRENAGALRAIEALHGHELRPGRALVVEMSRPRPLNTWKIFVGNVSAACTSQELRSLFERRGRVIECDVVKGGMCVG

SEQ ID NO: 3643 - protein, 119 aa, Homo sapiens
MKIFVGNVDGADTTPEELAALFAPYGTVMSCAVMKQFAFVHMRENAGALRAIEALHGHELRPGRALVVEMSRPRPLNTWKIFVGNVSAACTSQELRSLFERRGRVIECDVVKGMVPTGV

SEQ ID NO: 3644 - protein, 339 aa, Homo sapiens
MKIFVGNVDGADTTPEELAALFAPYGTVMSCAVMKQFAFVHMRENAGALRAIEALHGHELRPGRALVVEMSRPRPLNTWKIFVGNVSAACTSQELRSLFERRGRVIECDVVKGKRMHVQLSTSRLRTAPGMGDQSGCYRCGKEGHWSKECPIDRSGRVADLTEQYNEQYGAVRTPYTMSYGDSLYYNNAYGALDAYYKRCRAARSYEAVAAAAASVYNYAEQTLSQLPQVQNTAMASHLTSTSLDPYDRHLLPTSGAAATAAAAAAAAAAVTAASTSYYGRDRSPLRRATAPVPTVGEGYGYGHESELSQASAAARNSLYDMARYEREQYADRARYSAF

SEQ ID NO: 3645 - protein, 373 aa, Homo sapiens
MLLGLAAMELKVWVDGIQRVVCGVSEQTTCQEVVIALAQAIGQTGRFVLVQRLREKERQLLPQECPVGAQATCGQFASDVQFVLRRTGPSLAGRPSSDSCPPPERCLIRASLPVKPRAALGCEPRKTLTPEPAPSLSRPGPAAPVTPTPGCCTDLRGLELRVQRNAEELGHEAFWEQELRREQAREREGQARLQALSAATAEHAARLQALDAQARALEAELQLAAEAPGPPSPMASATERLHQDLAVQERQSAEVQGSLALVSRALEAAERALQAQAQELEELNRELRQCNLQQFIQQTGAALPPPPRPDRGPPGTQGPLPPAREESLLGAPSESHAGAQPRPRGGPHDAELLEVAAAPAPEWCPLAAQPQAL

SEQ ID NO: 3646 - protein, 337 aa, Homo sapiens
MLLGLAAMELKVWVDGIQRVVCGVSEQTTCQEVVIALAQAIGQTGRFVLVQRLREKERQLLPQECPVGAQATCGQFASDVQFVLRRTGPSLAGRPSSDSCPPPERCLIRASLPVKPRAALGCEPRKTLTPEPAPSLSRPGPAAPVTPTPGCCTDLRGLELRVQRNAEELGHEAFWEQELRREQAREREGQARLQALSAATAEHAARLQALDAQARALEAELQLAAEAPGPPSPMASATERLHQDLAVQERQSAEVQGSLALVSRALEAAERALQAQAQELEELNRELRQCNLQQFIQQTGAALPPPPRPDRGPPGTQVGVVLGGGWEVRTWPSPTPS

SEQ ID NO: 3647 - protein, 320 aa, Homo sapiens
MLLGLAAMELKVWVDGIQRVVCGVSEQTTCQEVVIALAQAIGQTGRFVLVQRLREKERQLLPQECPVGAQATCGQFASDVQFVLRRTGPSLAGRPSSDSCPPPERCLIRASLPVKPRAALGCEPRKTLTPEPAPSLSRPGPAAPVTPTPGCCTDLRGLELRVQRNAEELGHEAFWEQELRREQAREREGQARLQALSAATAEHAARLQALDAQARALEAELQLAAEAPGPPSPMASATERLHQDLAVQERQSAEVQGSLALVSRALEAAERALQAQAQELEELNRELRQCNLQQFIQQTGAALPPPPRPDRGPPGTQWPP

SEQ ID NO: 3648 - protein, 201 aa, Homo sapiens
MARDYDHLFKLLIIGDSGVGKSSLLLRFADNTFSGSYITTIGVDFKIRTVEINGEKVKLQIWDTAGQERFRTITSTYYRGTHGVIVVYDVTSAESFVNVKRWLHEINQNCDDVCRILVGNKNDDPERKVVETEDAYKFAGQMGIQLFETSAKENVNVEEMFNCITELVLRAKKDNLAKQQQQQQNDVVKLTKNSKRKKRCC

SEQ ID NO: 3649 - protein, 152 aa, Homo sapiens
MARDYDHLFKLLIIGDSGVGKSSLLLRFADNTFSGSYITTIGVDFKIRTVEINGEKVKLQIWDTAGQERFRTITSTYYRGTHGVIVVYDVTSAESFVNVKRWLHEINQNCDDVCRILDVQLHHGAGPPSKERQPGKTAAATTERCGEAHEEQ

SEQ ID NO: 3650 - protein, 386 aa, Homo sapiens
MCSSVAAKLWFLTDRRIREDYPQKEILRALKAKCCEEELDFRAVVMDEVVLTIEQGNLGLRINGELITAYPQVVVVRVPTPWVQSDSDITVLRHLEKMGCRLMNRPQAILNCVNKFWTFQELAGHGVPLPDTFSYGGHENFAKMIDEAEVLEFPMVVKNTRGHRGKAVFLARDKHHLADLSHLIRHEAPYLFQKYVKESHGRDVRVIVVGGRVVGTMLRCSTDGRMQSNCSLGGVGMMCSLSEQGKQLAIQVSNILGMDVCGIDLLMKDDGSFCVCEANANVGFIAFDKACNLDVAGIIADYAASLLPSGRLTRRMSLLSVVSTASETSEPELGPPASTAVDNMSASSSSVDSDPESTERELLTKLPGGLFNMNQLLANEIKLLVD

SEQ ID NO: 3651 - protein, 307 aa, Homo sapiens
MCSSVAAKLWFLTDRRIREDYPQKEILRALKAKCCEEELDFRAVVMDEVVLTIEQGNLGLRINGELITAYPQVVVVRVPTPWVQSDSDITVLRHLEKMGCRLMNRPQAILNCVNKFWTFQELAGHGVPLPDTFSYGGHENFAKMIDEAEVLEFPMVVKNTRGHRGKAVFLARDKHHLADLSHLIRHEAPYLFQKYVKESHGRDVRVIVVGGRVVGTMLRCSTDGRMQSNCSLGGVGMMCSLSEQGKQLAIQVSNILGMDVCGIDLLMKDDGSFCVCEANANPFQEPKKQIQTNKKIPREKTFLLPPS

SEQ ID NO: 3652 - protein, 496 aa, Homo sapiens
MVEADHPGKLFIGGLNRETNEKMLKAVFGKHGPISEVLLIKDRTSKSRGFAFITFENPADAKNAAKDMNGKSLHGKAIKVEQAQKPSFQSGGRRRPPASSRNRSPSGSLRSARGSRGGTRGWLPSHEGHLDDGGYTPDLKMSYSRGLIPVKRGPSSRSGGPPPKKSAPSAVARSNSWMGSQGPMSQRRENYGVPPRRATISSWRNDRMSTRHDGYATNDGNHPSCQETRDYAPPSRGYAYRDNGHSNRDEHSSRGYRNHRSSRETRDYAPPSRGHAYRDYGHSRRDESYSRGYRNRRSSRETREYAPPSRGHGYRDYGHSRRHESYSRGYRNHPSSRETRDYAPPHRDYAYRDYGHSSWDEHSSRGYSYHDGYGEALGRDHSEHLSGSSYRDALQRYGTSHGAPPARGPRMSYGGSTCHAYSNTRDRYGRSWESYSSCGDFHYCDREHVCRKDQRNPPSLGRVLPDPREACGSSSYVASIVDGGESRSEKGDSSRY

SEQ ID NO: 3653 - protein, 252 aa, Homo sapiens
MVSWIISRLVVLIFGTLYPAYSSYKAVKTKNVKEYVKWMMYWIVFAFFTTAETLTDIVLSWFPFYFELKIAFVIWLLSPYTKGSSVLYRKFVHPTLSNKEKEIDEYITQARDKSYETMMRVGKRGLNLAANAAVTAAAKGVLSEKLRSFSMQDLTLIRDEDALPLQRPDGRLRPSPGSLLDTIEDLGDDPALSLRSSTNPADSRTEASEDDMGDKAPKRAKPIKKAPKAEPLASKTLKTRPKKKTSGGGDSA

SEQ ID NO: 3654 - protein, 254 aa, Homo sapiens
MVSWIISRLVVLIFGTLYPAYSSYKAVKTKNVKEYVKWMMYWIVFAFFTTAETLTDIVLSWFPFYFELKIAFVIWLLSPYTKGSSVLYRKFVHPTLSNKEKEIDEYITQARDKSYETMMRVGKRGLNLAANAAVTAAAKGQGVLSEKLRSFSMQDLTLIRDEDALPLQRPDGRLRPSPGSLLDTIEDLGDDPALSLRSSTNPADSRTEASEDDMGDKAPKRAKPIKKAPKAEPLASKTLKTRPKKKTSGGGDSA

SEQ ID NO: 3655 - protein, 185 aa, Homo sapiens
MPRLFLFHLLEFCLLLNQFSRAVAAKWKDDVIKLCGRELVRAQIAICGMSTWSKRSLSQEDAPQTPRPVAEIVPSFINKDTETIIIMLEFIANLPPELKAALSERQPSLPELQQYVPALKDSNLSFEEFKKLIRNRQSEAADSNPSELKYLGLDTHSQKKRRPYVALFEKCCLIGCTKRSLAKYC

SEQ ID NO: 3656 - protein, 117 aa, Homo sapiens
MPRLFLFHLLEFCLLLNQFSRAVAAKWKDDVIKLCGRELVRAQIAICGMSTWSKRSLSQEDAPQTPRPVAGDFIQTVSLGISPDGGKALRTGSCFTREFLGALSKLYHPSSTKIQKL

SEQ ID NO: 3657 - protein, 991 aa, Homo sapiens
MSSHHTTFPFDPERRVRSTLKKVFGFDSFKTPLQESATMAVVKGNKDVFVCMPTGAGKSLCYQLPALLAKGITIVVSPLIALIQDQVDHLLTLKVRVSSLNSKLSAQERKELLADLEREKPQTKILYITPEMAASSSFQPTLNSLVSRHLLSYLVVDEAHCVSQWGHDFRPDYLRLGALRSRLGHAPCVALTATATPQVQEDVFAALHLKKPVAIFKTPCFRANLFYDVQFKELISDPYGNLKDFCLKALGQEADKGLSGCGIVYCRTREACEQLAIELSCRGVNAKAYHAGLKASERTLVQNDWMEEKVPVIVATISFGMGVDKANVRFVAHWNIAKSMAGYYQESGRAGRDGKPSWCRLYYSRNDRDQVSFLIRKEVAKLQEKRGNKASDKATIMAFDALVTFCEELGCRHAAIAKYFGDALPACAKGCDHCQNPTAVRRRLEALERSSSWSKTCIGPSQGNGFDPELYEGGRKGYGDFSRYDEGSGGSGDEGRDEAHKREWNLFYQKQMQLRKGKDPKIEEFVPPDENCPLKEASSRRIPRLTVKAREHCLRLLEEALSSNRQSTRTADEADLRAKAVELEHETFRNAKVANLYKASVLKKVADIHRASKDGQPYDMGGSAKSCSAQAEPPEPNEYDIPPASHVYSLKPKRVGAGFPKGSCPFQTATELMETTRIREQAPQPERGGEHEPPSRPCGLLDEDGSEPLPGPRGEVPGGSAHYGGPSPEKKAKSSSGGSSLAKGRASKKQQLLATAAHKDSQSIARFFCRRVESPALLASAPEAEGACPSCEGVQGPPMAPEKYTGEEDGAGGHSPAPPQTEECLRERPSTCPPRDQGTPEVQPTPAKDTWKGKRPRSQQENPESQPQKRPRPSAKPSVVAEVKGSVSASEQGTLNPTAQDPFQLSAPGVSLKEAANVVVKCLTPFYKEGKFASKELFKGFARHLSHLLTQKTSPGRSVKEEAQNLIRHFFHGRARCESEADWHGLCGPQR

SEQ ID NO: 3658 - protein, 410 aa, Homo sapiens
MSSHHTTFPFDPERRVRSTLKKVFGFDSFKTPLQESATMAVVKGNKDVFVCMPTGAGKSLCYQLPALLAKGITIVVSPLIALIQDQVDHLLTLKVRVSSLNSKLSAQERKELLADLEREKPQTKILYITPEMAASSSFQPTLNSLVSRHLLSYLVVDEAHCVSQWGHDFRPDYLRLGALRSRLGHAPCVALTATATPQVQEDVFAALHLKKPVAIFKTPCFRANLFYDVQFKELISDPYGNLKDFCLKALGQEADKGLSGCGIVYCRTREACEQLAIELSCRGVNAKAYHAGLKASERTLVQNDWMEEKVPVIVATISFGMGVDKANVRFVAHWNIAKSMAGYYQESGRAGRDGKPSWCRLYYSRNDRDQVSFLIRKEVAKLQEKRGNKASDKATIMAFDALVTFCEELG

SEQ ID NO: 3659 - protein, 435 aa, Homo sapiens
MSSHHTTFPFDPERRVRSTLKKVFGFDSFKTPLQESATMAVVKGNKDVFVCMPTGAGKSLCYQLPALLAKGITIVVSPLIALIQDQVDHLLTLKVRVSSLNSKLSAQERKELLADLEREKPQTKILYITPEMAASSSFQPTLNSLVSRHLLSYLVVDEAHCVSQWGHDFRPDYLRLGALRSRLGHAPCVALTATATPQVQEDVFAALHLKKPVAIFKTPCFRANLFYDVQFKELISDPYGNLKDFCLKALGQEADKGLSGCGIVYCRTREACEQLAIELSCRGVNAKAYHAGLKASERTLVQNDWMEEKVPVIVATISFGMGVDKANVRFVAHWNIAKSMAGYYQESGRAGRDGKPSWCRLYYSRNDRDQVSFLIRKEVAKLQEKRGNKASDKATIMAFDALVTFCEELGRWGRGHGKSLRAAWCSQVVSRHAEL

SEQ ID NO: 3660 - protein, 964 aa, Homo sapiens
MSSHHTTFPFDPERRVRSTLKKVFGFDSFKTPLQESATMAVVKGITIVVSPLIALIQDQVDHLLTLKVRVSSLNSKLSAQERKELLADLEREKPQTKILYITPEMAASSSFQPTLNSLVSRHLLSYLVVDEAHCVSQWGHDFRPDYLRLGALRSRLGHAPCVALTATATPQVQEDVFAALHLKKPVAIFKTPCFRANLFYDVQFKELISDPYGNLKDFCLKALGQEADKGLSGCGIVYCRTREACEQLAIELSCRGVNAKAYHAGLKASERTLVQNDWMEEKVPVIVATISFGMGVDKANVRFVAHWNIAKSMAGYYQESGRAGRDGKPSWCRLYYSRNDRDQVSFLIRKEVAKLQEKRGNKASDKATIMAFDALVTFCEELGCRHAAIAKYFGDALPACAKGCDHCQNPTAVRRRLEALERSSSWSKTCIGPSQGNGFDPELYEGGRKGYGDFSRYDEGSGGSGDEGRDEAHKREWNLFYQKQMQLRKGKDPKIEEFVPPDENCPLKEASSRRIPRLTVKAREHCLRLLEEALSSNRQSTRTADEADLRAKAVELEHETFRNAKVANLYKASVLKKVADIHRASKDGQPYDMGGSAKSCSAQAEPPEPNEYDIPPASHVYSLKPKRVGAGFPKGSCPFQTATELMETTRIREQAPQPERGGEHEPPSRPCGLLDEDGSEPLPGPRGEVPGGSAHYGGPSPEKKAKSSSGGSSLAKGRASKKQQLLATAAHKDSQSIARFFCRRVESPALLASAPEAEGACPSCEGVQGPPMAPEKYTGEEDGAGGHSPAPPQTEECLRERPSTCPPRDQGTPEVQPTPAKDTWKGKRPRSQQENPESQPQKRPRPSAKPSVVAEVKGSVSASEQGTLNPTAQDPFQLSAPGVSLKEAANVVVKCLTPFYKEGKFASKELFKGFARHLSHLLTQKTSPGRSVKEEAQNLIRHFFHGRARCESEADWHGLCGPQR

SEQ ID NO: 3661 - protein, 148 aa, Homo sapiens
MSSDFPHYNFRMPNIGFQNLPLNIYIVVFGTAIFVFILSLLFCCYLIRLRHQAHKEFYAYKQVILKEKVKELNLHELCAVCLEDFKPRDELGICPCKHAFHRKCLIKWLEVRKVCPLCNMPVLQLAQLHSKQDRGPPQGPLPGAENIV

SEQ ID NO: 3662 - protein, 169 aa, Homo sapiens
MLNKSGESRYPALFPVLGGSSMSSDFPHYNFRMPNIGFQNLPLNIYIVVFGTAIFVFILSLLFCCYLIRLRHQAHKEFYAYKQVILKEKVKELNLHELCAVCLEDFKPRDELGICPCKHAFHRKCLIKWLEVRKVCPLCNMPVLQLAQLHSKQDRGPPQGPLPGAENIV

SEQ ID NO: 3663 - protein, 459 aa, Homo sapiens
MAASASAAAGEEDWVLPSEVEVLESIYLDELQVIKGNGRTSPWEIYITLHPATAEDQDSQYVCFTLVLQVPAEYPHEVPQISIRNPRGLSDEQIHTILQVLGHVAKAGLGTAMLYELIEKGKEILTDNNIPHGQCVICLYGFQEKEAFTKTPCYHYFHCHCLARYIQHMEQELKAQGQEQEQERQHATTKQKAVGVQCPVCREPLVYDLASLKAAPEPQQPMELYQPSAESLRQQEERKRLYQRQQERGGIIDLEAERNRYFISLQQPPAPAEPESAVDVSKGSQPPSTLAAELSTSPAVQSTLPPPLPVATQHICEKIPGTRSNQQRLGETQKAMLDPPKPSRGPWRQPERRHPKGGECHAPKGTRDTQELPPPEGPLKEPMDLKPEPHSQGVEGPPQEKGPGSWQGPPPRRTRDCVRWERSKGRTPGSSYPRLPRGQGAYRPGTRRESLGLESKDGS

SEQ ID NO: 3664 - protein, 433 aa, Homo sapiens
MEAVYLVVNGLGLVLDVLTLVLDLNFLLVSSLLASLAWLLAFVYNLPHTVLTSLLHLGRGVLLSLLALIEAVVRFTCGGLQALCTLLYSCCSGLESLKLLGHLASHGALRSREILHRGVLNVVSSGHALLRQACDICAIAMSLVAYVINSLVNICLIGTQNLFSLVLALWDAVTGPLWRMTDVVAAFLAHISSSAVAMAILLWTPCQLALELLASAARLLASFVLVNLTGLVLLACVLAVTVTVLHPDFTLRLATQALSQLHARPSYHRLREDVMRLSRLALGSEAWRRVWSRSLQLASWPNRGGAPGAPQGDPMRVFSVRTRRQDTLPEAGRRSEAEEEEARTIRVTPVRGRERLNEEEPPGGQDPWKLLKEQEERKKCVICQDQSKTVLLLPCRHLCLCQACTEILMRHPVYHRNCPLCRRGILQTLNVYL

SEQ ID NO: 3665 - protein, 1072 aa, Homo sapiens
MPGEEEERAFLVAREELASALRRDSGQAFSLEQLRPLLASSLPLAARYLQLDAARLVRCNAHGEPRNYLNTLSTALNILEKYGRNLLSPQRPRYWRGVKFNNPVFRSTVDAVQGGRDVLRLYGYTEEQPDGLSFPEGQEEPDEHQVATVTLEVLLLRTELSLLLQNTHPRQQALEQLLEDKVEDDMLQLSEFDPLLREIAPGPLTTPSVPGSTPGPCFLCGSAPGTLHCPSCKQALCPACDHLFHGHPSRAHHLRQTLPGVLQGTHLSPSLPASAQPRPQSTSLLALGDSSLSSPNPASAHLPWHCAACAMLNEPWAVLCVACDRPRGCKGLGLGTEGPQGTGGLEPDLARGRWACQSCTFENEAAAVLCSICERPRLAQPPSLVVDSRDAGICLQPLQQGDALLASAQSQVWYCIHCTFCNSSPGWVCVMCNRTSSPIPAQHAPRPYASSLEKGPPKPGPPRRLSAPLPSSCGDPEKQRQDKMREEGLQLVSMIREGEAAGACPEEIFSALQYSGTEVPLQWLRSELPYVLEMVAELAGQQDPGLGAFSCQEARRAWLDRHGNLDEAVEECVRTRRRKVQELQSLGFGPEEGSLQALFQHGGDVSRALTELQRQRLEPFRQRLWDSGPEPTPSWDGPDKQSLVRRLLAVYALPSWGRAELALSLLQETPRNYELGDVVEAVRHSQDRAFLRRLLAQECAVCGWALPHNRMQALTSCECTICPDCFRQHFTIALKEKHITDMVCPACGRPDLTDDTQLLSYFSTLDIQLRESLEPDAYALFHKKLTEGVLMRDPKFLWCAQCSFGFIYEREQLEATCPQCHQTFCVRCKRQWEEQHRGRSCEDFQNWKRMNDPEYQAQGLAMYLQENGIDCPKCKFSYALARGGCMHFHCTQCRHQFCSGCYNAFYAKNKCPEPNCRVKKSLHGHHPRDCLFYLRDWTALRLQKLLQDNNVMFNTEPPAGARAVPGGGCRVIEQKEVPNGLRDEACGKETPAGYAGLCQAHYKEYLVSLINAHSLDPATLYEVEELETATERYLHVRPQPLAGEDPPAYQARLLQKLTEEVPLGQSIPRRRK

SEQ ID NO: 3666 - protein, 505 aa, Homo sapiens
MPGEEEERAFLVAREELASALRRDSGQAFSLEQLRPLLASSLPLAARYLQLDAARLVRCNAHGEPRNYLNTLPTPSWDGPDKQSLVRRLLAVYALPSWGRAELALSLLQETPRNYELGDVVEAVRHSQDRAFLRRLLAQECAVCGWALPHNRMQALTSCECTICPDCFRQHFTIALKEKHITDMVCPACGRPDLTDDTQLLSYFSTLDIQLRESLEPDAYALFHKKLTEGVLMRDPKFLWCAQCSFGFIYEREQLEATCPQCHQTFCVRCKRQWEDFQNWKRMNDPEYQAQGLAMYLQENGIDCPKCKFSYALARGGCMHFHCTQCRHQFCSGCYNAFYAKNKCPEPNCRVKKSLHGHHPRDCLFYLRDWTALRLQKLLQDNNVMFNTEPPAGARAVPGGGCRVIEQKEVPNGLRDEACGKETPAGYAGLCQAHYKEYLVSLINAHSLDPATLYEVEELETATERYLHVRPQPLAGEDPPAYQARLLQKLTEEVPLGQSIPRRRK

SEQ ID NO: 3667 - protein, 921 aa, Homo sapiens
MDLCTRAGEPSLTQNTHPRQQALEQLLEDKVEDDMLQLSEFDPLLREIAPGPLTTPSVPGSTPGPCFLCGSAPGTLHCPSCKQALCPACDHLFHGHPSRAHHLRQTLPGVLQGTHLSPSLPASAQPRPQSTSLLALGDSSLSSPNPASAHLPWHCAACAMLNEPWAVLCVACDRPRGCKGLGLGTEGPQGTGGLEPDLARGRWACQSCTFENEAAAVLCSICERPRLAQPPSLVVDSRDAGICLQPLQQGDALLASAQSQVWYCIHCTFCNSSPGWVCVMCNRTSSPIPAQHAPRPYASSLEKGPPKPGPPRRLSAPLPSSCGDPEKQRQDKMREEGLQLVSMIREGEAAGACPEEIFSALQYSGTEVPLQWLRSELPYVLEMVAELAGQQDPGLGAFSCQEARRAWLDRHGNLDEAVEECVRTRRRKVQELQSLGFGPEEGSLQALFQHGGDVSRALTELQRQRLEPFRQRLWDSGPEPTPSWDGPDKQSLVRRLLAVYALPSWGRAELALSLLQETPRNYELGDVVEAVRHSQDRAFLRRLLAQECAVCGWALPHNRMQALTSCECTICPDCFRQHFTIALKEKHITDMVCPACGRPDLTDDTQLLSYFSTLDIQLRESLEPDAYALFHKKLTEGVLMRDPKFLWCAQCSFGFIYEREQLEATCPQCHQTFCVRCKRQWEEQHRGRSCEDFQNWKRMNDPEYQAQGLAMYLQENGIDCPKCKFSYALARGGCMHFHCTQCRHQFCSGCYNAFYAKNKCPEPNCRVKKSLHGHHPRDCLFYLRDWTALRLQKLLQDNNVMFNTEPPAGARAVPGGGCRVIEQKEVPNGLRDEACGKETPAGYAGLCQAHYKEYLVSLINAHSLDPATLYEVEELETATERYLHVRPQPLAGEDPPAYQARLLQKLTEEVPLGQSIPRRRK

SEQ ID NO: 3668 - protein, 258 aa, Homo sapiens
MPPQQGDPAFPDRCEAPPVPPRRERGGRGGRGPGEPGGRGRAGGAEGRGVKCVLVGDGAVGKTSLVVSYTTNGYPTEYIPTAFDNFSAVVSVDGRPVRLQLCDTAGQDEFDKLRPLCYTNTDIFLLCFSVVSPSSFQNVSEKWVPEIRCHCPKAPIILVGTQSDLREDVKVLIELDKCKEKPVPEEAAKLCAEEIKAASYIECSALTQKNLKEVFDAAIVAGIQYSDTQQQPKKSKSRTPDKMKNLSKSWWKKYCCFV

SEQ ID NO: 3669 - protein, 197 aa, Homo sapiens
MTNIGVSYTTNGYPTEYIPTAFDNFSAVVSVDGRPVRLQLCDTAGQDEFDKLRPLCYTNTDIFLLCFSVVSPSSFQNVSEKWVPEIRCHCPKAPIILVGTQSDLREDVKVLIELDKCKEKPVPEEAAKLCAEEIKAASYIECSALTQKNLKEVFDAAIVAGIQYSDTQQQPKKSKSRTPDKMKNLSKSWWKKYCCFV

SEQ ID NO: 3670 - protein, 439 aa, Homo sapiens
MDPLSELQDDLTLDDTSEALNQLKLASIDEKNWPSDEMPDFPKSDDSKSSSPELVTHLKWDDPYYDIARHQIVEVAGDDKYGRKIIVFSACRMPPSHQLDHSKLLGYLKHTLDQYVESDYTLLYLHHGLTSDNKPSLSWLRDAYREFDRKYKKNIKALYIVHPTMFIKTLLILFKPLISFKFGQKIFYVNYLSELSEHVKLEQLGIPRQVLKYDDFLKSTQKSPATAPKPMPPRPPLPNQQFGVSLQHLQEKNPEQEPIPIVLRETVAYLQAHALTTEGIFRRSANTQVVREVQQKYNMGLPVDFDQYNELHLPAVILKTFLRELPEPLLTFDLYPHVVGFLNIDESQRVPATLQVLQTLPEENYQVLRFLTAFLVQISAHSDQNKMTNTNLAVVFGPNLLWAKDAAITLKAINPINTFTKFLLDHQGELFPSPDPSGL

SEQ ID NO: 3671 - protein, 567 aa, Homo sapiens
MLERRCRGPLAMGLAQPRLLSGPSQESPQTLGKESRGLRQQGTSVAQSGAQAPGRAHRCAHCRRHFPGWVALWLHTRRCQARLPLPCPECGRRFRHAPFLALHRQVHAAATPDLGFACHLCGQSFRGWVALVLHLRAHSAAKRPIACPKCERRFWRRKQLRAHLRRCHPPAPEARPFICGNCGRSFAQWDQLVAHKRVHVAEALEEAAAKALGPRPRGRPAVTAPRPGGDAVDRPFQCACCGKRFRHKPNLIAHRRVHTGERPHQCPECGKRFTNKPYLTSHRRIHTGEKPYPCKECGRRFRHKPNLLSHSKIHKRSEGSAQAAPGPGSPQLPAGPQESAAEPTPAVPLKPAQEPPPGAPPEHPQDPIEAPPSLYSCDDCGRSFRLERFLRAHQRQHTGERPFTCAECGKNFGKKTHLVAHSRVHSGERPFACEECGRRFSQGSHLAAHRRDHAPDRPFVCPDCGKAFRHKPYLAAHRRIHTGEKPYVCPDCGKAFSQKSNLVSHRRIHTGERPYACPDCDRSFSQKSNLITHRKSHIRDGAFCCAICGQTFDDEERLLAHQKKHDV

SEQ ID NO: 3672 - protein, 624 aa, Homo sapiens
MGIGVSLLLQFSLTPGGYRSVGRSRRCSRGSIPRNIPKRSWKKPHPQLCSLQAEEEPMLERRCRGPLAMGLAQPRLLSGPSQESPQTLGKESRGLRQQGTSVAQSGAQAPGRAHRCAHCRRHFPGWVALWLHTRRCQARLPLPCPECGRRFRHAPFLALHRQVHAAATPDLGFACHLCGQSFRGWVALVLHLRAHSAAKRPIACPKCERRFWRRKQLRAHLRRCHPPAPEARPFICGNCGRSFAQWDQLVAHKRVHVAEALEEAAAKALGPRPRGRPAVTAPRPGGDAVDRPFQCACCGKRFRHKPNLIAHRRVHTGERPHQCPECGKRFTNKPYLTSHRRIHTGEKPYPCKECGRRFRHKPNLLSHSKIHKRSEGSAQAAPGPGSPQLPAGPQESAAEPTPAVPLKPAQEPPPGAPPEHPQDPIEAPPSLYSCDDCGRSFRLERFLRAHQRQHTGERPFTCAECGKNFGKKTHLVAHSRVHSGERPFACEECGRRFSQGSHLAAHRRDHAPDRPFVCPDCGKAFRHKPYLAAHRRIHTGEKPYVCPDCGKAFSQKSNLVSHRRIHTGERPYACPDCDRSFSQKSNLITHRKSHIRDGAFCCAICGQTFDDEERLLAHQKKHDV

SEQ ID NO: 3673 - protein, 1748 aa, Homo sapiens
MNVMGFNTDRLAWTRNKLRGFYFAKLYYEAKEYDLAKKYVCTYLSVQERDPRAHRFLGLLYELEENTEKAVECYRRSLELNPPQKDLVLKIAELLCKNDVTDGRAKYWVERAAKLFPGSPAIYKLKEHLLDCEGEDGWNKLFDWIQSELYVRPDDVHMNIRLVELYRSNKRLKDAVARCHEAERNIALRSSLEWNSCVVQTLKEYLESLQCLESDKSDWRATNTDLLLAYANLMLLTLSTRDVQESRELLESFDSALQSAKSSLGGNDELSATFLEMKGHFYMHAGSLLLKMGQHGNNVQWQALSELAALCYVIAFQVPRPKIKLIKGEAGQNLLEMMACDRLSQSGHMLLNLSRGKQDFLKEVVETFANKSGQSVLYNALFSSQSSKDTSFLGSDDIGNIDVQEPELEDLARYDVGAIQAHNGSLQHLTWLGLQWNSLPALPGIRKWLKQLFHHLPQETSRLETNAPESICILDLEVFLLGVVYTSHLQLKEKCNSHHSSYQPLCLPLPVCKRLCTERQKSWWDAVCTLIHRKAVPGNSAELRLVVQHEINTLRAQEKHGLQPALLVHWAKCLQKMGRGLNSSYDQQEYIGRSVHYWKKVLPLLKIIKKNSIPEPIDPLFKHFHSVDIQASEIVEYEEDAHITFAILDAVHGNIEDAVTAFESIKSVVSYWNLALIFHRKAEDIENDAVFPEEQEECKNYLRKTRDYLIKIIDDSDSNLSVVKKLPVPLESVKEMLKSVMQELEDYSEGGPLYKNGSLRNADSEIKHSTPSPTKYSLSPSKSYKYSPKTPPRWAEDQNSLRKMICQEVKAITKLNSSKSASRHRWPTENYGPDSVPDGYQGSQTFHGAPLTVATTGPSVYYSQSPAYNSQYLLRPAANVTPTKGSSNTEFKSTKEGFSIAVSADGFKFGISEPGNQEKKSEKPLENDTGFQAQDISGQKNGRGVIFGQTSSTFTFADVAKSTSGEGFQFGKKDPNFKGFSGAGEKLFSSQCGKMANKANTSGDFEKDDDACKTEDSDDIHFEPVVQMPEKVELVTGEEGEKVLYSQGVKLFRFDAEISQWKERGLGNLKILKNEVNGKPRMLMRRDQVLKVCANHWITTTMNLKPLSGSDRAWMWLASDFSDGDAKLERLAAQFKTPELAEEFKQKFEECQRLLLDIPLQTPHKLVDTGRAAKLIQRAEEMKSGLKDFKTFLTNDQTKVTEEENKGSGTGAAGASDTTIKPNPENTGPTLEWDNYDLREDALDDNVSSSSVHDSPLASSPVRKNIFRFDESTTGFNFSFKSALSLSKSPAKLNQSGTSVGTDEESDVTQEEERDGQYFEPVVPLPDLVEVSSGEENEQVVFSHRAELYRYDKDVGQWKERGIGDIKILQNYDNKQVRIVMRRDQVLKLCANHRITPDMSLQNMKGTERVWVWTACDFADGERKVEHLAVRFKLQDVADSFKKIFDEAKTAQEKDSLITPHVSRSSTPRESPCGKIAVAVLEETTRERTDVIQGDDVADAASEVEVSSTSETTTKAVVSPPKFVFGSESVKRIFSSEKSNPFAFGNSSATGSLFGFSFNAPLKSNDSETSSVAQSGSESKVEPKKCELSKNSDIEQSSDSKVKNLSASFPMEESSINYTFKTPEKEPPLWHAEFTKEELVQKLSSTTKSADQLNGLLRETEATSAVLMEQIKLLKSEIRRLERNQEESAANVEHLKNVLLQFIFLKPGSERESLLPVINTMLQLSPEEKGKLAAVAQGLQETSIPKKK

SEQ ID NO: 3674 - protein, 946 aa, Homo sapiens
MAAHGKLRRERGLQAEYETQVKEMRWQLSEQLRCLELQGELRRELLQELAEFMRRRAEVELEYSRGLEKLAERFSSRGGRLGSSREHQSFRKEPSLLSPLHCWAVLLQHTRQQSRESAALSEVLAGPLAQRLSHIAEDVGRLVKKSRDLEQQLQDELLEVVSELQTAKKTYQAYHMESVNAEAKLREAERQEEKRAGRSVPTTTAGATEAGPLRKSSLKKGGRLVEKRQAKFMEHKLKCTKARNEYLLSLASVNAAVSNYYLHDVLDLMDCCDTGFHLALGQVLRSYTAAESRTQASQVQGLGSLEEAVEALDPPGDKAKVLEVHATVFCPPLRFDYHPHDGDEVAEICVEMELRDEILPRAQNIQSRLDRQTIETEEVNKTLKATLQALLEVVASDDGDVLDSFQTSPSTESLKSTSSDPGSRQAGRRRGQQQETETFYLTKLQEYLSGRSILAKLQAKHEKLQEALQRGDKEEQEVSWTQYTQRKFQKSRQPRPSSQYNQRLFGGDMEKFIQSSGQPVPLVVESCIRFINLNGLQHEGIFRVSGAQLRVSEIRDAFERGEDPLVEGCTAHDLDSVAGVLKLYFRSLEPPLFPPDLFGELLASSELEATAERVEHVSRLLWRLPAPVLVVLRYLFTFLNHLAQYSDENMMDPYNLAVCFGPTLLPVPAGQDPVALQGRVNQLVQTLIVQPDRVFPPLTSLPGPVYEKCMAPPSASCLGDAQLESLGADNEPELEAEMPAQEDDLEGVVEAVACFAYTGRTAQELSFRRGDVLRLHERASSDWWRGEHNGMRGLIPHKYITLPAGTEKQVVGAGLQTAGESGSSPEGLLASELVHRPEPCTSPEAMGPSGHRRRCLVPASPEQHVEVDKAVAQNMDSVFKELLGKTSVRQGLGPASTTSPSPGPRSPKAPPSSRLGRNKGFSRGPGAPASPSASHPQGLDTTPKPH

SEQ ID NO: 3675 - protein, 986 aa, Homo sapiens
MAAHGKLRRERGLQAEYETQVKEMRWQLSEQLRCLELQGELRRELLQELAEFMRRRAEVELEYSRGLEKLAERFSSRGGRLGSSREHQSFRKEPSLLSPLHCWAVLLQHTRQQSRESAALSEVLAGPLAQRLSHIAEDVGRLVKKSRDLEQQLQDELLEVVSELQTAKKTYQAYHMESVNAEAKLREAERQEEKRAGRSVPTTTAGATEAGPLRKSSLKKGGRLVEKLWPPQRPVAASSCAPVCWLQAGFLVHPPWWGAMCAPSTHQRQAKFMEHKLKCTKARNEYLLSLASVNAAVSNYYLHDVLDLMDCCDTGFHLALGQVLRSYTAAESRTQASQVQGLGSLEEAVEALDPPGDKAKVLEVHATVFCPPLRFDYHPHDGDEVAEICVEMELRDEILPRAQNIQSRLDRQTIETEEVNKTLKATLQALLEVVASDDGDVLDSFQTSPSTESLKSTSSDPGSRQAGRRRGQQQETETFYLTKLQEYLSGRSILAKLQAKHEKLQEALQRGDKEEQEVSWTQYTQRKFQKSRQPRPSSQYNQRLFGGDMEKFIQSSGQPVPLVVESCIRFINLNGLQHEGIFRVSGAQLRVSEIRDAFERGEDPLVEGCTAHDLDSVAGVLKLYFRSLEPPLFPPDLFGELLASSELEATAERVEHVSRLLWRLPAPVLVVLRYLFTFLNHLAQYSDENMMDPYNLAVCFGPTLLPVPAGQDPVALQGRVNQLVQTLIVQPDRVFPPLTSLPGPVYEKCMAPPSASCLGDAQLESLGADNEPELEAEMPAQEDDLEGVVEAVACFAYTGRTAQELSFRRGDVLRLHERASSDWWRGEHNGMRGLIPHKYITLPAGTEKQVVGAGLQTAGESGSSPEGLLASELVHRPEPCTSPEAMGPSGHRRRCLVPASPEQHVEVDKAVAQNMDSVFKELLGKTSVRQGLGPASTTSPSPGPRSPKAPPSSRLGRNKGFSRGPGAPASPSASHPQGLDTTPKPH

SEQ ID NO: 3676 - protein, 1758 aa, Homo sapiens
MSCSKAYGERYVASVQGSAPSPRKKSTRGFYFAKLYYEAKEYDLAKKYICTYINVREMDPRAHRFLGLLYELEENTEKAVECYRRSVELNPTQKDLVLKIAELLCKNDVTDGRAKYWVERAAKLFPGSPAIYKLKEQLLDCEGEDGWNKLFDLIQSELYVRPDDVHVNIRLVELYRSTKRLKDAVARCHEAERNIALRSSLEWNSCVVQTLKEYLESLQCLESDKSDWRATNTDLLLAYANLMLLTLSTRDVQESRELLESFDSALQSAKSSLGGNDELSATFLEMKGHFYMHAGSLLLKMGQHGNNVQWRALSELAALCYLIAFQVPRPKIKLIKGEAGQNLLEMMACDRLSQSGHMLLNLSRGKQDFLKVVVETFANKSGQSALYDALFSSQSPKDTSFLGSDDIGNIDVQEPELEDLARYDVGAIRAHNGSLQHLTWLGLQWNSLPALPGIRKWLKQLFHHLPQETSRLETNAPESICILDLEVFLLGVVYTSHLQLKEKCNSHHSSYQPLCLPLPVCKQLCTERQKSWWDAVCTLIHRKAVPGNSAKLRLLVQHEINTLRAQEKHGLQPALLVHWAKCLQKMGSGLNSFYDQREYIGRSVHYWKKVLPLLKIIKKKNSIPEPIDPLFKHFHSVDIQASEIVEYEEDAHVTFAILDAVNGNIEDAMTAFESIKSVVSYWNLALIFHRKAEDIANDALSPEEQEECKNYLRKTRGYLIKILDDSDSNLSVVKKLPVPLESVKEMLKSVMQELENYSEGDPLYKNGSLRNADSEIKHSTPSPTKYSLSPSKSYKYSPKTPPRWAEDQNSLLKMIRQEVKAIKEEMQELKLNSSKSASHHRWPTENYGPDSVPDGYQGSQTFHGAPLTVATTGPSVYYSQSPAYNSQYLLRPAANVTPTKGSSNTEFKSTKEGFSIPVSADGFKFGISEPGNQEKESEKPLENDTGFQAQDISGQKNGRGVIFGQTSSTFTFADVAKSTSGEGFQFGKKDPNFKGFSGAGEKLFSSQCGKMANKANTSGDFEKDDDAYKTEDSDDIHFEPVVQMPEKVELVIGEEGEKVLYSQGVKLFRFDAEVRQWKERGLGNLKILKNEVNGKPRMLMRREQVLKVCANHWITTTMNLKPLSGSDRAWMWSASDFSDGDAKLERLAAKFKTPELAEEFKQKFEECQQLLLDIPLQTPHKLVDTGRAAKLIQRAEEMKSGLKDFKTFLTNDQTKVTEEENKGSGTGAAGASDTTIKPNPENTGPTLEWDNCDLREDALDDSVSSSSVHASPLASSPVRKNLFHFGESTTGSNFSFKSALSPSKSPAKLNQSGTSVGTDEESDVTQEEERDGQYFEPVVPLPDLVEVSSGEENEKVVFSHRAELYRYDKDVGQWKERGIGDIKILQNYDNKQVRIVMRRDQVLKLCANHTITPDMSLQNMKGTERVWVWTACDFADGERKVEHLAVRFKLQDVADSFKKIFDEAKTAQEKDSLITPHVSRSSTPRESPCGKIAVAVLEETTRERTDVIQGDDVADAASEVEVSSTSETTTKAVVSPPKFVFGSESVKRIFSSEKSKPFAFGNSSATGSLFGFSFNASLKSNNSETSSVAQSGSESKVEPKKCELSKNSDIEQSSDSKVKNLSASFPMEESSINYTFKTPEKEPPLWHAEFTKEELVQKLSSTTKSADHLNGLLREAEATSAVLMEQIKLLKSEIRRLERNQEQEESAANVEHLKNVLLQFIFLKPGSERERLLPVINTMLQLSPEEKGKLAAVAQGEE

SEQ ID NO: 3677 - protein, 155 aa, Homo sapiens
MDPRAHRFLGLLYELEENTEKAVECYRRSVELNPTQKDLVLKIAELLCKNDVTDGRAKYWVERAAKLFPGSPAIYKLKEQLLDCEGEDGWNKLFDLIQSELYVRPDDVHVNIRLVELYRSTKRLKDAVARCHEAERNIALRSSLEWNSCVVQTLK

SEQ ID NO: 3678 - protein, 236 aa, Homo sapiens
MPPRELSEAEPPPLRAPTPPPRRRSAPPELGIKCVLVGDGAVGKSSLIVSYTCNGYPARYRPTALDTFSVQVLVDGAPVRIELWDTAGQEDFDRLRSLCYPDTDVFLACFSVVQPSSFQNITEKWLPEIRTHNPQAPVLLVGTQADLRDDVNVLIQLDQGGREGPVPQPQAQGLAEKIRACCYLECSALTQKNLKEVFDSAILSAIEHKARLEKKLNAKGVRTLSRCRWKKFFCFV

SEQ ID NO: 3679 - protein, 1765 aa, Homo sapiens
MRRSKADVERYVASVLGLTPSPRQKSMKGFYFAKLYYEAKEYDLAKKYICTYINVQERDPKAHRFLGLLYELEENTEKAVECYRRSVELNPTQKDLVLKIAELLCKNDVTDGRAKYWVERAAKLFPGSPAIYKLKEQLLDCEGEDGWNKLFDLIQSELYVRPDDVHVNIRLVELYRSTKRLKDAVAHCHEAERNIALRSSLEWNSCVVQTLKEYLESLQCLESDKSDWRATNTDLLLAYANLMLLTLSTRDVQENRELLESFDSALQSAKSSLGGNDELSATFLEMKGHFYMYAGSLLLKMGQHGNNVQWRALSELAALCYLIAFQVPRPKIKLREGKAGQNLLEMMACDRLSQSGHMLLSLSRGKQDFLKEVVETFANKIGQSALYDALFSSQSPKDTSFLGSDDIGKIDVQEPELEDLARYDVGAIRAHNGSLQHLTWLGLQWNSLPALPGIRKWLKQLFHRLPHETSRLETNAPESICILDLEVFLLGVVYTSHLQLKEKCNSHHSSYQPLCLPFPVCKQLCTERQKSWWDAVCTLIHRKAVPGNLAKLRLLVQHEINTLRAQEKHGLQPALLVHWAKYLQKTGSGLNSFYGQLEYIGRSVHYWKKVLPLLKIIKKNSIPEPIDPLFKHFHSVDIQASEIVEYEEDAHITFAILDAVNGNIEDAVTAFESIKSVVSYWNLALIFHRKAEDIENDALSPEEQEECRNYLTKTRDYLIKIIDDGDSNLSVVKKLPVPLESVKQMLNSVMQELEDYSEGGPLYKNGSLRNADSEIKHSTPSPTKYSLSPSKSYKYSPETPPRWTEDRNSLLNMICQQVEAIKKEMQELKLNSSKSASRHRWPTENYGPDSVPDGYQGSQTFHGAPLTVATTGPSVYYSQSPAYNSQYLLRPAANVTPTKGSSNTEFKSTKEGFSIPVSADGFKFGISEPGNQEKKREKPLENDTGLQAQDIRGRKKGRGVIFGQTSSTFTFADVAKSTSGEGFQFGKKDLNFKGFSGAGEKLFSSRYGKMANKANTSGDFEKDDDAYKTEDSDDIHFEPVVQMPEKVELVTGEEGEKVLYSQGVKLFRFDAEVRQWKERGLGNLKILKNEVNGKLRMLMRREQVLKVCANHWITTTMNLKPLSGSDRAWMWSASDFSDGDAKLERLAAKFKTPELAEEFKQKFEECQRLLLDIPLQTPHKLVDTGRAAKLIQRAEEMKSGLKDFKTFLTNDQTKVTEEENKGSGTGVAGASDTTIKPNAENTGPTLEWDNYDLREDALDDSVSSSSVHASPLASSPVRKNLFRFDESTTGSNFSFKSALSLSKSPAKLNQSGTSVGTDEESVVTQEEERDGQYFEPVVPLPDLVEVSSGEENEQVVFSHRAEIYRYDKDVGQWKERGIGDIKILQNYDNKQVRIVMRRDQVLKLCANHRITPDMSLQNMKGTERVWVWTACDFADGERKVEHLAVRFKLQDVADSFKKIFDEAKTAQEKDSLITPHVSRSSTPRESPCGKIAVAVLEEITRERTDVIQGDDVADAASEVEVSSTSETTTKAVVSPPKFVFVSESVKRIFSSEKSKPFAFGNSSATGSLFGFSFNAPLKSNNSETSSVAQSGSESKVEPKKCELSKNSDIEQSSDSKVKNLSASFPTEESSINYTFKTPEKEPPLWHAEFTKEELVQKLRSTTKSADHLNGLLREIEATNAVLMEQIKLLKSEIRRLERNQEREKSAANLEYLKNVLLQFIFLKPGSERERLLPVINTMLQLSPEEKGKLAAVAQDEEENPSRSSG

SEQ ID NO: 3680 - protein, 557 aa, Homo sapiens
MYKRNGLMASVLVTSATPQGSSSSDSLEGQSCDYASKSYDAVVFDVLKVTPEEFASQITLMDIPVFKAIQPEELASCGWSKKEKHSLAPNVVAFTRRFNQVSFWVVREILTAQTLKIRAEILSHFVKIAKKLLELNNLHSLMSVVSALQSAPIFRLTKTWALLNRKDKTTFEKLDYLMSKEDNYKRTREYIRSLKMVPSIPYLGIYLLDLIYIDSAYPASGSIMENEQRSNQMNNILRIIADLQVSCSYDHLTTLPHVQKYLKSVRYIEELQKFVEDDNYKLSLRIEPGSSSPRLVSSKEDLAGPSAGSGSARFSRRPTCPDTSVAGSLPTPPVPRHRKSHSLGNNMMCQLSVVESKSATFPSEKARHLLDDSVLESRSPRRGLALTSSSAVTNGLSLGSSESSEFSEEMSSGLESPTGPCICSLGNSAAVPTMEGPLRRKTLLKEGRKPALSSWTRYWVILSGSTLLYYGAKSLRGTDRKHYKSTPGKKVSIVGWMVQLPDDPEHPDIFQLNNPDKGNVYKFQTGSRFHAILWHKHLDDACKSNRPQVPANLMSFE

SEQ ID NO: 3681 - protein, 529 aa, Homo sapiens
MYKRNGLMASVLVTSATPQGSSSSDSLEGQSCDYASKSYDAVVFDVLKVTPEEFASQITLMDIPVFKAIQPEELASCGWSKKEKHSLAPNVVAFTRRFNQVSFWVVREILTAQTLKIRAEILSHFVKIAKKLLELNNLHSLMSVVSALQSAPIFRLTKTWALLNRKDKTTFEKLDYLMSKEDNYKRTREYIRSLKMVPSIPYLGIYLLDLIYIDSAYPASGSIMENEQRSNQMNNILRIIADLQVSCSYDHLTTLPHVQKYLKSVRYIEELQKFVEDDNYKLSLRIEPGSSSPRLVSSKEDLAGPSAGSGSARFSRRPTCPDTSVAGSLPTPPVPRHRKSHSLGNNRGRLYATLGPNWRVPVRNSPRTRSCVYSPTGPCICSLGNSAAVPTMEGPLRRKTLLKEGRKPALSSWTRYWVILSGSTLLYYGAKSLRGTDRKHVSIVGWMVQLPDDPEHPDIFQLNNPDKGNVYKFQTGSRFHAILWHKHLDDACKSNRPQEAGAAPGPTGTDSHEVDHLEGGAGKEAGPCA

SEQ ID NO: 3682 - protein, 384 aa, Homo sapiens
MYKRNGLMASVLVTSATPQGSSSSDSLEGQSCDYASKSYDAVVFDVLKVTPEEFASQITLMDIPVFKAIQPEELASCGWSKKEKHSLAPNVVAFTRRFNQVSFWVVREILTAQTLKIRAEILSHFVKIAKKLLELNNLHSLMSVVSALQSAPIFRLTKTWALLNRKDKTTFEKLDYLMSKEDNYKRTREYIRSLKMVPSIPYLGIYLLDLIYIDSAYPASGSIMENEQRSNQMNNILRIIADLQVSCSYDHLTTLPHVQKYLKSVRYIEELQKFVEDDNYKLSLRIEPGSSSPRLVSSKEDLAVSHLSSLSHQGQAEEARLKPTSGQHPAWMWPSSSRVPAAPPASAAPRSPWPRNLRNDQGQPGAVALTCNPSTLGSRSRRIT

SEQ ID NO: 3683 - protein, 305 aa, Homo sapiens
MYKRNGLMASVLVTSATPQGSSSSDSLEGQSCDYASKSYDAVVFDVLKVTPEEFASQITLMDIPVFKAIQPEELASCGWSKKEKHSLAPNVVAFTRRFNQVSFWVVREILTAQTLKIRAEILSHFVKIAKKLLELNNLHSLMSVVSALQSAPIFRLTKTWALLNRKDKTTFEKLDYLMSKEDNYKRTREYIRSLKMVPSIPYLGIYLLDLIYIDSAYPASGSIMENEQRSNQMNNILRIIADLQVSCSYDHLTTLPHVQKYLKSVRYIEELQKFVEDDNYKLSLRIEPGSSSPRLVSSKEDLAAM

SEQ ID NO: 3684 - protein, 213 aa, Homo sapiens
MYKRNGLMASVLVTSATPQGSSSSDSLEGQSCDYASKSYDAVVFDVLKVTPEEFASQITLMDIPVFKAIQPEELASCGWSKKEKHSLAPNVVAFTRRFNQVSFWVVREILTAQTLKIRAEILSHFVKIAKKLLELNNLHSLMSVVSALQSAPIFRLTKTWALLNRKDKTTFEKLDYLMSKEDNYKRTREYIRSLKMVPSIPYLGRSLNWLIFF

SEQ ID NO: 3685 - protein, 108 aa, Homo sapiens
MYKRNGLMASVLVTSATPQGSSSSDSLEGQSCDYASKSYDAVVFDVLKVTPEEFASQITLMDIPVFKAIQPEKGWPARMEDSLQKSTVSSRPHDTLQFRKTLPVGPGT

SEQ ID NO: 3686 - protein, 537 aa, Homo sapiens
MYKRNGLMASVLVTSATPQGSSSSDSLEGQSCDYASKSYDAVVFDVLKVTPEEFASQITLMDIPVFKAIQPEELASCGWSKKEKHSLAPNVVAFTRRFNQVSFWVVREILTAQTLKIRAEILSHFVKIAKKLLELNNLHSLMSVVSALQSAPIFRLTKTWALLNRKDKTTFEKLDYLMSKEDNYKRTREYIRSLKMVPSIPYLGIYLLDLIYIDSAYPASGSIMENEQRSNQMNNILRIIADLQVSCSYDHLTTLPHVQKYLKSVRYIEELQKFVEDDNYKLSLRIEPGSSSPRLVSSKEDLAGPSAGSGSARFSRRPTCPDTSVAGSLPTPPVPRHRKSHSLGNNRGRLYATLGPNWRVPVRNSPRTRSCVYSPTGPCICSLGNSAAVPTMEGPLRRKTLLKEGRKPALSSWTRYWVILSGSTLLYYGAKSLRGTDRKHYKSTPGKKVSIVGWMVQLPDDPEHPDIFQLNNPDKGNVYKFQTGSRFHAILWHKHLDDACKSNRPQEAGAAPGPTGTDSHEVDHLEGGAGKEAGPCA

SEQ ID NO: 3687 - protein, 796 aa, Homo sapiens
MEGLTLSDAEQKYYSDLFSYCDIESTKKVVVNGRVLELFRAAQLPNDVVLQIMELCGATRLGYFGRSQFYIALKLVAVAQSGFPLRVESINTVKDLPLPRFVASKNEQESRHAASYSSDSENQGSYSGVIPPPPGRGQVKKGSVSHDTVQPRTSADAQEPASPVVSPQQSPPTSPHTWRKHSRHPSGGNSERPLAGPGPFWSPFGEAQSGSSAGDAVWSGHSPPPPQENWVSFADTPPTSTLLTMHPASVQDQTTVRTVASATTAIEIRRQSSSYDDPWKITDEQRQYYVNQFKTIQPDLNGFIPGSAAKEFFTKSKLPILELSHIWELSDFDKDGALTLDEFCAAFHLVVARKNGYDLPEKLPESLMPKLIDLEDSADVGDQPGEVGYSGSPAEAPPSKSPSMPSLNQTWPELNQSSEQWETFSERSSSSQTLTQFDSNIAPADPDTAIVHPVPIRMTPSKIHMQEMELKRTGSDHTNPTSPLLVKPSDLLEENKINSSVKFASGNTVADGYSSSDSFTSDPEQIGSNVTRQRSHSGTSPDNTAPPPPPPRPQPSHSRSSSLDMNRTFTVTTGQQQAGVVAHPPAVPPRPQPSQAPGPAVHRPVDADGLITHTSTSPQQIPEQPNFADFSQFEVFAASNVNDEQDDEAEKHPEVLPAEKASDPASSLRVAKTDSKTEEKTAASAPANVSKGTTPLAPPPKPVRRRLKSEDELRPEVDEHTQKTGVLAAVLASQPSIPRSVGKDKKAIQASIRRNKETNTVLARLNSELQQQLKDVLEERISLEVQLEQLRPFSHL

SEQ ID NO: 3688 - protein, 705 aa, Homo sapiens
MEGLTLSDAEQKYYSDLFSYCDIESTKKVVVNGRVLELFRAAQLPNDVVLQIMELCGATRLGYFGRSQFYIALKLVAVAQSGFPLRVESINTVKDLPLPRFVASKNEQESRHAASYSSDSENQGSYSGVIPPPPGRGQVKKGSVSHDTVQPRTSADAQEPASPVVSPQQSPPTSPHTWRKHSRHPSGGNSERPLAGPGPFWSPFGEAQSGSSAGDAVWSGHSPPPPQENWVSFADTPPTSTLLTMHPASVQDQTTVRTVASATTAIEIRRQSSSYDDPWKITDEQRQYYVNQFKTIQPDLNGFIPGSAAKEFFTKSKLPILELSHIWELSDFDKDGALTLDEFCAAFHLVVARKNGYDLPEKLPESLMPKLIDLEDSADVGDQPGEVGYSGSPAEAPPSKSPSMPSLNQTWPELNQSSEDTAIVHPVPIRMTPSKIHMQEMELKRTGSDHTNPTSPLLVKPSDLLEENKINSSVKFASGNTVGQQQAGVVAHPPAVPPRPQPSQAPGPAVHRPVDADGLITHTSTSPQQIPEQPNFADFSQFEVFAASNVNDEQDDEAEKHPEVLPAEKASDPASSLRVAKTDSKTEEKTAASAPANVSKGTTPLAPPPKPVRRRLKSEDELRPEVDEHTQKTGVLAAVLASQPSIPRSVGKDKKAIQASIRRNKETNTVLARLNSELQQQLKDVLEERISLEVQLEQLRPFSHL

SEQ ID NO: 3689 - protein, 795 aa, Homo sapiens
MEGLTLSDAEQKYYSDLFSYCDIESTKKVVVNGRVLELFRAAQLPNDVVLQIMELCGATRLGYFGRSQFYIALKLVAVAQSGFPLRVESINTVKDLPLPRFVASKNEQESRHAASYSSDSENQGSYSGVIPPPPGRGQVKKGSVSHDTVQPRTSADAQEPASPVVSPQQSPPTSPHTWRKHSRHPSGGNSERPLAGPGPFWSPFGEAQSGSSAGDAVWSGHSPPPPQENWVSFADTPPTSTLLTMHPASVQDQTTVRTVASATTAIEIRRQSSSYDDPWKITDEQRQYYVNQFKTIQPDLNGFIPGSAAKEFFTKSKLPILELSHIWELSDFDKDGALTLDEFCAAFHLVVARKNGYDLPEKLPESLMPKLIDLEDSADVGDQPGEVGYSGSPAEAPPSKSPSMPSLNQTWPELNQSSEQWETFSERSSSSQTLTQFDSNIAPADPDTAIVHPVPIRMTPSKIHMQEMELKRTGSDHTNPTSPLLVKPSDLLEENKINSSVKFASGNTVDGYSSSDSFTSDPEQIGSNVTRQRSHSGTSPDNTAPPPPPPRPQPSHSRSSSLDMNRTFTVTTGQQQAGVVAHPPAVPPRPQPSQAPGPAVHRPVDADGLITHTSTSPQQIPEQPNFADFSQFEVFAASNVNDEQDDEAEKHPEVLPAEKASDPASSLRVAKTDSKTEEKTAASAPANVSKGTTPLAPPPKPVRRRLKSEDELRPEVDEHTQKTGVLAAVLASQPSIPRSVGKDKKAIQASIRRNKETNTVLARLNSELQQQLKDVLEERISLEVQLEQLRPFSHL

SEQ ID NO: 3690 - protein, 769 aa, Homo sapiens
MEGLTLSDAEQKYYSDLFSYCDIESTKKVVVNGRVLELFRAAQLPNDVVLQIMELCGATRLGYFGRSQFYIALKLVAVAQSGFPLRVESINTVKDLPLPRFVASKNEQESRHAASYSSDSENQGSYSGVIPPPPGRGQVKKGSVSHDTVQPRTSADAQEPASPVVSPQQSPPTSPHTWRKHSRHPSGGNSERPLAGPGPFWSPFGEAQSGSSAGDAVWSGHSPPPPQENWVSFADTPPTSTLLTMHPASVQDQTTVRTVASATTAIEIRRQSSSYDDPWKITDEQRQYYVNQFKTIQPDLNGFIPGSAAKEFFTKSKLPILELSHIWELSDFDKDGALTLDEFCAAFHLVVARKNGYDLPEKLPESLMPKLIDLEDSADVGDQPGEVGYSGSPAEAPPSKSPSMPSLNQTWPELNQSSEDTAIVHPVPIRMTPSKIHMQEMELKRTGSDHTNPTSPLLVKPSDLLEENKINSSVKFASGNTVADGYSSSDSFTSDPEQIGSNVTRQRSHSGTSPDNTAPPPPPPRPQPSHSRSSSLDMNRTFTVTTGQQQAGVVAHPPAVPPRPQPSQAPGPAVHRPVDADGLITHTSTSPQQIPEQPNFADFSQFEVFAASNVNDEQDDEAEKHPEVLPAEKASDPASSLRVAKTDSKTEEKTAASAPANVSKGTTPLAPPPKPVRRRLKSEDELRPEVDEHTQKTGVLAAVLASQPSIPRSVGKDKKAIQASIRRNKETNTVLARLNSELQQQLKDVLEERISLEVQLEQLRPFSHL

SEQ ID NO: 3691 - protein, 660 aa, Homo sapiens
MEAAAAAAAAAAAAAAAGGGCGSGPPPLLLSEGEQQCYSELFARCAGAAGGGPGSGPPEAARVAPGTATAAAGPVADLFRASQLPAETLHQITELCGAKRVGYFGPTQFYIALKLIAAAQSGLPVRIESIKCELPLPRFMMSKNDGEIRFGNPAELHGTKVQIPYLTTEKNSFKRMDDEDKQQETQSPTMSPLASPPSSPPHYQRVPLSHGYSKLRSSAEQMHPAPYEARQPLVQPEGSSSGGPGTKPLRHQASLIRSFSVERELQDNSSYPDEPWRITEEQREYYVNQFRSLQPDPSSFISGSVAKNFFTKSKLSIPELSYIWELSDADCDGALTLPEFCAAFHLIVARKNGYPLPEGLPPTLQPEYLQAAFPKPKWDCQLFDSYSESLPANQQPRDLNRMEKTSVKDMADLPVPNQDVTSDDKQALKSTINEALPKDVSEDPATPKDSNSLKARPRSRSYSSTSIEEAMKRGEDPPTPPPRPQKTHSRASSLDLNKVFQPSVPATKSGLLPPPPALPPRPCPSQSEQVSEAELLPQLSRAPSQAAESSPAKKDVLYSQPPSKPIRRKFRPENQATENQEPSTAASGPASAATMKPHPTVQKQSSKQKKAIQTAIRKNKEANAVLARLNSELQQQLKEVHQERIALENQLEQLRPVTVL

SEQ ID NO: 3692 - protein, 659 aa, Homo sapiens
MEAAAAAAAAAAAAAAAGGGCGSGPPPLLLSEGEQQCYSELFARCAGAAGGGPGSGPPEAARVAPGTATAAAGPVADLFRASQLPAETLHQITELCGAKRVGYFGPTQFYIALKLIAAAQSGLPVRIESIKCELPLPRFMMSKNDGEIRFGNPAELHGTKVQIPYLTTEKNSFKRMDDEDKQETQSPTMSPLASPPSSPPHYQRVPLSHGYSKLRSSAEQMHPAPYEARQPLVQPEGSSSGGPGTKPLRHQASLIRSFSVERELQDNSSYPDEPWRITEEQREYYVNQFRSLQPDPSSFISGSVAKNFFTKSKLSIPELSYIWELSDADCDGALTLPEFCAAFHLIVARKNGYPLPEGLPPTLQPEYLQAAFPKPKWDCQLFDSYSESLPANQQPRDLNRMEKTSVKDMADLPVPNQDVTSDDKQALKSTINEALPKDVSEDPATPKDSNSLKARPRSRSYSSTSIEEAMKRGEDPPTPPPRPQKTHSRASSLDLNKVFQPSVPATKSGLLPPPPALPPRPCPSQSEQVSEAELLPQLSRAPSQAAESSPAKKDVLYSQPPSKPIRRKFRPENQATENQEPSTAASGPASAATMKPHPTVQKQSSKQKKAIQTAIRKNKEANAVLARLNSELQQQLKEVHQERIALENQLEQLRPVTVL

SEQ ID NO: 3693 - protein, 583 aa, Homo sapiens
MDLMNGQASSVNIAATASEKSSSSESLSDKGSELKKSFDAVVFDVLKVTPEEYAGQITLMDVPVFKAIQPDELSSCGWNKKEKYSSAPNAVAFTRRFNHVSFWVVREILHAQTLKIRAEVLSHYIKTAKKLYELNNLHALMAVVSGLQSAPIFRLTKTWALLSRKDKTTFEKLEYVMSKEDNYKRLRDYISSLKMTPCIPYLGIYLSDLTYIDSAYPSTGSILENEQRSNLMNNILRIISDLQQSCEYDIPMLPHVQKYLNSVQYIEELQKFVEDDNYKLSLKIEPGTSTPRSAASREDLVGPEVGASPQSGRKSVAAEGALLPQTPPSPRNLIPHGHRKCHSLGYNFIHKMNTAEFKSATFPNAGPRHLLDDSVMEPHAPSRGQAESSTLSSGISIGSSDGSELSEETSWPAFERNRLYHSLGPVTRVARNGYRSHMKASSSAESEDLAVHLYPGAVTIQGVLRRKTLLKEGKKPTVASWTKYWAALCGTQLFYYAAKSLKATERKHFKSTSNKNVSVIGWMVMMADDPEHPDLFLLTDSEKGNSYKFQAGNRMNAMLWFKHLSAACQSNKQQVPTNLMTFE

SEQ ID NO: 3694 - protein, 279 aa, Homo sapiens
MDLMNGQASSVNIAATASEKSSSSESLSDKGSELKKSFDAVVFDVLKVTPEEYAGQITLMDVPVFKAIQPDELSSCGWNKKEKYSSAPNAVAFTRRFNHVSFWVVREILHAQTLKIRAEVLSHYIKTAKKLYELNNLHALMAVVSGLQSAPIFRLTKTWALLSRKDKTTFEKLEYVMSKEDNYKRLRDYISSLKMTPCIPYLGIYLSDLTYIDSAYPSTGSILENEQRSNLMNNILRIISDLQQSCEYDIPMLPHVQKYLNSVQYIEELQKFVEDDNYK

SEQ ID NO: 3695 - protein, 557 aa, Homo sapiens
MDLMNGQASSVNIAATASEKSSSSESLSDKGSELKKSFDAVVFDVLKVTPEEYAGQITLMDVPVFKAIQPDELSSCGWNKKEKYSSAPNAVAFTRRFNHVSFWVVREILHAQTLKIRAEVLSHYIKTAKKLYELNNLHALMAVVSGLQSAPIFRLTKTWALLSRKDKTTFEKLEYVMSKEDNYKRLRDYISSLKMTPCIPYLGIYLSDLTYIDSAYPSTGSILENEQRSNLMNNILRIISDLQQSCEYDIPMLPHVQKYLNSVQYIEELQKFVEDDNYKLSLKIEPGTSTPRSAASREDLVGPEVGASPQSGRKSVAAEGALLPQTPPSPRNLIPHGHRKCHSLGYNFIHKMNTAEFKSATFPNAGPRHLLDDSVMEPHAPSRGQAESSTLSSGISIGSSDGSELSEETSWPAFESSAESEDLAVHLYPGAVTIQGVLRRKTLLKEGKKPTVASWTKYWAALCGTQLFYYAAKSLKATERKHFKSTSNKNVSVIGWMVMMADDPEHPDLFLLTDSEKGNSYKFQAGNRMNAMLWFKHLSAACQSNKQQVPTNLMTFE

SEQ ID NO: 3696 - protein, 291 aa, Homo sapiens
MAETSALPTGFGELEVLAVGMVLLVEALSGLSLNTLTIFSFCKTPELRTPCHLLVLSLALADSGISLNALVAATSSLLRRWPYGSDGCQAHGFQGFVTALASICSSAAIAWGRYHHYCTRSQLAWNSAVSLVLFVWLSSAFWAALPLLGWGHYDYEPLGTCCTLDYSKGDRNFTSFLFTMSFFNFAMPLFITITSYSLMEQKLGKSGHLQVNTTLPARTLLLGWGPYAILYLYAVIADVTSISPKLQMVPALIAKMVPTINAINYALGNEMVCRGIWQCLSPQKREKDRTK

SEQ ID NO: 3697 - protein, 295 aa, Homo sapiens
MAETSALPTGFGELEVLAVGMVLLVEALSGLSLNTLTIFSFCKTPELRTPCHLLVLSLALADSGISLNALVAATSSLLRVSHRRWPYGSDGCQAHGFQGFVTALASICSSAAIAWGRYHHYCTRSQLAWNSAVSLVLFVWLSSAFWAALPLLGWGHYDYEPLGTCCTLDYSKGDRNFTSFLFTMSFFNFAMPLFITITSYSLMEQKLGKSGHLQVNTTLPARTLLLGWGPYAILYLYAVIADVTSISPKLQMVPALIAKMVPTINAINYALGNEMVCRGIWQCLSPQKREKDRTK

SEQ ID NO: 3698 - protein, 253 aa, Homo sapiens
MAETSALPTGFGELEVLAVGMVLLVEALSGLSLNTLTIFSFCKTPELRTPCHLLVLSLALADSGISLNALVAATSSLLRRWPYGSDGCQAHGFQGFVTALASICSSAAIAWGRYHHYCTRSQLAWNSAVSLVLFVWLSSAFWAALPLLGWGHYDYEPLGTCCTLDYSKGDRNFTSFLFTMSFFNFAMPLFITITSYSLMEQKLGKSGHLQVPALIAKMVPTINAINYALGNEMVCRGIWQCLSPQKREKDRTK

SEQ ID NO: 3699 - protein, 432 aa, Homo sapiens
MRPWALAVTRWPPSAPVGQRRFSAGPGSTPGQLWGSPGLEGPLASPPARDERLPSQQPPSRPPHLPVEERRASAPAGGSPRMLHPATQQSPFMVDLHEQVHQGPVPLSYTVTTVTTQGFPLPTGQHIPGCSAQQLPACSVMFSGQHYPLCCLPPPLIQACTMQQLPVPYQAYPHLISSDHYILHPPPPAPPPQPTHMAPLGQFVSLQTQHPRMPLQRLDNDVDLRGDQPSLGSFTYSTSAPGPALSPSVPLHYLPHDPLHQELSFGVPYSHMMPRRLSTQRYRLQQPLPPPPPPPPPPPYYPSFLPYFLSMLPMSPTAMGPTISLDLDVDDVEMENYEALLNLAERLGDAKPRGLTKADIEQLPSYRFNPDSHQSEQTLCVVCFSDFEARQLLRVLPCNHEFHTKCVDKWLKANRTCPICRADASEVPREAE

SEQ ID NO: 3700 - protein, 351 aa, Homo sapiens
MLHPATQQSPFMVDLHEQVHQGPVPLSYTVTTVTTQGFPLPTGQHIPGCSAQQLPACSVMFSGQHYPLCCLPPPLIQACTMQQLPVPYQAYPHLISSDHYILHPPPPAPPPQPTHMAPLGQFVSLQTQHPRMPLQRLDNDVDLRGDQPSLGSFTYSTSAPGPALSPSVPLHYLPHDPLHQELSFGVPYSHMMPRRLSTQRYRLQQPLPPPPPPPPPPPYYPSFLPYFLSMLPMSPTAMGPTISLDLDVDDVEMENYEALLNLAERLGDAKPRGLTKADIEQLPSYRFNPDSHQSEQTLCVVCFSDFEARQLLRVLPCNHEFHTKCVDKWLKANRTCPICRADASEVPREAE

SEQ ID NO: 3701 - protein, 1528 aa, Homo sapiens
MSVAIRKRSWEEHVTHWMGQPFNSDDRNTACHHGLVADSLQASMEKDATLNVDRKEKCVSLPDCCHGSELRDFPGRPMGHLSKDVDENDSHEGEDQFLSLEASTETLVHVSDEDNNADLCLTDDKQVLNTQGQKTSGQHMIQGAGSLEKALPIIQSNQVSSNSWGIAGETELALVKESGERKVTDSISKSLELCNEISLSEIKDAPKVNAVDTLNVKDIAPEKQLLNSAVIAQQRRKPDPPKDENERSTCNVVQNEFLDTPCTNRGLPLLKTDFGSCLLQPPSCPNGMSAENGLEKSGFSQHQNKSPPKVKAEDGMQCLQLKETLATQEPTDNQVRLRKRKEIREDRDRARLDSMVLLIMKLDQLDQDIENALSTSSSPSGTPTNLRRHVPDLESGSESGADTISVNQTRVNLSSDTESTDLPSSTPVANSGTKPKTTAIQGISEKEKAEIEAKEACDWLRATGFPQYAQLYEDFLFPIDISLVKREHDFLDRDAIEALCRRLNTLNKCAVMKLEISPHRKRSDDSDEDEPCAISGKWTFQRDSKRWSRLEEFDVFSPKQDLVPGSPDDSHPKDGPSPGGTLMDLSERQEVSSVRSLSSTGSLPSHAPPSEDAATPRTNSVISVCSSSNLAGNDDSFGSLPSPKELSSFSFSMKGHEKTAKSKTRSLLKRMESLKLKSSHHSKHKAPSKLGLIISGPILQEGMDEEKLKQLNCVEISALNGNRINVPMVRKRSVSNSTQTSSSSSQSETSSAVSTPSPVTRTRSLSACNKRVGMYLEGFDPFNQSTFNNVVEQNFKNRESYPEDTVFYIPEDHKPGTFPKALTNGSFSPSGNNGSVNWRTGSFHGPGHISLRRENSSDSPKELKRRNSSSSMSSRLSIYDNVPGSILYSSSGDLADLENEDIFPELDDILYHVKGMQRIVNQWSEKFSDEGDSDSALDSVSPCPSSPKQIHLDVDNDRTTPSDLDSTGNSLNEPEEPSEIPERRDSGVGASLTRSNRHRLRWHSFQSSHRPSLNSVSLQINCQSVAQMNLLQKYSLLKLTALLEKYTPSNKHGFSWAVPKFMKRIKVPDYKDRSVFGVPLTVNVQRTGQPLPQSIQQAMRYLRNHCLDQVGLFRKSGVKSRIQALRQMNEGAIDCVNYEGQSAYDVADMLKQYFRDLPEPLMTNKLSETFLQIYQYVPKDQRLQAIKAAIMLLPDENREVLQTLLYFLSDVTAAVKENQMTPTNLAVCLAPSLFHLNTLKRENSSPRVMQRKQSLGKPDQKDLNENLAATQGLAHMIAECKKLFQVPEEMSRCRNSYTEQELKPLTLEALGHLGNDDSADYQHFLQDCVDGLFKEVKEKFKGWVSYSTSEQAELSYKKVSEGPPLRLWRSVIEVPAVPEEILKRLLKEQHLWDVDLLDSKVIEILDSQTEIYQYVQNSMAPHPARDYVVLRTWRTNLPKGACALLLTSVDHDRAPVVGVRVNVLLSRYLIEPCGPGKSKLTYMCRVDLRGHMPEWYTKSFGHLCAAEVVKIRDSFSNQNTETKDTKSR

SEQ ID NO: 3702 - protein, 1091 aa, Homo sapiens
MCRKKPDTMILTQIEAKEACDWLRATGFPQYAQLYEDFLFPIDISLVKREHDFLDRDAIEALCRRLNTLNKCAVMKLEISPHRKRSDDSDEDEPCAISGKWTFQRDSKRWSRLEEFDVFSPKQDLVPGSPDDSHPKDGPSPGGTLMDLSERQEVSSVRSLSSTGSLPSHAPPSEDAATPRTNSVISVCSSSNLAGNDDSFGSLPSPKELSSFSFSMKGHEKTAKSKTRSLLKRMESLKLKSSHHSKHKAPSKLGLIISGPILQEGMDEEKLKQLNCVEISALNGNRINVPMVRKRSVSNSTQTSSSSSQSETSSAVSTPSPVTRTRSLSACNKRVGMYLEGFDPFNQSTFNNVVEQNFKNRESYPEDTVFYIPEDHKPGTFPKALTNGSFSPSGNNGSVNWRTGSFHGPGHISLRRENSSDSPKELKRRNSSSSMSSRLSIYDNVPGSILYSSSGDLADLENEDIFPELDDILYHVKGMQRIVNQWSEKFSDEGDSDSALDSVSPCPSSPKQIHLDVDNDRTTPSDLDSTGNSLNEPEEPSEIPERRDSGVGASLTRSNRHRLRWHSFQSSHRPSLNSVSLQINCQSVAQMNLLQKYSLLKLTALLEKYTPSNKHGFSWAVPKFMKRIKVPDYKDRSVFGVPLTVNVQRTGQPLPQSIQQAMRYLRNHCLDQVGLFRKSGVKSRIQALRQMNEGAIDCVNYEGQSAYDVADMLKQYFRDLPEPLMTNKLSETFLQIYQYVPKDQRLQAIKAAIMLLPDENREVLQTLLYFLSDVTAAVKENQMTPTNLAVCLAPSLFHLNTLKRENSSPRVMQRKQSLGKPDQKDLNENLAATQGLAHMIAECKKLFQVPEEMSRCRNSYTEQELKPLTLEALGHLGNDDSADYQHFLQDCVDGLFKEVKEKFKGWVSYSTSEQAELSYKKVSEGPPLRLWRSVIEVPAVPEEILKRLLKEQHLWDVDLLDSKVIEILDSQTEIYQYVQNSMAPHPARDYVVLRTWRTNLPKGACALLLTSVDHDRAPVVGVRVNVLLSRYLIEPCGPGKSKLTYMCRVDLRGHMPEWYTKSFGHLCAAEVVKIRDSFSNQNTETKDTKSR

SEQ ID NO: 3703 - protein, 498 aa, Homo sapiens
MSVAIRKRSWEEHVTHWMGQPFNSDDRNTACHHGLVADSLQASMEKDATLNVDRKEKCVSLPDCCHGSELRDFPGRPMGHLSKDVDENDSHEGEDQFLSLEASTETLVHVSDEDNNADLCLTDDKQVLNTQGQKTSGQHMIQGAGSLEKALPIIQSNQVSSNSWGIAGETELALVKESGERKVTDSISKSLELCNEISLSEIKDAPKVNAVDTLNVKDIAPEKQLLNSAVIAQQRRKPDPPKDENERSTCNVVQNEFLDTPCTNRGLPLLKTDFGSCLLQPPSCPNGMSAENGLEKSGFSQHQNKSPPKVKAEDGMQCLQLKETLATQEPTDNQVRLRKRKEIREDRDRARLDSMVLLIMKLDQLDQDIENALSTSSSPSGTPTNLRRHVPDLESGSESGADTISVNQTRVNLSSDTESTDLPSSTPVANSGTKPKTTAIQGISEKEKAAVKSVKLEVDEDKSTKGSNFSNSEVAIGLSPYTFPQKRLFHVAGEENIT

SEQ ID NO: 3704 - protein, 1017 aa, Homo sapiens
MKLEISPHRKRSDDSDEDEPCAISGKWTFQRDSKRWSRLEEFDVFSPKQDLVPGSPDDSHPKDGPSPGGTLMDLSERQEVSSVRSLSSTGSLPSHAPPSEDAATPRTNSVISVCSSSNLAGNDDSFGSLPSPKELSSFSFSMKGHEKTAKSKTRSLLKRMESLKLKSSHHSKHKAPSKLGLIISGPILQEGMDEEKLKQLNCVEISALNGNRINVPMVRKRSVSNSTQTSSSSSQSETSSAVSTPSPVTRTRSLSACNKRVGMYLEGFDPFNQSTFNNVVEQNFKNRESYPEDTVFYIPEDHKPGTFPKALTNGSFSPSGNNGSVNWRTGSFHGPGHISLRRENSSDSPKELKRRNSSSSMSSRLSIYDNVPGSILYSSSGDLADLENEDIFPELDDILYHVKGMQRIVNQWSEKFSDEGDSDSALDSVSPCPSSPKQIHLDVDNDRTTPSDLDSTGNSLNEPEEPSEIPERRDSGVGASLTRSNRHRLRWHSFQSSHRPSLNSVSLQINCQSVAQMNLLQKYSLLKLTALLEKYTPSNKHGFSWAVPKFMKRIKVPDYKDRSVFGVPLTVNVQRTGQPLPQSIQQAMRYLRNHCLDQVGLFRKSGVKSRIQALRQMNEGAIDCVNYEGQSAYDVADMLKQYFRDLPEPLMTNKLSETFLQIYQYVPKDQRLQAIKAAIMLLPDENREVLQTLLYFLSDVTAAVKENQMTPTNLAVCLAPSLFHLNTLKRENSSPRVMQRKQSLGKPDQKDLNENLAATQGLAHMIAECKKLFQVPEEMSRCRNSYTEQELKPLTLEALGHLGNDDSADYQHFLQDCVDGLFKEVKEKFKGWVSYSTSEQAELSYKKVSEGPPLRLWRSVIEVPAVPEEILKRLLKEQHLWDVDLLDSKVIEILDSQTEIYQYVQNSMAPHPARDYVVLRTWRTNLPKGACALLLTSVDHDRAPVVGVRVNVLLSRYLIEPCGPGKSKLTYMCRVDLRGHMPEWYTKSFGHLCAAEVVKIRDSFSNQNTETKDTKSR

SEQ ID NO: 3705 - protein, 463 aa, Homo sapiens
MSVAIRKRSWEEHVTHWMGQPFNSDDRNTACHHGLVADSLQASMEKDATLNVDRKEKCVSLPDCCHGSELRDFPGRPMGHLSKDVDENDSHEGEDQFLSLEASTETLVHVSDEDNNADLCLTDDKQVLNTQGQKTSGQHMIQGAGSLEKALPIIQSNQVSSNSWGIAGETELALVKESGERKVTDSISKSLELCNEISLSEIKDAPKVNAVDTLNVKDIAPEKQLLNSAVIAQQRRKPDPPKDENERSTCNVVQNEFLDTPCTNRGLPLLKTDFGSCLLQPPSCPNGMSAENGLEKSGFSQHQNKSPPKVKAEDGMQCLQLKETLATQEPTDNQVRLRKRKEIREDRDRARLDSMVLLIMKLDQLDQDIENALSTSSSPSGTPTNLRRHVPDLESGSESGADTISVNQTRVNLSSDTESTDLPSSTPVANSGTKPKTTAIQGISEKEKAGKLTFWFCFLANLF

SEQ ID NO: 3706 - protein, 1125 aa, Homo sapiens
MGDPKAHVMARPLRAPLRRSFSDHIRDSTARALDVIWKNTRDRRLAEIEAKEACDWLRATGFPQYAQLYEDFLFPIDISLVKREHDFLDRDAIEALCRRLNTLNKCAVMKLEISPHRKRSDDSDEDEPCAISGKWTFQRDSKRWSRLEEFDVFSPKQDLVPGSPDDSHPKDGPSPGGTLMDLSERQEVSSVRSLSSTGSLPSHAPPSEDAATPRTNSVISVCSSSNLAGNDDSFGSLPSPKELSSFSFSMKGHEKTAKSKTRSLLKRMESLKLKSSHHSKHKAPSKLGLIISGPILQEGMDEEKLKQLNCVEISALNGNRINVPMVRKRSVSNSTQTSSSSSQSETSSAVSTPSPVTRTRSLSACNKRVGMYLEGFDPFNQSTFNNVVEQNFKNRESYPEDTVFYIPEDHKPGTFPKALTNGSFSPSGNNGSVNWRTGSFHGPGHISLRRENSSDSPKELKRRNSSSSMSSRLSIYDNVPGSILYSSSGDLADLENEDIFPELDDILYHVKGMQRIVNQWSEKFSDEGDSDSALDSVSPCPSSPKQIHLDVDNDRTTPSDLDSTGNSLNEPEEPSEIPERRDSGVGASLTRSNRHRLRWHSFQSSHRPSLNSVSLQINCQSVAQMNLLQKYSLLKLTALLEKYTPSNKHGFSWAVPKFMKRIKVPDYKDRSVFGVPLTVNVQRTGQPLPQSIQQAMRYLRNHCLDQVGLFRKSGVKSRIQALRQMNEGAIDCVNYEGQSAYDVADMLKQYFRDLPEPLMTNKLSETFLQIYQYVPKDQRLQAIKAAIMLLPDENREVLQTLLYFLSDVTAAVKENQMTPTNLAVCLAPSLFHLNTLKRENSSPRVMQRKQSLGKPDQKDLNENLAATQGLAHMIAECKKLFQVPEEMSRCRNSYTEQELKPLTLEALGHLGNDDSADYQHFLQDCVDGLFKEVKEKFKGWVSYSTSEQAELSYKKVSEGPPLRLWRSVIEVPAVPEEILKRLLKEQHLWDVDLLDSKVIEILDSQTEIYQYVQNSMAPHPARDYVVLRTWRTNLPKGACALLLTSVDHDRAPVVGVRVNVLLSRYLIEPCGPGKSKLTYMCRVDLRGHMPEWYTKSFGHLCAAEVVKIRDSFSNQNTETKDTKSR

SEQ ID NO: 3707 - protein, 1639 aa, Homo sapiens
MAKDSPSPLGASPKKPGCSSPAAAVLENQRRELEKLRAELEAERAGWRAERRRFAARERQLREEAERERRQLADRLRSKWEAQRSRELRQLQEEMQREREAEIRQLLRWKEAEQRQLQQLLHRERDGVVRQARELQRQLAEELVNRGHCSRPGASEVSAAQCRCRLQEVLAQLRWQTDGEQAARIRYLQAALEVERQLFLKYILAHFRGHPALSGSPDPQAVHSLEEPLPQTSSGSCHAPKPACQLGSLDSLSAEVGVRSRSLGLVSSACSSSPDGLLSTHASSLDCFAPACSRSLDSTRSLPKASKSEERPSSPDTSTPGSRRLSPPPSPLPPPPPPSAHRKLSNPRGGEGSESQPCEVLTPSPPGLGHHELIKLNWLLAKALWVLARRCYTLQEENKQLRRAGCPYQADEKVKRLKVKRAELTGLARRLADRARELQETNLRAVSAPIPGESCAGLELCQVFARQRARDLSEQASAPLAKDKQIEELRQECHLLQARVASGPCSDLHTGRGGPCTQWLNVRDLDRLQRESQREVLRLQRQLMLQQGNGGAWPEAGGQSATCEEVRRQMLALERELDQRRRECQELGTQAAPARRRGEEAETQLQAALLKNAWLAEENGRLQAKTDWVRKVEAENSEVRGHLGRACQERDASGLIAEQLLQQAARGQDRQQQLQRDPQKALCDLHPSWKEIQALQCRPGHPPEQPWETSQMPESQVKGSRRPKFHARPEDYAVSQPNRDIQEKREASLEESPVALGESASVPQVSETVPASQPLSKKTSSQSNSSSEGSMWATVPSSPTLDRDTASEVDDLEPDSVSLALEMGGSAAPAAPKLKIFMAQYNYNPFEGPNDHPEGELPLTAGDYIYIFGDMDEDGFYEGELDDGRRGLVPSNFVEQIPDSYIPGCLPAKSPDLGPSQLPAGQDEALEEDSLLSGKAQGMVDRGLCQMVRVGSKTEVATEILDTKTEACQLGLLQSMGKQGLSRPLLGTKGVLRMAPMQLHLQNVTATSANITWVYSSHRHPHVVYLDDREHALTPAGVSCYTFQGLCPGTHYRVRVEVRLPWDLLQVYWGTMSSTVTFDTLLAGPPYPPLDVLVERHASPGVLVVSWLPVTIDSAGSSNGVQVTGYAVYADGLKVCEVADATAGSTVLEFSQLQVPLTWQKVSVRTMSLCGESLDSVPAQIPEDFFMCHRWPETPPFSYTCGDPSTYRVTFPVCPQKLSLAPPSAKASPHNPGSCGEPQAKFLEAFFEEPPRRQSPVSNLGSEGECPSSGAGSQAQELAEAWEGCRKDLLFQKSPQNHRPPSVSDQPGEKENCYQHMGTSKSPAPGFIHLRTECGPRKEPCQEKAALERVLRQKQDAQGFTPPQLGASQQYASDFHNVLKEEQEALCLDLRGTERREERREPEPHSRQGQALGVKRGCQLHEPSSALCPAPSAKVIKMPRGGPQQLGTGANTPARVFVALSDYNPLVMSANLKAAEEELVFQKRQLLRVWGSQDTHDFYLSECNRQVGNIPGRLVAEMEVGTEQTDRRWRSPAQGHLPSVAHLEDFQGLIIPQGSSLVLQGNSKRLPLWTPKIMIAALDYDPGDGQMGGQGKGRLALRAGDVVMVYGPMDDQGFYYGELGGHRGLVPAHLLDHMSLHGH

SEQ ID NO: 3708 - protein, 401 aa, Homo sapiens
MEPRRAAPGVPGWGSREAAGSASAAELVYHLAGALGTELQDLARRFGPEAAAGLVPLVVRALELLEQAAVGPAPDSLQVSAQPAEQELRRLREENERLRRELRAGPQEERALLRQLKEVTDRQRDELRAHNRDLRQRGQETEALQEQLQRLLLVNAELRHKLAAMQTQLRAAQDRERERQQPGEAATPQAKERARGQAGRPGHQHGQEPEWATAGAGAPGNPEDPAEAAQQLGRPSEAGQCRFSREEFEQILQERNELKAKVFLLKEELAYFQRELLTDHRVPGLLLEAMKVAVRKQRKKIKAKMLGTPEEAESSEDEAGPWILLSDDKGDHPPPPESKIQSFFGLWYRGKAESSEDETSSPAPSKLGGEEEAQPQSPAPDPPCSALHEHLCLGASAAPEA

SEQ ID NO: 3709 - protein, 191 aa, Homo sapiens
MGAAGAGAPGNPEDPAEAAQQLGRPSEAGQCRFSREEFEQILQERNELKAKVFLLKEELAYFQRELLTDHRVPGLLLEAMKVAVRKQRKKIKAKMLGTPEEAESSEDEAGPWILLSDDKGDHPPPPESKIQSFFGLWYRGKAESSEDETSSPAPSKLGGEEEAQPQSPAPDPPCSALHEHLCLGASAAPEA

SEQ ID NO: 3710 - protein, 1286 aa, Homo sapiens
MSHLVDPTSGDLPVRDIDAIPLVLPASKGKNMKTQPPLSRMNREELEDSFFRLREDHMLVKELSWKQQDEIKRLRTTLLRLTAAGRDLRVAEEAAPLSETARRGQKAGWRQRLSMHQRPQMHRLQGHFHCVGPASPRRAQPRVQVGHRQLHTAGAPVPEKPKRGPRDRLSYTAPPSFKEHATNENRGEVASKPSELVSGSNSIISFSSVISMAKPIGLCMPNSAHIMASNTMQVEEPPKSPEKMWPKDENFEQRSSLECAQKAAELRASIKEKVELIRLKKLLHERNASLVMTKAQLTEVQEAYETLLQKNQGILSAAHEALLKQVNELRAELKEESKKAVSLKSQLEDVSILQMTLKEFQERVEDLEKERKLLNDNYDKLLESMLDSSDSSSQPHWSNELIAEQLQQQVSQLQDQLDAELEDKRKVLLELSREKAQNEDLKLEVTNILQKHKQEVELLQNAATISQPPDRQSEPATHPAVLQENTQIEPSEPKNQEEKKLSQVLNELQVSHAETTLELEKTRDMLILQRKINVCYQEELEAMMTKADNDNRDHKEKLERLTRLLDLKNNRIKQLEGILRSHDLPTSEQLKDVAYGTRPLSLCLETLPAHGDEDKVDISLLHQGENLFELHIHQAFLTSAALAQAGDTQPTTFCTYSFYDFETHCTPLSVGPQPLYDFTSQYVMETDSLFLHYLQEASARLDIHQAMASEHSTLAAGWICFDRVLETVEKVHGLATLIGAGGEEFGVLEYWMRLRFPIKPSLQACNKRKKAQVYLSTDVLGGRKAQEEEFRSESWEPQNELWIEITKCCGLRSRWLGTQPSPYAVYRFFTFSDHDTAIIPASNNPYFRDQARFPVLVTSDLDHYLRREALSIHVFDDEDLEPGSYLGRARVPLLPLAKNESIKGDFNLTDPAEKPNGSIQVQLDWKFPYIPPESFLKPEAQTKGKDTKDSSKISSEEEKASFPSQDQMASPEVPIEAGQYRSKRKPPHGGERKEKEHQVVSYSRRKHGKRIGVQGKNRMEYLSLNILNGNTPEQVNYTEWKFSETNSFIGDGFKNQHEEEEMTLSHSALKQKEPLHPVNDKESSEQGSEVSEAQTTDSDDVIVPPMSQKYPKADSEKMCIEIVSLAFYPEAEVMSDENIKQVYVEYKFYDLPLSETETPVSLRKPRAGEEIHFHFSKVIDLDPQEQQGRRRFLFDMLNGQDPDQGHLKFTVVSDPLDEEKKECEEVGYAYLQLWQILESGRDILEQELDIVSPEDLATPIGRLKVSLQAAAVLHAIYKEMTEDLFS

SEQ ID NO: 3711 - protein, 669 aa, Homo sapiens
MTFQHLGENLFELHIHQAFLTSAALAQAGDTQPTTFCTYSFYDFETHCTPLSVGPQPLYDFTSQYVMETDSLFLHYLQEASARLDIHQAMASEHSTLAAGWICFDRVLETVEKVHGLATLIGAGGEEFGVLEYWMRLRFPIKPSLQACNKRKKAQVYLSTDVLGGRKAQEEEFRSESWEPQNELWIEITKCCGLRSRWLGTQPSPYAVYRFFTFSDHDTAIIPASNNPYFRDQARFPVLVTSDLDHYLRREALSIHVFDDEDLEPGSYLGRARVPLLPLAKNESIKGDFNLTDPAEKPNGSIQVQLDWKFPYIPPESFLKPEAQTKGKDTKDSSKISSEEEKASFPSQDQMASPEVPIEAGQYRSKRKPPHGGERKEKEHQVVSYSRRKHGKRIGVQGKNRMEYLSLNILNGNTPEQVNYTEWKFSETNSFIGDGFKNQHEEEEMTLSHSALKQKEPLHPVNDKESSEQGSEVSEAQTTDSDDVIVPPMSQKYPKADSEKMCIEIVSLAFYPEAEVMSDENIKQVYVEYKFYDLPLSETETPVSLRKPRAGEEIHFHFSKVIDLDPQEQQGRRRFLFDMLNGQDPDQGHLKFTVVSDPLDEEKKECEEVGYAYLQLWQILESGRDILEQELDIVSPEDLATPIGRLKVSLQAAAVLHAIYKEMTEDLFS

SEQ ID NO: 3712 - protein, 645 aa, Homo sapiens
MLLMAPDRCRYVWKHCQPMEMRIKWIFLCCIRPLYDFTSQYVMETDSLFLHYLQEASARLDIHQAMASEHSTLAAGWICFDRVLETVEKVHGLATLIGAGGEEFGVLEYWMRLRFPIKPSLQACNKRKKAQVYLSTDVLGGRKAQEEEFRSESWEPQNELWIEITKCCGLRSRWLGTQPSPYAVYRFFTFSDHDTAIIPASNNPYFRDQARFPVLVTSDLDHYLRREALSIHVFDDEDLEPGSYLGRARVPLLPLAKNESIKGDFNLTDPAEKPNGSIQVQLDWKFPYIPPESFLKPEAQTKGKDTKDSSKISSEEEKASFPSQDQMASPEVPIEAGQYRSKRKPPHGGERKEKEHQVVSYSRRKHGKRIGVQGKNRMEYLSLNILNGNTPEQVNYTEWKFSETNSFIGDGFKNQHEEEEMTLSHSALKQKEPLHPVNDKESSEQGSEVSEAQTTDSDDVIVPPMSQKYPKADSEKMCIEIVSLAFYPEAEVMSDENIKQVYVEYKFYDLPLSETETPVSLRKPRAGEEIHFHFSKVIDLDPQEQQGRRRFLFDMLNGQDPDQGHLKFTVVSDPLDEEKKECEEVGYAYLQLWQILESGRDILEQELDIVSPEDLATPIGRLKVSLQAAAVLHAIYKEMTEDLFS

SEQ ID NO: 3713 - protein, 612 aa, Homo sapiens
MLKLDNKDVISHPLGYPSESLLSIASMLDSSDSSSQPHWSNELIAEQLQQQVSQLQDQLDAELEDKRKVLLELSREKAQNEDLKLEVTNILQKHKQEVELLQNAATISQPPDRQSEPATHPAVLQENTQIEPSEPKNQEEKKLSQVLNELQVSHAETTLELEKTRDMLILQRKINVCYQEELEAMMTKADNDNRDHKEKLERLTRLLDLKNNRIKQLEGILRSHDLPTSGDFNLTDPAEKPNGSIQVQLDWKFPYIPPESFLKPEAQTKGKDTKDSSKISSEEEKASFPSQDQMASPEVPIEAGQYRSKRKPPHGGERKEKEHQVVSYSRRKHGKRIGVQGKNRMEYLSLNILNGNTPEQVNYTEWKFSETNSFIGDGFKNQHEEEEMTLSHSALKQKEPLHPVNDKESSEQGSEVSEAQTTDSDDVIVPPMSQKYPKADSEKMCIEIVSLAFYPEAEVMSDENIKQVYVEYKFYDLPLSETETPVSLRKPRAGEEIHFHFSKVIDLDPQEQQGRRRFLFDMLNGQDPDQGHLKFTVVSDPLDEEKKECEEVGYAYLQLWQILESGRDILEQELDIVSPEDLATPIGRLKVSLQAAAVLHAIYKEMTEDLFS

SEQ ID NO: 3714 - protein, 902 aa, Homo sapiens
MLDSSDSSSQPHWSNELIAEQLQQQVSQLQDQLDAELEDKRKVLLELSREKAQNEDLKLEVTNILQKHKQEVELLQNAATISQPPDRQSEPATHPAVLQENTQIEPSEPKNQEEKKLSQVLNELQVSHAETTLELEKTRDMLILQRKINVCYQEELEAMMTKADNDNRDHKEKLERLTRLLDLKNNRIKQLEGILRSHDLPTSEQLKDVAYGTRPLSLCLETLPAHGDEDKVDISLLHQGENLFELHIHQAFLTSAALAQAGDTQPTTFCTYSFYDFETHCTPLSVGPQPLYDFTSQYVMETDSLFLHYLQEASARLDIHQAMASEHSTLAAGWICFDRVLETVEKVHGLATLIGAGGEEFGVLEYWMRLRFPIKPSLQACNKRKKAQVYLSTDVLGGRKAQEEEFRSESWEPQNELWIEITKCCGLRSRWLGTQPSPYAVYRFFTFSDHDTAIIPASNNPYFRDQARFPVLVTSDLDHYLRREALSIHVFDDEDLEPGSYLGRARVPLLPLAKNESIKGDFNLTDPAEKPNGSIQVQLDWKFPYIPPESFLKPEAQTKGKDTKDSSKISSEEEKASFPSQDQMASPEVPIEAGQYRSKRKPPHGGERKEKEHQVVSYSRRKHGKRIGVQGKNRMEYLSLNILNGNTPEQVNYTEWKFSETNSFIGDGFKNQHEEEEMTLSHSALKQKEPLHPVNDKESSEQGSEVSEAQTTDSDDVIVPPMSQKYPKADSEKMCIEIVSLAFYPEAEVMSDENIKQVYVEYKFYDLPLSETETPVSLRKPRAGEEIHFHFSKVIDLDPQEQQGRRRFLFDMLNGQDPDQGHLKFTVVSDPLDEEKKECEEVGYAYLQLWQILESGRDILEQELDIVSPEDLATPIGRLKVSLQAAAVLHAIYKEMTEDLFS

SEQ ID NO: 3715 - protein, 581 aa, Homo sapiens
MLDSSDSSSQPHWSNELIAEQLQQQVSQLQDQLDAELEDKRKVLLELSREKAQNEDLKLEVTNILQKHKQEVELLQNAATISQPPDRQSEPATHPAVLQENTQIEPSEPKNQEEKKLSQVLNELQVSHAETTLELEKTRDMLILQRKINVCYQEELEAMMTKADNDNRDHKEKLERLTRLLDLKNNRIKQLEGILRSHDLPTSEQLKDVAYGTRPLSLCLETLPAHGDEDKVDISLLHQGENLFELHIHQAFLTSAALAQAGDTQPTTFCTYSFYDFETHCTPLSVGPQPLYDFTSQYVMETDSLFLHYLQEASARLDIHQAMASEHSTLAAGWICFDRVLETVEKVHGLATLIGAGGEEFGVLEYWMRLRFPIKPSLQACNKRKKAQVYLSTDVLGGRKAQEEEFRSESWEPQNELWIEITKCCGLRSRWLGTQPSPYAVYRFFTFSDHDTAIIPASNNPYFRDQARFPVLVTSDLDHYLRREALSIHVFDDEDLEPGSYLGRARVPLLPLAKNESIKGDFNLTDPAEKPNGSIQVQLDWKFPYIPPESFLKPEAQTKGKDTKDSSKISSEEEKASFPSQ

SEQ ID NO: 3716 - protein, 135 aa, Homo sapiens
MPVDFTGYWKMLVNENFEEYLRALDVNVALRKIANLLKPDKEIVQDGDHMIIRTLSTFRNYIMDFQVGKEFEEDLTGIDDRKCMTTVSWDGDKLQCVQKGEKEGRGWTQWIEGDELHLEMRVEGVVCKQVFKKVQ

SEQ ID NO: 3717 - protein, 153 aa, Homo sapiens
MDPPAGFVRAGNPAVAAPQSPLSPEGAHFRAAHHPRSTGSRCPGSLQPSRPLVANWLQSLPEMPVDFTGYWKMLVNENFEEYLRALDVNVALRKIANLLKPDKEIVQDGDHMIIRTLSTFRNYIMDFQVGKEFEEDLTGIDDRKCMSETGFSS

SEQ ID NO: 3718 - protein, 157 aa, Homo sapiens
MDPPAGFVRAGNPAVAAPQSPLSPEGAHFRAAHHPRSTGSRCPGSLQPSRPLVANWLQSLPEMPVDFTGYWKMLVNENFEEYLRALDVNVALRKIANLLKPDKEIVQDGDHMIIRTLSTFRNYIMDFQVGKEFEEDLTGIDDRKCMAGVQSRDLSSL

SEQ ID NO: 3719 - protein, 547 aa, Homo sapiens
MGGCIPFLKAARALCPRIMPPLLLLSAFIFLVSVLGGAPGHNPDRRTKMVSIHSLSELERLKLQETAYHELVARHFLSEFKPDRALPIDRPNTLDKWFLILRGQQRAVSHKTFGISLEEVLVNEFTRRKHLELTATMQVEEATGQAAGRRRGNVVRRVFGRIRRFFSRRRNEPTLPREFTRRGRRGAVSVDSLAELEDGALLLQTLQLSKISFPIGQRLLGSKRKMSLNPIAKQIPQVVEACCQFIEKHGLSAVGIFTLEYSVQRVRQLREEFDQGLDVVLDDNQNVHDVAALLKEFFRDMKDSLLPDDLYMSFLLTATLKPQDQLSALQLLVYLMPPCHSDTLERLLKALHKITENCEDSIGIDGQLVPGNRMTSTNLALVFGSALLKKGKFGKRESRKTKLGIDHYVASVNVVRAMIDNWDVLFQVPPHIQRQVAKRVWKSSPEALDFIRRRNLRKIQSARIKMEEDALLSDPVETSAEARAAVLAQSKPSDEGSSEEPAVPSGTARSHDDEEGAGNPPIPEQDRPLLRVPREKEAKTGVSYFFP

SEQ ID NO: 3720 - protein, 516 aa, Homo sapiens
MSVLGGAPGHNPDRRTKMVSIHSLSELERLKLQETAYHELVARHFLSEFKPDRALPIDRPNTLDKWFLILRGQQRAVSHKTFGISLEEVLVNEFTRRKHLELTATMQVEEATGQAAGRRRGNVVRRVFGRIRRFFSRRRNEPTLPREFTRRGRRGAVSVDSLAELEDGALLLQTLQLSKISFPIGQRLLGSKRKMSLNPIAKQIPQVVEACCQFIEKHGLSAVGIFTLEYSVQRVRQLREEFDQGLDVVLDDNQNVHDVAALLKEFFRDMKDSLLPDDLYMSFLLTATLKPQDQLSALQLLVYLMPPCHSDTLERLLKALHKITENCEDSIGIDGQLVPGNRMTSTNLALVFGSALLKKGKFGKRESRKTKLGIDHYVASVNVVRAMIDNWDVLFQVPPHIQRQVAKRVWKSSPEALDFIRRRNLRKIQSARIKMEEDALLSDPVETSAEARAAVLAQSKPSDEGSSEEPAVPSGTARSHDDEEGAGNPPIPEQDRPLLRVPREKEAKTGVSYFFP

SEQ ID NO: 3721 - protein, 411 aa, Homo sapiens
MQVEEATGQAAGRRRGNVVRRVFGRIRRFFSRRRNEPTLPREFTRRGRRGAVSVDSLAELEDGALLLQTLQLSKISFPIGQRLLGSKRKMSLNPIAKQIPQVVEACCQFIEKHGLSAVGIFTLEYSVQRVRQLREEFDQGLDVVLDDNQNVHDVAALLKEFFRDMKDSLLPDDLYMSFLLTATLKPQDQLSALQLLVYLMPPCHSDTLERLLKALHKITENCEDSIGIDGQLVPGNRMTSTNLALVFGSALLKKGKFGKRESRKTKLGIDHYVASVNVVRAMIDNWDVLFQVPPHIQRQVAKRVWKSSPEALDFIRRRNLRKIQSARIKMEEDALLSDPVETSAEARAAVLAQSKPSDEGSSEEPAVPSGTARSHDDEEGAGNPPIPEQDRPLLRVPREKEAKTGVSYFFP

SEQ ID NO: 3722 - protein, 535 aa, Homo sapiens
MAWILDCLFASAFEPRPRRVSVLGGAPGHNPDRRTKMVSIHSLSELERLKLQETAYHELVARHFLSEFKPDRALPIDRPNTLDKWFLILRGQQRAVSHKTFGISLEEVLVNEFTRRKHLELTATMQVEEATGQAAGRRRGNVVRRVFGRIRRFFSRRRNEPTLPREFTRRGRRGAVSVDSLAELEDGALLLQTLQLSKISFPIGQRLLGSKRKMSLNPIAKQIPQVVEACCQFIEKHGLSAVGIFTLEYSVQRVRQLREEFDQGLDVVLDDNQNVHDVAALLKEFFRDMKDSLLPDDLYMSFLLTATLKPQDQLSALQLLVYLMPPCHSDTLERLLKALHKITENCEDSIGIDGQLVPGNRMTSTNLALVFGSALLKKGKFGKRESRKTKLGIDHYVASVNVVRAMIDNWDVLFQVPPHIQRQVAKRVWKSSPEALDFIRRRNLRKIQSARIKMEEDALLSDPVETSAEARAAVLAQSKPSDEGSSEEPAVPSGTARSHDDEEGAGNPPIPEQDRPLLRVPREKEAKTGVSYFFP

SEQ ID NO: 3723 - protein, 499 aa, Homo sapiens
MVSIHSLSELERLKLQETAYHELVARHFLSEFKPDRALPIDRPNTLDKWFLILRGQQRAVSHKTFGISLEEVLVNEFTRRKHLELTATMQVEEATGQAAGRRRGNVVRRVFGRIRRFFSRRRNEPTLPREFTRRGRRGAVSVDSLAELEDGALLLQTLQLSKISFPIGQRLLGSKRKMSLNPIAKQIPQVVEACCQFIEKHGLSAVGIFTLEYSVQRVRQLREEFDQGLDVVLDDNQNVHDVAALLKEFFRDMKDSLLPDDLYMSFLLTATLKPQDQLSALQLLVYLMPPCHSDTLERLLKALHKITENCEDSIGIDGQLVPGNRMTSTNLALVFGSALLKKGKFGKRESRKTKLGIDHYVASVNVVRAMIDNWDVLFQVPPHIQRQVAKRVWKSSPEALDFIRRRNLRKIQSARIKMEEDALLSDPVETSAEARAAVLAQSKPSDEGSSEEPAVPSGTARSHDDEEGAGNPPIPEQDRPLLRVPREKEAKTGVSYFFP

SEQ ID NO: 3724 - protein, 1221 aa, Homo sapiens
MLRSTGFFRAIDCPYWSGAPGGPCRRPYCHFRHRGARGSGAPGDGGEAPPAAGLGYDPYNPELPKPPAQRENGTLGLGEEPRPDVLELELVNQAIEAVRSEVELEQRRYRELLETTREHRSAEAPALAPRGPNASPTVGPDEDAFPLAFDYSPGSHGLLSPDAGYQPTPLAAPAEPGSKYSLASLDRGQGRGGGGGGALEYVPKAVSQPRRHSRPVPSGKYVVDNSRPPTDLEYDPLSNYSARHLSRASSRDERAAKRPRGSRGSEPYTPAPKKLCDPFGSCDARFSDSEDEAATVPGNEPTTASTPKARADPEIKATGQPPSKEGLEAEGGGLRETKETAVQCDVGDLQPPPAKPASPAQVQSSQDGGCPKEGKPKKKKTGAPPAPSCKDGAQGKDKTKDKGRGRPVEKPRADKKGPQASSPRRKAERPEGTKKKPSSATPVATSGKGRPDRPARRPSPTSGDSRPAAGRGPPRPLQLPDRKSTKAPSGKLVERKARSLDEGASQDAPKLKKRALSHADLFGDESEDEAAGPGVPSVWPSALPSLSSDSDSDSDSSLGFPEAQGPPKRLKASPPPSPAPSSSSSSSSSTSSAGADVDYSALEKEVDFDSDPMEECLRIFNESTSVKTEDRGRLARQPPKEEKSEEKGLSGLTTLFPGQKRRISHLSKQGQEVEPPRRGPAVPPARPPTAQEVCYLRAQQAQRASASLLQAPARLAEKSPSVHISAPGEKRRIAHIPNPRLAAAPTGAKRTLAASGSQSSNGPEPGGQQLKTRTLSGMASKTTTTIIPKRIAHSPSLQSLKKPIIPKEFGGKVPTVIRQRYLNLFIEECLKFCTSNQEAIEKALNEEKVAYDRSPSKNIYLNVAVNTLKKLRGLAPSAVPGLSKTSGRRVVSHEVVLGGRLAAKTSFSLSRPSSPRVEDLKGAALYSRLREYLLTQDQLKENGYPFPHPERPGGAIIFTAEEKRPKDSSCRTCCRCGTEYLVSSSGRCIRDEECYYHWGRLRRNRVAGGWETQYMCCSAAAGSVGCQVAKQHVQDGRKERLEGFVKTFEKELSGDTHPGIYALDCEMSYTTYGLELTRVTVVDTDVHVVYDTFVKPDNEIVDYNTRFSGVTEADLADTSVTLRDVQAVLLSMFSADTILIGHSLESDLLALKVIHSTVVDTSVLFPHRLGLPYKRSLRNLMADYLRQIIQDNVDGHSSSEDAGACMHLVIWKVREDAKTKR

SEQ ID NO: 3725 - protein, 1494 aa, Homo sapiens
MYSEWRSLHLVIQNDQGHTSVLHSYPESVGREVANAVVRPLGQVLGTPSVAGSENLLKTDKEVKWTMEVICYGLTLPLDGETVKYCVDVYTDWIMALVLPKDSIPLPVIKEPNQYVQTILKHLQNLFVPRQEQGSSQIRLCLQVLRAIQKLARESSLMARETWEVLLLFLLQINDILLAPPTVQGGIAENLAEKLIGVLFEVWLLACTRCFPTPPYWKTAKEMVANWRHHPAVVEQWSKVICALTSRLLRFTYGPSFPAFKVPDEDASLIPPEMDNECVAQTWFRFLHMLSNPVDLSNPAIISSTPKFQEQFLNVSGMPQELNQYPCLKHLPQIFFRAMRGISCLVDAFLGISRPRSDSAPPTPVNRLSMPQSAAVSTTPPHNRRHRAVTVNKATMKTSTVSTAHASKVQHQTSSTSPLSSPNQTSSEPRPLPAPRRPKVNSILNLFGSWLFDAAFVHCKLHNGINRDSSMTAITTQASMEFRRKGSQMSTDTMVSNPMFDASEFPDNYEAGRAEACGTLCRIFCSKKTGEEILPAYLSRFYMLLIQGLQINDYVCHPVLASVILNSPPLFCCDLKGIDVVVPYFISALETILPDRELSKFKSYVNPTELRRSSINILLSLLPLPHHFGTVKSEVVLEGKFSNDDSSSYDKPITFLSLKLRLVNILIGALQTETDPNNTQMILGAMLNIVQDSALLEAIGCQMEMGGGENNLKSHSRTNSGISSASGGSTEPTTPDSERPAQALLRDYALNTDSAAGLLIRSIHLVTQRLNSQWRQDMSISLAALELLSGLAKVKVMVDSGDRKRAISSVCTYIVYQCSRPAPLHSRDLHSMIVAAFQCLCVWLTEHPDMLDEKDCLKEVLEIVELGISGSKSKNNEQEVKYKGDKEPNPASMRVKDAAEATLTCIMQLLGAFPSPSGPASPCSLVNETTLIKYSRLPTINKHSFRYFVLDNSVILAMLEQPLGNEQNDFFPSVTVLVRGMSGRLAWAQQLCLLPRGAKANQKLFVPEPRPVPKNDVGFKYSVKHRPFPEEVDKIPFVKADLSIPDLHEIVTEELEERHEKLRSGMAQQIAYEIHLEQQSEEELQKRSFPDPVTDCKPPPPAQEFQTARLFLSHFGFLSLEALKEPANSRLPPHLIALDSTIPGFFDDIGYLDLLPCRPFDTVFIFYMKPGQKTNQEILKNVESSRTVQPHFLEFLLSLGWSVDVGRHPGWTGHVSTSWSINCCDDGEGSQQEVISSEDIGASIFNGQKKVLYYADALTEIAFVVPSPVESLTDSLESNISDQDSDSNMDLMPGILKQPSLTLELFPNHTDNLNSSQRLSPSSRMRKLPQGRPVPPLGPETRVSVVWVERYDDIENFPLSELMTEISTGVETTANSSTSLRSTTLEKEVPVIFIHPLNTGLFRIKIQGATGKFNMVIPLVDGMIVSRRALGFLVRQTVINICRRKRLESDSYSPPHVRRKQKITDIVNKYRNKQLEPEFYTSLFQEVGLKNCSS

SEQ ID NO: 3726 - protein, 1273 aa, Homo sapiens
MVANWRHHPAVVEQWSKVICALTSRLLRFTYGPSFPAFKVPDEDASLIPPEMDNECVAQTWFRFLHMLSNPVDLSNPAIISSTPKFQEQFLNVSGMPQELNQYPCLKHLPQIFFRAMRGISCLVDAFLGISRPRSDSAPPTPVNRLSMPQSAAVSTTPPHNRRHRAVTVNKATMKTSTVSTAHASKVQHQTSSTSPLSSPNQTSSEPRPLPAPRRPKVNSILNLFGSWLFDAAFVHCKLHNGINRDSSMTAITTQASMEFRRKGSQMSTDTMVSNPMFDASEFPDNYEAGRAEACGTLCRIFCSKKTGEEILPAYLSRFYMLLIQGLQINDYVCHPVLASVILNSPPLFCCDLKGIDVVVPYFISALETILPDRELSKFKSYVNPTELRRSSINILLSLLPLPHHFGTVKSEVVLEGKFSNDDSSSYDKPITFLSLKLRLVNILIGALQTETDPNNTQMILGAMLNIVQDSALLEAIGCQMEMGGGENNLKSHSRTNSGISSASGGSTEPTTPDSERPAQALLRDYALNTDSAAGLLIRSIHLVTQRLNSQWRQDMSISLAALELLSGLAKVKVMVDSGDRKRAISSVCTYIVYQCSRPAPLHSRDLHSMIVAAFQCLCVWLTEHPDMLDEKDCLKEVLEIVELGISGSKSKNNEQEVKYKGDKEPNPASMRVKDAAEATLTCIMQLLGAFPSPSGPASPCSLVNETTLIKYSRLPTINKHSFRYFVLDNSVILAMLEQPLGNEQNDFFPSVTVLVRGMSGRLAWAQQLCLLPRGAKANQKLFVPEPRPVPKNDVGFKYSVKHRPFPEEVDKIPFVKADLSIPDLHEIVTEELEERHEKLRSGMAQQIAYEIHLEQQSEEELQKRSFPDPVTDCKPPPPAQEFQTARLFLSHFGFLSLEALKEPANSRLPPHLIALDSTIPGFFDDIGYLDLLPCRPFDTVFIFYMKPGQKTNQEILKNVESSRTVQPHFLEFLLSLGWSVDVGRHPGWTGHVSTSWSINCCDDGEGSQQEEVISSEDIGASIFNGQKKVLYYADALTEIAFVVPSPVESLTDSLESNISDQDSDSNMDLMPGILKQPSLTLELFPNHTDNLNSSQRLSPSSRMRKLPQGRPVPPLGPETRVSVVWVERYDDIENFPLSELMTEISTGVETTANSSTSLRSTTLEKEVPVIFIHPLNTGLFRIKIQGATGKFNMVIPLVDGMIVSRRALGFLVRQTVINICRRKRLESDSYSPPHVRRKQKITDIVNKYRNKQLEPEFYTSLFQEVGLKNCSS

SEQ ID NO: 3727 - protein, 1491 aa, Homo sapiens
MYSEWRSLHLVIQNDQGHTSVLHSYPESVGREVANAVVRPLGQVLGTPSVAGSENLLKTDKEVKWTMEVICYGLTLPLDGETVKYCVDVYTDWIMALVLPKDSIPLPVIKEPNQYVQTILKHLQNLFVPRQEQGSSQIRLCLQVLRAIQKLARESSLMARETWEVLLLFLLQINDILLAPPTVQGGIAENLAEKLIGVLFEVWLLACTRCFPTPPYWKTAKEMVANWRHHPAVVEQWSKVICALTSRLLRFTYGPSFPAFKVPDEDASLIPPEMDNECVAQTWFRFLHMLSNPVDLSNPAIISSTPKFQEQFLNVSGMPQELNQYPCLKHLPQIFFRAMRGISCLVDAFLGISRPRSDSAPPTPVNRLSMPQSAAVSTTPPHNRRHRAVTVNKATMKTSTVSTAHASKVQHQTSSTSPLSSPNQTSSEPRPLPAPRRPKVNSILNLFGSWLFDAAFVHCKLHNGINRDSSMTAITTQASMEFRRKGSQMSTDTMVSNPMFDASEFPDNYEAGRAEACGTLCRIFCSKKTGEEILPAYLSRFYMLLIQGLQINDYVCHPVLASVILNSPPLFCCDLKGIDVVVPYFISALETILPDRELSKFKSYVNPTELRRSSINILLSLLPLPHHFGTVKSEVVLEGKFSNDDSSSYDKPITFLSLKLRLVNILIGALQTETDPNNTQMILGAMLNIVQDSALLEAIGCQMEMGGGENNLKSHSRTNSGISSASGGSTEPTTPDSERPAQALLRDYDSAAGLLIRSIHLVTQRLNSQWRQDMSISLAALELLSGLAKVKVMVDSGDRKRAISSVCTYIVYQCSRPAPLHSRDLHSMIVAAFQCLCVWLTEHPDMLDEKDCLKEVLEIVELGISGSKSKNNEQEVKYKGDKEPNPASMRVKDAAEATLTCIMQLLGAFPSPSGPASPCSLVNETTLIKYSRLPTINKHSFRYFVLDNSVILAMLEQPLGNEQNDFFPSVTVLVRGMSGRLAWAQQLCLLPRGAKANQKLFVPEPRPVPKNDVGFKYSVKHRPFPEEVDKIPFVKADLSIPDLHEIVTEELEERHEKLRSGMAQQIAYEIHLEQQSEEELQKRSFPDPVTDCKPPPPAQEFQTARLFLSHFGFLSLEALKEPANSRLPPHLIALDSTIPGFFDDIGYLDLLPCRPFDTVFIFYMKPGQKTNQEILKNVESSRTVQPHFLEFLLSLGWSVDVGRHPGWTGHVSTSWSINCCDDGEGSQQEEVISSEDIGASIFNGQKKVLYYADALTEIAFVVPSPVESLTDSLESNISDQDSDSNMDLMPGILKQPSLTLELFPNHTDNLNSSQRLSPSSRMRKLPQGRPVPPLGPETRVSVVWVERYDDIENFPLSELMTEISTGVETTANSSTSLRSTTLEKEVPVIFIHPLNTGLFRIKIQGATGKFNMVIPLVDGMIVSRRALGFLVRQTVINICRRKRLESDSYSPPHVRRKQKITDIVNKYRNKQLEPEFYTSLFQEVGLKNCSS

SEQ ID NO: 3728 - protein, 963 aa, Homo sapiens
MYSEWRSLHLVIQNDQGHTSVLHSYPESVGREVANAVVRPLGQVLGTPSVAGSENLLKTDKEVKWTMEVICYGLTLPLDGETVKYCVDVYTDWIMALVLPKDSIPLPVIKEPNQYVQTILKHLQNLFVPRQEQGSSQIRLCLQVLRAIQKLARESSLMARETWEVLLLFLLQINDILLAPPTVQGGIAENLAEKLIGVLFEVWLLACTRCFPTPPYWKTAKEMVANWRHHPAVVEQWSKVICALTSRLLRFTYGPSFPAFKVPDEDASLIPPEMDNECVAQTWFRFLHMLSNPVDLSNPAIISSTPKFQEQFLNVSGMPQELNQYPCLKHLPQIFFRAMRGISCLVDAFLGISRPRSDSAPPTPVNRLSMPQSAAVSTTPPHNRRHRAVTVNKATMKTSTVSTAHASKVQHQTSSTSPLSSPNQTSSEPRPLPAPRRPKVNSILNLFGSWLFDAAFVHCKLHNGINRDSSMTAITTQASMEFRRKGSQMSTDTMVSNPMFDASEFPDNYEAGRAEACGTLCRIFCSKKTGEEILPAYLSRFYMLLIQGLQINDYVCHPVLASVILNSPPLFCCDLKGIDVVVPYFISALETILPDRELSKFKSYVNPTELRRSSINILLSLLPLPHHFGTVKSEVVLEGKFSNDDSSSYDKPITFLSLKLRLVNILIGALQTETDPNNTQMILGAMLNIVQDSALLEAIGCQMEMGGGENNLKSHSRTNSGISSASGGSTEPTTPDSERPAQALLRDYALNTDSAAGLLIRSIHLVTQRLNSQWRQDMSISLAALELLSGLAKVKVMVDSGDRKRAISSVCTYIVYQCSRPAPLHSRDLHSMIVAAFQCLCVWLTEHPDMLDEKDCLKEVLEIVELGISGSKSKNNEQEVKYKGDKEPNPASMRVKDAAEATLTCIMQLLGAFPSPSGPASPCSLVNETTLIKYSRLPTINKQLEPEFYTSLFQEVGLKNCSS

SEQ ID NO: 3729 - protein, 194 aa, Homo sapiens
MQAVRNAGSRFLRSWTWPQTAGRVVARTPAGTICTGARQLQDAAAKQKVEQNAAPSHTKFSIYPPIPGEESSLRWAGKKFEEIPIAHIKASHNNTQIQVVSASNEPLAFASCGTEGFRNAKKGTGIAAQTAGIAAAARAKQKGVIHIRVVVKGLGPGRLSAMHGLIMGGLEVISITDNTPIPHNGCRPRKARKL

SEQ ID NO: 3730 - protein, 193 aa, Homo sapiens
MQAVRNAGSRFLRSWTWPQTAGVVARTPAGTICTGARQLQDAAAKQKVEQNAAPSHTKFSIYPPIPGEESSLRWAGKKFEEIPIAHIKASHNNTQIQVVSASNEPLAFASCGTEGFRNAKKGTGIAAQTAGIAAAARAKQKGVIHIRVVVKGLGPGRLSAMHGLIMGGLEVISITDNTPIPHNGCRPRKARKL

SEQ ID NO: 3731 - protein, 161 aa, Homo sapiens
MQAVRNAGSRFLRSWTWPQTAGRVVARTPAGTICTGARQLQDAAAKQKVEQNAAPSHTKFSTQIQVVSASNEPLAFASCGTEGFRNAKKGTGIAAQTAGIAAAARAKQKGVIHIRVVVKGLGPGRLSAMHGLIMGGLEVISITDNTPIPHNGCRPRKARKL

SEQ ID NO: 3732 - protein, 436 aa, Homo sapiens
MQPPPDEARRDMAGDTQWSRPECQAWTGTLLLGTCLLYCARSSMPICTVSMSQDFGWNKKEAGIVLSSFFWGYCLTQVVGGHLGDRIGGEKVILLSASAWGSITAVTPLLAHLSSAHLAFMTFSRILMGLLQGVYFPALTSLLSQKVRESERAFTYSIVGAGSQFGTLLTGAVGSLLLEWYGWQSIFYFSGGLTLLWVWYVYRYLLSEKDLILALGVLAQSRPVSRHNRVPWRRLFRKPAVWAAVVSQLSAACSFFILLSWLPTFFEETFPDAKGWIFNVVPWLVAIPASLFSGFLSDHLINQGYRAITVRKLMQGMGLGLSSVFALCLGHTSSFCESVVFASASIGLQTFNHSGISVNIQDLAPSCAGFLFGVANTAGALAGVVGVCLGGYLMETTGSWTCLFNLVAIISNLGLCTFLVFGQAQRVDLSSTHEDL

SEQ ID NO: 3733 - protein, 430 aa, Homo sapiens
MTLTSRRQDSQEARPECQAWTGTLLLGTCLLYCARSSMPICTVSMSQDFGWNKKEAGIVLSSFFWGYCLTQVVGGHLGDRIGGEKVILLSASAWGSITAVTPLLAHLSSAHLAFMTFSRILMGLLQGVYFPALTSLLSQKVRESERAFTYSIVGAGSQFGTLLTGAVGSLLLEWYGWQSIFYFSGGLTLLWVWYVYRYLLSEKDLILALGVLAQSRPVSRHNRVPWRRLFRKPAVWAAVVSQLSAACSFFILLSWLPTFFEETFPDAKGWIFNVVPWLVAIPASLFSGFLSDHLINQGYRAITVRKLMQGMGLGLSSVFALCLGHTSSFCESVVFASASIGLQTFNHSGISVNIQDLAPSCAGFLFGVANTAGALAGVVGVCLGGYLMETTGSWTCLFNLVAIISNLGLCTFLVFGQAQRVDLSSTHEDL

SEQ ID NO: 3734 - protein, 216 aa, Homo sapiens
MQPPPDEARRDMAGDTQWSRPECQAWTGTLLLGTCLLYCARSSMPICTVSMSQDFGWNKKEAGIVLSSFFWGYCLTQVVGGHLGDRIGGEKVILLSASAWGSITAVTPLLAHLSSAHLAFMTFSRILMGLLQGVYFPALTSLLSQKVRESERAFTYSIVGAGSQFGTLLTGAVGSLLLEWYGWQSIFYFSGGLTLLWVWYVYRYLLSEKGNAGRAG

SEQ ID NO: 3735 - protein, 138 aa, Homo sapiens
MSWSGLLHGLNTSLTCGPALVPRLWATCSMATLNQMHRLGPPKRPPRKLGPTEGRPQLKGVVLCTFTRKPKKPNSANRKCCRVRLSTGREAVCFIPGEGHTLQEHQIVLVEGGRTQDLPGVKLTVVRGKYDCGHVQKK

SEQ ID NO: 3736 - protein, 591 aa, Homo sapiens
MVPSSPAVEKQVPVEPGPDPELRSWRHLVCYLCFYGFMAQIRPGESFITPYLLGPDKNFTREQVTNEITPVLSYSYLAVLVPVFLLTDYLRYTPVLLLQGLSFVSVWLLLLLGHSVAHMQLMELFYSVTMAARIAYSSYIFSLVRPARYQRVAGYSRAAVLLGVFTSSVLGQLLVTVGRVSFSTLNYISLAFLTFSVVLALFLKRPKRSLFFNRDDRGRCETSASELERMNPGPGGKLGHALRVACGDSVLARMLRELGDSLRRPQLRLWSLWWVFNSAGYYLVVYYVHILWNEVDPTTNSARVYNGAADAASTLLGAITSFAAGFVKIRWARWSKLLIAGVTATQAGLVFLLAHTRHPSSIWLCYAAFVLFRGSYQFLVPIATFQIASSLSKELCALVFGVNTFFATIVKTIITFIVSDVRGLGLPVRKQFQLYSVYFLILSIIYFLGAMLDGLRHCQRGHHPRQPPAQGLRSAAEEKAAQALSVQDKGLGGLQPAQSPPLSPEDSLGAVGPASLEQRQSDPYLAQAPAPQAAEFLSPVTTPSPCTLCSAQASGPEAADETCPQLAVHPPGVSKLGLQCLPSDGVQNVNQ

SEQ ID NO: 3737 - protein, 551 aa, Homo sapiens
MRPQPAEPAPGGRGNEACSIHSEVTNEITPVLSYSYLAVLVPVFLLTDYLRYTPVLLLQGLSFVSVWLLLLLGHSVAHMQLMELFYSVTMAARIAYSSYIFSLVRPARYQRVAGYSRAAVLLGVFTSSVLGQLLVTVGRVSFSTLNYISLAFLTFSVVLALFLKRPKRSLFFNRDDRGRCETSASELERMNPGPGGKLGHALRVACGDSVLARMLRELGDSLRRPQLRLWSLWWVFNSAGYYLVVYYVHILWNEVDPTTNSARVYNGAADAASTLLGAITSFAAGFVKIRWARWSKLLIAGVTATQAGLVFLLAHTRHPSSIWLCYAAFVLFRGSYQFLVPIATFQIASSLSKELCALVFGVNTFFATIVKTIITFIVSDVRGLGLPVRKQFQLYSVYFLILSIIYFLGAMLDGLRHCQRGHHPRQPPAQGLRSAAEEKAAQALSVQDKGLGGLQPAQSPPLSPEDSLGAVGPASLEQRQSDPYLAQAPAPQAAEFLSPVTTPSPCTLCSAQASGPEAADETCPQLAVHPPGVSKLGLQCLPSDGVQNVNQ

SEQ ID NO: 3738 - protein, 489 aa, Homo sapiens
MVPSSPAVEKQVPVEPGPDPELRSWRHLVCYLCFYGFMAQIRPGESFITPYLLGPDKNFTREQVTNEITPVLSYSYLAVLVPVFLLTDYLRYTPVLLLQGLSFVSVWLLLLLGHSVAHMQLMELFYSVTMAARIAYSSYIFSLVRPARYQRVAGYSRAAVLLGVFTSSVLGQLLVTVGRVSFSTLNYISLAFLTFSVVLALFLKRPKRSLFFNRDDRGRCETSASELERMNPGPGGKLGHALRVACGDSVLARMLRELGDSLRRPQLRLWSLWWVFNSAGYYLVVYYVHILWNEVDPTTNSARVYNGAADAASTLLGAITSFAAGFVKIRWARWSKLLIAGVTATQAGLVFLLAHTRHPSSIWLCYAAFVLFRGSYQFLVPIATFQIASSLSKELCALVFGVNTFFATIVKTIITFIVSDVRGLGLPVRKQNEELHVASLSLWKSHLRLAADTLSSEGSSGSGPRSWFLSPTLRAALHGPVCPSEVCPS

SEQ ID NO: 3739 - protein, 606 aa, Homo sapiens
MATKDPTAVERANLLNMAKLSIKGLIESALSFGRTLDSDYPPLQQFFVVMEHCLKHGLKVRKSFLSYNKTIWGPLELVEKLYPEAEEIGASVRDLPGLKTPLGRARAWLRLALMQKKMADYLRCLIIQRDLLSEFYEYHALMMEEEGAVIVGLLVGLNVIDANLCVKGEDLDSQVGVIDFSMYLKNEEDIGNKERNVQIAAILDQKNYVEELNRQLNSTVSSLHSRVDSLEKSNTKLIEELAIAKNNIIKLQEENHQLRSENKLILMKTQQHLEVTKVDVETELQTYKHSRQGLDEMYNEARRQLRDESQLRQDVENELAVQVSMKHEIELAMKLLEKDIHEKQDTLIGLRQQLEEVKAINIEMYQKLQGSEDGLKEKNEIIARLEEKTNKITAAMRQLEQRLQQAEKAQMEAEDEDEKYLQECLSKSDSLQKQISQKEKQLVQLETDLKIEKEWRQTLQEDLQKEKDALSHLRNETQQIISLKKEFLNLQDENQQLKKIYHEQEQALQELGNKLSESKLKIEDIKEANKALQGLVWLKDKEATHCKLCEKEFSLSKRKHHCRNCGEIFCNACSDNELPLPSSPKPVRVCDSCHALLIQRCSSNLP

SEQ ID NO: 3740 - protein, 655 aa, Homo sapiens
MGGDCLGLGGSRGRHGNAPPPLFRPVPARVLRHSGRGLEVPRRPGARTGPATKDPTAVERANLLNMAKLSIKGLIESALSFGRTLDSDYPPLQQFFVVMEHCLKHGLKVRKSFLSYNKTIWGPLELVEKLYPEAEEIGASVRDLPGLKTPLGRARAWLRLALMQKKMADYLRCLIIQRDLLSEFYEYHALMMEEEGAVIVGLLVGLNVIDANLCVKGEDLDSQVGVIDFSMYLKNEEDIGNKERNVQIAAILDQKNYVEELNRQLNSTVSSLHSRVDSLEKSNTKLIEELAIAKNNIIKLQEENHQLRSENKLILMKTQQHLEVTKVDVETELQTYKHSRQGLDEMYNEARRQLRDESQLRQDVENELAVQVSMKHEIELAMKLLEKDIHEKQDTLIGLRQQLEEVKAINIEMYQKLQGSEDGLKEKNEIIARLEEKTNKITAAMRQLEQRLQQAEKAQMEAEDEDEKYLQECLSKSDSLQKQISQKEKQLVQLETDLKIEKEWRQTLQEDLQKEKDALSHLRNETQQIISLKKEFLNLQDENQQLKKIYHEQEQALQELGNKLSESKLKIEDIKEANKALQGLVWLKDKEATHCKLCEKEFSLSKRKHHCRNCGEIFCNACSDNELPLPSSPKPVRVCDSCHALLIQRCSSNLP

SEQ ID NO: 3741 - protein, 641 aa, Homo sapiens
MTFQVWGWRREDASQVLAWVPDAEGGRRGMLTRRSLATKDPTAVERANLLNMAKLSIKGLIESALSFGRTLDSDYPPLQQFFVVMEHCLKHGLKVRKSFLSYNKTIWGPLELVEKLYPEAEEIGASVRDLPGLKTPLGRARAWLRLALMQKKMADYLRCLIIQRDLLSEFYEYHALMMEEEGAVIVGLLVGLNVIDANLCVKGEDLDSQVGVIDFSMYLKNEEDIGNKERNVQIAAILDQKNYVEELNRQLNSTVSSLHSRVDSLEKSNTKLIEELAIAKNNIIKLQEENHQLRSENKLILMKTQQHLEVTKVDVETELQTYKHSRQGLDEMYNEARRQLRDESQLRQDVENELAVQVSMKHEIELAMKLLEKDIHEKQDTLIGLRQQLEEVKAINIEMYQKLQGSEDGLKEKNEIIARLEEKTNKITAAMRQLEQRLQQAEKAQMEAEDEDEKYLQECLSKSDSLQKQISQKEKQLVQLETDLKIEKEWRQTLQEDLQKEKDALSHLRNETQQIISLKKEFLNLQDENQQLKKIYHEQEQALQELGNKLSESKLKIEDIKEANKALQGLVWLKDKEATHCKLCEKEFSLSKRKHHCRNCGEIFCNACSDNELPLPSSPKPVRVCDSCHALLIQRCSSNLP

SEQ ID NO: 3742 - protein, 403 aa, Homo sapiens
MATKDPTAVERANLLNMAKLSIKGLIESALSFGRTLDSDYPPLQQFFVVMEHCLKHGLKVRKSFLSYNKTIWGPLELVEKLYPEAEEIGASVRDLPGLNEFYEYHALMMEEEGAVIVGLLVGLNVIDANLCVKGEDLDSQVGVIDFSMYLKNEEDIGNKERNVQIAAILDQKNYVEELNRQLNSTVSSLHSRVDSLEKSNTKLIEELAIAKNNIIKLQEENHQLRSENKLILMKTQQHLEVTKVDVETELQTYKHSRQGLDEMYNEARRQLRDESQLRQDVENELAVQVSMKHEIELAMKLLEKDIHEKQDTLIGLRQQLEEVKAINIEMYQKLQGSEDGLKEKNEIIARLEEKTNKITAAMRQLEQSDNDLLTQTRTIAMSLVKCASSDTQDQYKLVKDISF

SEQ ID NO: 3743 - protein, 379 aa, Homo sapiens
MVRKSFLSYNKTIWGPLELVEKLYPEAEEIGASVRDLPGLKTPLGRARAWLRLALMQKKMADYLRCLIIQRDLLSEFYEYHALMMEEEGAVIVGLLVGLNVIDANLCVKGEDLDSQVGVIDFSMYLKNEEDIGNKERNVQIAAILDQKNYVEELNRQLNSTVSSLHSRVDSLEKSNTKLIEELAIAKNNIIKLQEENHQLRSENKLILMKTQQHLEVTKVDVETELQTYKHSRQGLDEMYNEARRQLRDESQLRQDVENELAVQVSMKHEIELAMKLLEKDIHEKQDTLIGLRQQLEEVKAINIEMYQKLQGSEDGLKEKNEIIARLEEKTNKITAAMRQLEQSDNDLLTQTRTIAMSLVKCASSDTQDQYKLVKDISF

SEQ ID NO: 3744 - protein, 128 aa, Homo sapiens
MAAFMLGSLLRTFKQMVPSSASGQVRSHYVDWRMWRDVKRRKMAYEYADERLRINSLRKNTILPKILQDVADEEIAALPRDSCPVRIRNRCVMTSRPRGVKRRWRLSRIVFRHLADHGQLSGIQRATW

SEQ ID NO: 3745 - protein, 469 aa, Homo sapiens
MSALTPPTDMPTPTTDKITQAAMETIYLCKFRVSMDGEWLCLRELDDISLTPDPEPTHEDPNYLMANERMNLMNMAKLSIKGLIESALNLGRTLDSDYAPLQQFFVVMEHCLKHGLKAKKTFLGQNKSFWGPLELVEKLVPEAAEITASVKDLPGLKTPVGRGRAWLRLALMQKKLSEYMKALINKKELLSEFYEPNALMMEEEGAIIAGLLVGLNVIDANFCMKGEDLDSQVGVIDFSMYLKDGNSSKGTEGDGQITAILDQKNYVEELNRHLNATVNNLQAKVDALEKSNTKLTEELAVANNRIITLQEEMERVKEESSYILESNRKGPKQDRTAEGQALSEARKHLKEETQLRLDVEKELEMQISMRQEMELAMKMLEKDVCEKQDALVSLRQQLDDLRALKHELAFKLQSSDLGVKQKSELNSRLEEKTNQMAATIKQLEQSEKDLVKQAKTLNSAANKLIPKHH

SEQ ID NO: 3746 - protein, 506 aa, Homo sapiens
MAETPPPPTAGAESCSEEPARGGEWRPEEPRRAPAGGTDREGEAGPPPASPAGQSEPDSPVAAPFFLLYPGDGGAGFGVRPPPQQQRSWRTPPSPGSPLPFLLLSYPSGGGGSSGSGKHHPNYLMANERMNLMNMAKLSIKGLIESALNLGRTLDSDYAPLQQFFVVMEHCLKHGLKAKKTFLGQNKSFWGPLELVEKLVPEAAEITASVKDLPGLKTPVGRGRAWLRLALMQKKLSEYMKALINKKELLSEFYEPNALMMEEEGAIIAGLLVGLNVIDANFCMKGEDLDSQVGVIDFSMYLKDGNSSKGTEGDGQITAILDQKNYVEELNRHLNATVNNLQAKVDALEKSNTKLTEELAVANNRIITLQEEMERVKEESSYILESNRKGPKQDRTAEGQALSEARKHLKEETQLRLDVEKELEMQISMRQEMELAMKMLEKDVCEKQDALVSLRQQLDDLRALKHELAFKLQSSDLGVKQKSELNSRLEEKTNQMAATIKQLEQR

SEQ ID NO: 3747 - protein, 620 aa, Homo sapiens
MSALTPPTDMPTPTTDKITQAAMETIYLCKFRVSMDGEWLCLRELDDISLTPDPEPTHEDPNYLMANERMNLMNMAKLSIKGLIESALNLGRTLDSDYAPLQQFFVVMEHCLKHGLKAKKTFLGQNKSFWGPLELVEKLVPEAAEITASVKDLPGLKTPVGRGRAWLRLALMQKKLSEYMKALINKKELLSEFYEPNALMMEEEGAIIAGLLVGLNVIDANFCMKGEDLDSQVGVIDFSMYLKDGNSSKGTEGDGQITAILDQKNYVEELNRHLNATVNNLQAKVDALEKSNTKLTEELAVANNRIITLQEEMERVKEESSYILESNRKGPKQDRTAEGQALSEARKHLKEETQLRLDVEKELEMQISMRQEMELAMKMLEKDVCEKQDALVSLRQQLDDLRALKHELAFKLQSSDLGVKQKSELNSRLEEKTNQMAATIKQLEQRLRQAERSRQSAELDNRLFKQDFGDKINSLQLEVEELTRQRNQLELELKQEKERRLQNDRSIPGRGSQKSESKMDGKHKMQEENVKLKKPLEESHRLQPHPMDEQDQLLLSEKPQLCQLCQEDGSLTKNVCKNCSGTFCDACSTNELPLPSSIKLERVCNPCHKHLMKQYSTSPS

SEQ ID NO: 3748 - protein, 567 aa, Homo sapiens
MRDDTEDPNYLMANERMNLMNMAKLSIKGLIESALNLGRTLDSDYAPLQQFFVVMEHCLKHGLKAKKTFLGQNKSFWGPLELVEKLVPEAAEITASVKDLPGLKTPVGRGRAWLRLALMQKKLSEYMKALINKKELLSEFYEPNALMMEEEGAIIAGLLVGLNVIDANFCMKGEDLDSQVGVIDFSMYLKDGNSSKGTEGDGQITAILDQKNYVEELNRHLNATVNNLQAKVDALEKSNTKLTEELAVANNRIITLQEEMERVKEESSYILESNRKGPKQDRTAEGQALSEARKHLKEETQLRLDVEKELEMQISMRQEMELAMKMLEKDVCEKQDALVSLRQQLDDLRALKHELAFKLQSSDLGVKQKSELNSRLEEKTNQMAATIKQLEQRLRQAERSRQSAELDNRLFKQDFGDKINSLQLEVEELTRQRNQLELELKQEKERRLQNDRSIPGRGSQKSESKMDGKHKMQEENVKLKKPLEESHRLQPHPMDEQDQLLLSEKPQLCQLCQEDGSLTKNVCKNCSGTFCDACSTNELPLPSSIKLERVCNPCHKHLMKQYSTSPS

SEQ ID NO: 3749 - protein, 497 aa, Homo sapiens
MDVPGPVSRRAAAAAATVLLRTARVRRECWFLPTALLCAYGFFASLRPSEPFLTPYLLGPDKNLTEREVFNEIYPVWTYSYLVLLFPVFLATDYLRYKPVVLLQGLSLIVTWFMLLYAQGLLAIQFLEFFYGIATATEIAYYSYIYSVVDLGMYQKVTSYCRSATLVGFTVGSVLGQILVSVAGWSLFSLNVISLTCVSVAFAVAWFLPMPQKSLFFHHIPSTCQRVNGIKVQNGGIVTDTPASNHLPGWEDIESKIPLNMEEPPVEEPEPKPDRLLVLKVLWNDFLMCYSSRPLLCWSVWWALSTCGYFQVVNYTQGLWEKVMPSRYAAIYNGGVEAVSTLLGAVAVFAVGYIKISWSTWGEMTLSLFSLLIAAAVYIMDTVGNIWVCYASYVVFRIIYMLLITIATFQIAANLSMERYALVFGVNTFIALALQTLLTLIVVDASGLGLEITTQFLIYASYFALIAVVFLASGAVSVMKKCRKLEDPQSSSQVTTS

SEQ ID NO: 3750 - protein, 296 aa, Homo sapiens
MDVPGPVSRRAAAAAATVLLRTARVRRECWFLPTALLCAYGFFASLRPSEPFLTPYLLGPDKNLTEREEPKPDRLLVLKVLWNDFLMCYSSRPLLCWSVWWALSTCGYFQVVNYTQGLWEKVMPSRYAAIYNGGVEAVSTLLGAVAVFAVGYIKISWSTWGEMTLSLFSLLIAAAVYIMDTVGNIWVCYASYVVFRIIYMLLITIATFQIAANLSMERYALVFGVNTFIALALQTLLTLIVVDASGLGLEITTQFLIYASYFALIAVVFLASGAVSVMKKCRKLEDPQSSSQVTTS

SEQ ID NO: 3751 - protein, 571 aa, Homo sapiens
MAEEGAILKVTKDLRAAVSAILQGYGDGQGPVTDTSAELHRLCGCLELLLQFDQKEQKSFLGPRKDYWDFLCTALRRQRGNMEPIHFVRSQDKLKTPLGKGRAFIRFCLARGQLAEALQLCLLNSELTREWYGPRSPLLCPERQEDILDSLYALNGVAFELDLQQPDLDGAWPMFSESRCSSSTQTQGRRPRKNKDAPKKIPAAYGGPENVQIEDSHTSQAICLQDAPSGQQLAGLPRSQQQRHLPFFLEKKGESSRKHRYPQSMWEPEGKELQLDQEERAPWIEIFLGNSTPSTQGQGKGAMGTQKEVIGMEAEVTGVLLVAEGQRTTEGTHKKEAEWSHVQRLLMPSPRGAVEGAVSGSRQGSGGSSILGEPWVLQGHATKEDSTVENPQVQTEVTLVARREEQAEVSLQDEIKSLRLGLRKAEEQAQRQEQLLREQEGELQALREQLSRCQEERAELQAQLEQKQQEAERRDAMYQEELGGQRDLVQAMKRRVLELIQEKDRLWQRLQHLSSMAPECCVACSKIFGRFSRRYPCRLCGGLLCHACSMDYKKRDRCCPPCAQGREAQVT

SEQ ID NO: 3752 - protein, 172 aa, Homo sapiens
MAEEGAILKVTKDLRAAVSAILQGYGDGQGPVTDTSAELHRLCGCLELLLQFDQKEQKSFLGPRKDYWDFLCTALRRQRGNMEPIHFVRSQDKGMVWTPEPSALPRTPRRHPGLSLCSQWGGLRVGPPAARPGWSLAHVLRVTLLQFHPNPGKETQKKQRCPKEDPSRIWRA

SEQ ID NO: 3753 - protein, 496 aa, Homo sapiens
MDCYRTSLSSSWIYPTVILCLFGFFSMMRPSEPFLIPYLSGPDKNLTSAEITNEIFPVWTYSYLVLLLPVFVLTDYVRYKPVIILQGISFIITWLLLLFGQGVKTMQVVEFFYGMVTAAEVAYYAYIYSVVSPEHYQRVSGYCRSVTLAAYTAGSVLAQLLVSLANMSYFYLNVISLASVSVAFLFSLFLPMPKKSMFFHAKPSREIKKSSSVNPVLEETHEGEAPGCEEQKPTSEILSTSGKLNKGQLNSLKPSNVTVDVFVQWFQDLKECYSSKRLFYWSLWWAFATAGFNQVLNYVQILWDYKAPSQDSSIYNGAVEAIATFGGAVAAFAVGYVKVNWDLLGELALVVFSVVNAGSLFLMHYTANIWACYAGYLIFKSSYMLLITIAVFQIAVNLNVERYALVFGINTFIALVIQTIMTVIVVDQRGLNLPVSIQFLVYGSYFAVIAGIFLMRSMYITYSTKSQKDVQSPAPSENPDVSHPEEESNIIMSTKL

SEQ ID NO: 3754 - protein, 257 aa, Homo sapiens
MLRVAWRTLSLIRTRAVTQVLVPGLPGGGSAKFPFNQWGLQPRSLLLQAARGYVVRKPAQSRLDDDPPPSTLLKDYQNVPGIEKVDDVVKRLLSLEMANKKEMLKIKQEQFMKKIVANPEDTRSLEARIIALSVKIRSYEEHLEKHRKDKAHKRYLLMSIDQRKKMLKNLRNTNYDVFEKICWGLGIEYTFPPLYYRRAHRRFVTKKALCIRVFQETQKLKKRRRALKAAAAAQKQAKRRNPDSPAKAIPKTLKDSQ

SEQ ID NO: 3755 - protein, 101 aa, Homo sapiens
MSNTQAERSIIGMIDMFHKYTGRDGKIEKPSLLTMMKENFPNFLSACDKKGIHYLATVFEKKDKNEDKKIDFSEFLSLLGDIAADYHKQSHGAAPCSGGSQ

SEQ ID NO: 3756 - protein, 101 aa, Homo sapiens
MNIPLGEKVMLDIVAMFRQYSGDDGRMDMPGLVNLMKENFPNFLSGCEKSDMDYLSNALEKKDDNKDKKVNYSEFLSLLGDITIDHHKIMHGVAPCSGGSQ

SEQ ID NO: 3757 - protein, 137 aa, Homo sapiens
MVHLTTLLCKAYRGGHLTIRLALGGCTNRPFYRIVAAHNKCPRDGRFVEQLGSYDPLPNSHGEKLVALNLDRIRHWIGCGAHLSKPMEKLLGLAGFFPLHPMMITNAERLRRKRAREVLLASQKTDAEATDTEATET

SEQ ID NO: 3758 - protein, 123 aa, Homo sapiens
MVHLTTLLCKAYRGGHLTIRLALGGCTNRPFYRIVAAHNKCPRDGRFVEQLGSYDPLPNSHGEKLVALNLDRIRHWIGCGAHLSKPMEKLLGKTDARFPEQGEERPEQHHFPEDLAPARGRGL

SEQ ID NO: 3759 - protein, 142 aa, Homo sapiens
MAAVVAVCGGLGRKKLTHLVTAAVSLTHPGTHTVLWRRGCSQQVSSNEDLPISMENPYKEPLKKCILCGKHVDYKNVQLLSQFVSPFTGCIYGRHITGLCGKKQKEITKAIKRAQIMGFMPVTYKDPAYLKDPKVCNIRYRE

SEQ ID NO: 3760 - protein, 353 aa, Homo sapiens
MGSLYSEYLNPNKVQEHYNYTKETLETQETTSRQVASAFIVILCCAIVVENLLVLIAVARNSKFHSAMYLFLGNLAASDLLAGVAFVANTLLSGSVTLRLTPVQWFAREGSAFITLSASVFSLLAIAIERHVAIAKVKLYGSDKSCRMLLLIGASWLISLVLGGLPILGWNCLGHLEACSTVLPLYAKHYVLCVVTIFSIILLAIVALYVRIYCVVRSSHADMAAPQTLALLKTVTIVLGVFIVCWLPAFSILLLDYACPVHSCPILYKAHYFFAVSTLNSLLNPVIYTWRSRDLRREVLRPLQCWRPGVGVQGRRRGGTPGHHLLPLRSSSSLERGMHMPTSPTFLEGNTVV

SEQ ID NO: 3761 - protein, 348 aa, Homo sapiens
MAHSQNSLELPININATQITTAYGHRALPKLKEELQSEDLQTRQKALMALCDLMHDPECIYKAMNIGCMENLKALLKDSNSMVRIKTTEVLHITASHSVGRYAFLEHDIVLALSFLLNDPSPVCRGNLYKAYMQLVQVPRGAQEIISKGLISSLVWKLQVEVEEEEFQEFILDTLVLCLQEDATEALGSNVVLVLKQKLLSANQNIRSKAARALLNVSISREGKKQVCHFDVIPILVHLLKDPVEHVKSNAAGALMFATVITEGKYAALEAQAIGLLLELLHSPMTIARLNATKALTMLAEAPEGRKALQTHVPTFRAMEVETYEKPQVAEALQRAARIAISVIEFKP

SEQ ID NO: 3762 - protein, 378 aa, Homo sapiens
MATALPPRLQPVRGNETLREHYQYVGKLAGRLKEASEGSTLTTVLFLVICSFIVLENLMVLIAIWKNNKFHNRMYFFIGNLALCDLLAGIAYKVNILMSGKKTFSLSPTVWFLREGSMFVALGASTCSLLAIAIERHLTMIKMRPYDANKRHRVFLLIGMCWLIAFTLGALPILGWNCLHNLPDCSTILPLYSKKYIAFCISIFTAILVTIVILYARIYFLVKSSSRKVANHNNSERSMALLRTVVIVVSVFIACWSPLFILFLIDVACRVQACPILFKAQWFIVLAVLNSAMNPVIYTLASKEMRRAFFRLVCNCLVRGRGARASPIQPALDPSRSKSSSSNNSSHSPKVKEDLPHTAPSSCIMDKNAALQNGIFCN

SEQ ID NO: 3763 - protein, 453 aa, Homo sapiens
MRIPVDASTSRRFTPPSTALSPGKMSEALPLGAPDAGAALAGKLRSGDRSMVEVLADHPGELVRTDSPNFLCSVLPTHWRCNKTLPIAFKVVALGDVPDGTLVTVMAGNDENYSAELRNATAAMKNQVARFNDLRFVGRSGRGKSFTLTITVFTNPPQVATYHRAIKITVDGPREPRRHRQKLDDQTKPGSLSFSERLSELEQLRRTAMRVSPHHPAPTPNPRASLNHSTAFNPQPQSQMQDTRQIQPSPPWSYDQSYQYLGSIASPSVHPATPISPGRASGMTTLSAELSSRLSTAPDLTAFSDPRQFPALPSISDPRMHYPGAFTYSPTPVTSGIGIGMSAMGSATRYHTYLPPPYPGSSQAQGGPFQASSPSYHLYYGASAGSYQFSMVGGERSPPRILPPCTNASTGSALLNPSLPNQSDVVEAEGSHSNSPTNMAPSARLEEAVWRPY

SEQ ID NO: 3764 - protein, 472 aa, Homo sapiens
MRIPVDASTSRRFTPPSTALSPGKMSEALPLGAPDAGAALAGKLRSGDRSMVEVLADHPGELVRTDSPNFLCSVLPTHWRCNKTLPIAFKVVALGDVPDGTLVTVMAGNDENYSAELRNATAAMKNQVARFNDLRFVGRSGRGKSFTLTITVFTNPPQVATYHRAIKITVDGPREPRRHRQKLDDQTKPGSLSFSERLSELEQLRRTAMRVSPHHPAPTPNPRASLNHSTAFNPQPQSQMQDTRQIQPSPPWSYDQSYQYLGSIASPSVHPATPISPGRASGMTTLSAELSSRLSTAPDLTAFSDPRQFPALPSISDPRMHYPGAFTYSPTPVTSGIGIGMSAMGSATRYHTYLPPPYPGSSQAQGGPFQASSPSYHLYYGASAGSYQFSMVGGERSPPRILPPCTNASTGSALLNPSLPNQSDVVEAEGSHSNSPTNMGGASCSRQARRDPGPWARTPSWGRGRPTDRISL

SEQ ID NO: 3765 - protein, 250 aa, Homo sapiens
MRIPVDASTSRRFTPPSTALSPGKMSEALPLGAPDAGAALAGKLRSGDRSMVEVLADHPGELVRTDSPNFLCSVLPTHWRCNKTLPIAFKVVALGDVPDGTLVTVMAGNDENYSAELRNATAAMKNQVARFNDLRFVGRSGRGKSFTLTITVFTNPPQVATYHRAIKITVDGPREPRRHRQKLDDQTKPGSLSFSERLSELEQLRRTAMRVSPHHPAPTPNPRASLNHSTAFNPQPQSQMQEEDTAPWRC

SEQ ID NO: 3766 - protein, 257 aa, Homo sapiens
MRIPVDASTSRRFTPPSTALSPGKMSEALPLGAPDAGAALAGKLRSGDRSMVEVLADHPGELVRTDSPNFLCSVLPTHWRCNKTLPIAFKVVALGDVPDGTLVTVMAGNDENYSAELRNATAAMKNQVARFNDLRFVGRSGRGKSFTLTITVFTNPPQVATYHRAIKITVDGPREPRRHRQKLDDQTKPGSLSFSERLSELEQLRRTAMRVSPHHPAPTPNPRASLNHSTAFNPQPQSQMQDTRQIQPSPPWSYDQS

SEQ ID NO: 3767 - protein, 224 aa, Homo sapiens
MRIPVDASTSRRFTPPSTALSPGKMSEALPLGAPDAGAALAGKLRSGDRSMVEVLADHPGELVRTDSPNFLCSVLPTHWRCNKTLPIAFKVVALGDVPDGTLVTVMAGNDENYSAELRNATAAMKNQVARFNDLRFVGRSGRGKSFTLTITVFTNPPQVATYHRAIKITVDGPREPRSKCIHLGLVHPPGWYTLQAGILRDHVSDSLGSTFPPGGWQAPVKPKS

SEQ ID NO: 3768 - protein, 188 aa, Homo sapiens
MRIPVDASTSRRFTPPSTALSPGKMSEALPLGAPDAGAALAGKLRSGDRSMVEVLADHPGELVRTDSPNFLCSVLPTHWRCNKTLPIAFKVVALGDVPDGTLVTVMAGNDENYSAELRNATAAMKNQVARFNDLRFVGRSGRGKSFTLTITVFTNPPQVATYHRAIKITVDGPREPRNSLTWPRYPHI

SEQ ID NO: 3769 - protein, 242 aa, Homo sapiens
MRIPVDASTSRRFTPPSTALSPGKMSEALPLGAPDAGAALAGKLRSGDRSMVEVLADHPGELVRTDSPNFLCSVLPTHWRCNKTLPIAFKVVALGDVPDGTLVTVMAGNDENYSAELRNATAAMKNQVARFNDLRFVDGPREPRRHRQKLDDQTKPGSLSFSERLSELEQLRRTAMRVSPHHPAPTPNPRASLNHSTAFNPQPQSQMQDTRQIQPSPPWSYDQSYQYLGSIASPSVHPATPI

SEQ ID NO: 3770 - protein, 480 aa, Homo sapiens
MASDSIFESFPSYPQCFMRECILGMNPSRDVHDASTSRRFTPPSTALSPGKMSEALPLGAPDAGAALAGKLRSGDRSMVEVLADHPGELVRTDSPNFLCSVLPTHWRCNKTLPIAFKVVALGDVPDGTLVTVMAGNDENYSAELRNATAAMKNQVARFNDLRFVGRSGRGKSFTLTITVFTNPPQVATYHRAIKITVDGPREPRRHRQKLDDQTKPGSLSFSERLSELEQLRRTAMRVSPHHPAPTPNPRASLNHSTAFNPQPQSQMQDTRQIQPSPPWSYDQSYQYLGSIASPSVHPATPISPGRASGMTTLSAELSSRLSTAPDLTAFSDPRQFPALPSISDPRMHYPGAFTYSPTPVTSGIGIGMSAMGSATRYHTYLPPPYPGSSQAQGGPFQASSPSYHLYYGASAGSYQFSMVGGERSPPRILPPCTNASTGSALLNPSLPNQSDVVEAEGSHSNSPTNMAPSARLEEAVWRPY

SEQ ID NO: 3771 - protein, 456 aa, Homo sapiens
MNPSRDVHDASTSRRFTPPSTALSPGKMSEALPLGAPDAGAALAGKLRSGDRSMVEVLADHPGELVRTDSPNFLCSVLPTHWRCNKTLPIAFKVVALGDVPDGTLVTVMAGNDENYSAELRNATAAMKNQVARFNDLRFVGRSGRGKSFTLTITVFTNPPQVATYHRAIKITVDGPREPRRHRQKLDDQTKPGSLSFSERLSELEQLRRTAMRVSPHHPAPTPNPRASLNHSTAFNPQPQSQMQDTRQIQPSPPWSYDQSYQYLGSIASPSVHPATPISPGRASGMTTLSAELSSRLSTAPDLTAFSDPRQFPALPSISDPRMHYPGAFTYSPTPVTSGIGIGMSAMGSATRYHTYLPPPYPGSSQAQGGPFQASSPSYHLYYGASAGSYQFSMVGGERSPPRILPPCTNASTGSALLNPSLPNQSDVVEAEGSHSNSPTNMAPSARLEEAVWRPY

SEQ ID NO: 3772 - protein, 468 aa, Homo sapiens
MPAAPRGPAQGEAAARTRSRDASTSRRFTPPSTALSPGKMSEALPLGAPDAGAALAGKLRSGDRSMVEVLADHPGELVRTDSPNFLCSVLPTHWRCNKTLPIAFKVVALGDVPDGTLVTVMAGNDENYSAELRNATAAMKNQVARFNDLRFVGRSGRGKSFTLTITVFTNPPQVATYHRAIKITVDGPREPRRHRQKLDDQTKPGSLSFSERLSELEQLRRTAMRVSPHHPAPTPNPRASLNHSTAFNPQPQSQMQDTRQIQPSPPWSYDQSYQYLGSIASPSVHPATPISPGRASGMTTLSAELSSRLSTAPDLTAFSDPRQFPALPSISDPRMHYPGAFTYSPTPVTSGIGIGMSAMGSATRYHTYLPPPYPGSSQAQGGPFQASSPSYHLYYGASAGSYQFSMVGGERSPPRILPPCTNASTGSALLNPSLPNQSDVVEAEGSHSNSPTNMAPSARLEEAVWRPY

SEQ ID NO: 3773 - protein, 348 aa, Homo sapiens
MAGNDENYSAELRNATAAMKNQVARFNDLRFVGRSGRGKSFTLTITVFTNPPQVATYHRAIKITVDGPREPRRHRQKLDDQTKPGSLSFSERLSELEQLRRTAMRVSPHHPAPTPNPRASLNHSTAFNPQPQSQMQDTRQIQPSPPWSYDQSYQYLGSIASPSVHPATPISPGRASGMTTLSAELSSRLSTAPDLTAFSDPRQFPALPSISDPRMHYPGAFTYSPTPVTSGIGIGMSAMGSATRYHTYLPPPYPGSSQAQGGPFQASSPSYHLYYGASAGSYQFSMVGGERSPPRILPPCTNASTGSALLNPSLPNQSDVVEAEGSHSNSPTNMAPSARLEEAVWRPY

SEQ ID NO: 3774 - protein, 521 aa, Homo sapiens
MASNSLFSTVTPCQQNFFWDPSTSRRFSPPSSSLQPGKMSDVSPVVAAQQQQQQQQQQQQQQQQQQQQQQQEAAAAAAAAAAAAAAAAAVPRLRPPHDNRTMVEIIADHPAELVRTDSPNFLCSVLPSHWRCNKTLPVAFKVVALGEVPDGTVVTVMAGNDENYSAELRNASAVMKNQVARFNDLRFVGRSGRGKSFTLTITVFTNPPQVATYHRAIKVTVDGPREPRRHRQKLDDSKPSLFSDRLSDLGRIPHPSMRVGVPPQNPRPSLNSAPSPFNPQGQSQITDPRQAQSSPPWSYDQSYPSYLSQMTSPSIHSTTPLSSTRGTGLPAITDVPRRISDDDTATSDFCLWPSTLSKKSQAGASELGPFSDPRQFPSISSLTESRFSNPRMHYPATFTYTPPVTSGMSLGMSATTHYHTYLPPPYPGSSQSQSGPFQTSSTPYLYYGTSSGSYQFPMVPGGDRSPSRMLPPCTTTSNGSTLLNPNLPNQNDGVDADGSHSSSPTVLNSSGRMDESVWRPY

SEQ ID NO: 3775 - protein, 507 aa, Homo sapiens
MRIPVDPSTSRRFSPPSSSLQPGKMSDVSPVVAAQQQQQQQQQQQQQQQQQQQQQQQEAAAAAAAAAAAAAAAAAVPRLRPPHDNRTMVEIIADHPAELVRTDSPNFLCSVLPSHWRCNKTLPVAFKVVALGEVPDGTVVTVMAGNDENYSAELRNASAVMKNQVARFNDLRFVGRSGRGKSFTLTITVFTNPPQVATYHRAIKVTVDGPREPRRHRQKLDDSKPSLFSDRLSDLGRIPHPSMRVGVPPQNPRPSLNSAPSPFNPQGQSQITDPRQAQSSPPWSYDQSYPSYLSQMTSPSIHSTTPLSSTRGTGLPAITDVPRRISDDDTATSDFCLWPSTLSKKSQAGASELGPFSDPRQFPSISSLTESRFSNPRMHYPATFTYTPPVTSGMSLGMSATTHYHTYLPPPYPGSSQSQSGPFQTSSTPYLYYGTSSGSYQFPMVPGGDRSPSRMLPPCTTTSNGSTLLNPNLPNQNDGVDADGSHSSSPTVLNSSGRMDESVWRPY

SEQ ID NO: 3776 - protein, 499 aa, Homo sapiens
MASNSLFSTVTPCQQNFFWDPSTSRRFSPPSSSLQPGKMSDVSPVVAAQQQQQQQQQQQQQQQQQQQQQQQEAAAAAAAAAAAAAAAAAVPRLRPPHDNRTMVEIIADHPAELVRTDSPNFLCSVLPSHWRCNKTLPVAFKVVALGEVPDGTVVTVMAGNDENYSAELRNASAVMKNQVARFNDLRFVGRSGRGKSFTLTITVFTNPPQVATYHRAIKVTVDGPREPRRHRQKLDDSKPSLFSDRLSDLGRIPHPSMRVGVPPQNPRPSLNSAPSPFNPQGQSQITDPRQAQSSPPWSYDQSYPSYLSQMTSPSIHSTTPLSSTRGTGLPAITDVPRRISGASELGPFSDPRQFPSISSLTESRFSNPRMHYPATFTYTPPVTSGMSLGMSATTHYHTYLPPPYPGSSQSQSGPFQTSSTPYLYYGTSSGSYQFPMVPGGDRSPSRMLPPCTTTSNGSTLLNPNLPNQNDGVDADGSHSSSPTVLNSSGRMDESVWRPY

SEQ ID NO: 3777 - protein, 360 aa, Homo sapiens
MAPLGTTVLLWSLLRSSPGVERVCFRARIQPWHGGLLQPLPCSFEMGLPRRRFSSEAAESGSPETKKPTFMDEEVQSILTKMTGLNLQKTFKPAIQELKPPTYKLMTQAQLEEATRQAVEAAKVRLKMPPVLEERVPINDVLAEDKILEGTETTKYVFTDISYSIPHRERFIVVREPSGTLRKASWEERDRMIQVYFPKEGRKILTPIIFKEENLRTMYSQDRHVDVLNLCFAQFEPDSTEYIKVHHKTYEDIDKRGKYDLLRSTRYFGGMVWYFVNNKKIDGLLIDQIQRDLIDDATNLVQLYHVLHPDGQSAQGAKDQAAEGINLIKVFAKTEAQKGAYIELTLQTYQEALSRHSAAS

SEQ ID NO: 3778 - protein, 168 aa, Homo sapiens
MAPLGTTVLLWSLLRSSPGVERVCFRARIQPWHGGLLQPLPCSFEMGLPRRRFSSEAESGSPETKKPTFMDEEVQSILTKMTGLNLQKTFKPAIQELKPPTYKLMTQAQLEEATRQAVEAAKVRLKMPPVLEERVPINDVLAEDKILEGTETTKYVFTDISYSIPHRC

SEQ ID NO: 3779 - protein, 679 aa, Homo sapiens
MATLITSTTAATAASGPLVDYLWMLILGFIIAFVLAFSVGANDVANSFGTAVGSGVVTLKQACILASIFETVGSVLLGAKVSETIRKGLIDVEMYNSTQGLLMAGSVSAMFGSAVWQLVASFLKLPISGTHCIVGATIGFSLVAKGQEGVKWSELIKIVMSWFVSPLLSGIMSGILFFLVRAFILHKADPVPNGLRALPVFYACTVGINLFSIMYTGAPLLGFDKLPLWGTILISVGCAVFCALIVWFFVCPRMKRKIEREIKCSPSESPLMEKKNSLKEDHEETKLSVGDIENKHPVSEVGPATVPLQAVVEERTVSFKLGDLEEAPERERLPSVDLKEETSIDSTVNGAVQLPNGNLVQFSQAVSNQINSSGHYQYHTVHKDSGLYKELLHKLHLAKVGDCMGDSGDKPLRRNNSYTSYTMAICGMPLDSFRAKEGEQKGEEMEKLTWPNADSKKRIRMDSYTSYCNAVSDLHSASEIDMSVKAEMGLGDRKGSNGSLEEWYDQDKPEVSLLFQFLQILTACFGSFAHGGNDVSNAIGPLVALYLVYDTGDVSSKVATPIWLLLYGGVGICVGLWVWGRRVIQTMGKDLTPITPSSGFSIELASALTVVIASNIGLPISTTHCKVGSVVSVGWLRSKKAVDWRLFRNIFMAWFVTVPISGVISAAIMAIFRYVILRM

SEQ ID NO: 3780 - protein, 415 aa, Homo sapiens
MRIPVDPSTSRRFTPPSPAFPCGGGGGKMGENSGALSAQAAVGPGGRARPEVRSMVDVLADHAGELVRTDSPNFLCSVLPSHWRCNKTLPVAFKVVALGDVPDGTVVTVMAGNDENYSAELRNASAVMKNQVARFNDLRFVGRSGRGKSFTLTITVFTNPTQVATYHRAIKVTVDGPREPRRHRQKLEDQTKPFPDRFGDLERLRMRVTPSTPSPRGSLSTTSHFSSQPQTPIQGTSELNPFSDPRQFDRSFPTLPTLTESRFPDPRMHYPGAMSAAFPYSATPSGTSISSLSVAGMPATSRFHHTYLPPPYPGAPQNQSGPFQANPSPYHLYYGTSSGSYQFSMVAGSSSGGDRSPTRMLASCTSSAASVAAGNLMNPSLGGQSDGVEADGSHSNSPTALSTPGRMDEAVWRPY

SEQ ID NO: 3781 - protein, 429 aa, Homo sapiens
MASNSIFDSFPTYSPTFIRDPSTSRRFTPPSPAFPCGGGGGKMGENSGALSAQAAVGPGGRARPEVRSMVDVLADHAGELVRTDSPNFLCSVLPSHWRCNKTLPVAFKVVALGDVPDGTVVTVMAGNDENYSAELRNASAVMKNQVARFNDLRFVGRSGRGKSFTLTITVFTNPTQVATYHRAIKVTVDGPREPRRHRQKLEDQTKPFPDRFGDLERLRMRVTPSTPSPRGSLSTTSHFSSQPQTPIQGTSELNPFSDPRQFDRSFPTLPTLTESRFPDPRMHYPGAMSAAFPYSATPSGTSISSLSVAGMPATSRFHHTYLPPPYPGAPQNQSGPFQANPSPYHLYYGTSSGSYQFSMVAGSSSGGDRSPTRMLASCTSSAASVAAGNLMNPSLGGQSDGVEADGSHSNSPTALSTPGRMDEAVWRPY

SEQ ID NO: 3782 - protein, 309 aa, Homo sapiens
MSDLGSEELEEEGENDIGEYEGGRNEAGERHGRGRARLPNGDTYEGSYEFGKRHGQGIYKFKNGARYIGEYVRNKKHGQGTFIYPDGSRYEGEWANDLRHGHGVYYYINNDTYTGEWFAHQRHGQGTYLYAETGSKYVGTWVNGQQEGTAELIHLNHRYQGKFLNKNPVGPGKYVFDVGCEQHGEYRLTDMERGEEEEEEELVTVVPKWKATQITELALWTPTLPKKPTSTDGPGQDAPGAESAGEPGEEAQALLEGFEGEMDMRPGDEDADVLREESREYDQEEFRYDMDEGNINSEEEETRQSDLQD

SEQ ID NO: 3783 - protein, 271 aa, Homo sapiens
MSDLGSEELEEEGENDIGGIYKFKNGARYIGEYVRNKKHGQGTFIYPDGSRYEGEWANDLRHGHGVYYYINNDTYTGEWFAHQRHGQGTYLYAETGSKYVGTWVNGQQEGTAELIHLNHRYQGKFLNKNPVGPGKYVFDVGCEQHGEYRLTDMERGEEEEEEELVTVVPKWKATQITELALWTPTLPKKPTSTDGPGQDAPGAESAGEPGEEAQALLEGFEGEMDMRPGDEDADVLREESREYDQEEFRYDMDEGNINSEEEETRQSDLQD

SEQ ID NO: 3784 - protein, 652 aa, Homo sapiens
MAMDEYLWMVILGFIIAFILAFSVGANDVANSFGTAVGSGVVTLRQACILASIFETTGSVLLGAKVGETIRKGIIDVNLYNETVETLMAGEVSAMVGSAVWQLIASFLRLPISGTHCIVGSTIGFSLVAIGTKGVQWMELVKIVASWFISPLLSGFMSGLLFVLIRIFILKKEDPVPNGLRALPVFYAATIAINVFSIMYTGAPVLGLVLPMWAIALISFGVALLFAFFVWLFVCPWMRRKITGKLQKEGALSRVSDESLSKVQEAESPVFKELPGAKANDDSTIPLTGAAGETLGTSEGTSAGSHPRAAYGRALSMTHGSVKSPISNGTFGFDGHTRSDGHVYHTVHKDSGLYKDLLHKIHIDRGPEEKPAQESNYRLLRRNNSYTCYTAAICGLPVHATFRAADSSAPEDSEKLVGDTVSYSKKRLRYDSYSSYCNAVAEAEIEAEEGGVEMKLASELADPDQPREDPAEEEKEEKDAPEVHLLFHFLQVLTACFGSFAHGGNDVSNAIGPLVALWLIYKQGGVTQEAATPVWLLFYGGVGICTGLWVWGRRVIQTMGKDLTPITPSSGFTIELASAFTVVIASNIGLPVSTTHCKVGSVVAVGWIRSRKAVDWRLFRNIFVAWFVTVPVAGLFSAAVMALLMYGILPYV

SEQ ID NO: 3785 - protein, 167 aa, Homo sapiens
MAASVCSGLLGPRVLSWSRELPCAWRALHTSPVCAKNRAARVRVSKGDKPVTYEEAHAPHYIAHRKGWLSLHTGNLDGEDHAAERTVEDVFLRKFMWGTFPGCLADQLVLKRRGNQLEICAVVLRQLSPHKYYFLVGYSETLLSYFYKCPVRLHLQTVPSKVVYKYL

SEQ ID NO: 3786 - protein, 276 aa, Homo sapiens
MDADSLLLSLELASGSGQGLSPDRRASLLTSLMLVKRDYRYDRVLFWGRILGLVADYYIAQGLSEDQLAPRKTLYSLNCTEWSLLPPATEEMVAQSSVVKGRFMGDPSYEYEHTELQKVNEGEKVFEEEIVVQIKEETRLVSVIDQIDKAVAIIPRGALFKTPFGPTHVNRTFEGLSLSEAKKLSSYFHFREPVELKNKTLLEKADLDPSLDFMDSLEHDIPKGSWSIQMERGNALVVLRSLLWPGLTFYHAPRTKNYGYVYVGTGEKNMDLPFML

SEQ ID NO: 3787 - protein, 306 aa, Homo sapiens
MDADSLLLSLELASGSGQGLSPDRRASLLTSLMLVKRDYRYDRVLFWGRILGLVADYYIAQGLSEDQLAPRKTLYSLNCTEWSLLPPATEEMVAQSSVVKGRFMGDPSYEYEHTELQKVNEGEKVFEEEIVIDKAVAIIPRGALFKTPFGPTHVNRTFEGLSLSEAKKLSSYFHFREPVELKNKTLLEKADLDPSLDFMDSLEHDIPKGSEAVVQGDFTWLLSRCGFGWPCSWDSCSVSMRVLEHPDGEGQCPGGAAQPALAGPHLLPCSPHQELWLRLRGHWREEHGLALHAIEWEPAWMFLNRV

SEQ ID NO: 3788 - protein, 554 aa, Homo sapiens
MPTVDDILEQVGESGWFQKQAFLILCLLSAAFAPICVGIVFLGFTPDHHCQSPGVAELSQRCGWSPAEELNYTVPGLGPAGEAFLGQCRRYEVDWNQSALSCVDPLASLATNRSHLPLGPCQDGWVYDTPGSSIVTEFNLVCADSWKLDLFQSCLNAGFLFGSLGVGYFADRFGRKLCLLGTVLVNAVSGVLMAFSPNYMSMLLFRLLQGLVSKGNWMAGYTLITEFVGSGSRRTVAIMYQMAFTVGLVALTGLAYALPHWRWLQLAVSLPTFLFLLYYWCVPESPRWLLSQKRNTEAIKIMDHIAQKNGKLPPADLKMLSLEEDVTEKLSPSFADLFRTPRLRKRTFILMYLWFTDSVLYQGLILHMGATSGNLYLDFLYSALVEIPGAFIALITIDRVGRIYPMAMSNLLAGAACLVMIFISPDLHWLNIIIMCVGRMGITIAIQMICLVNAELYPTFVRNLGVMVCSSLCDIGGIITPFIVFRLREVWQALPLILFAVLGLLAAGVTLLLPETKGVALPETMKDAENLGRKAKPKENTIYLKVQTSEPSGT

SEQ ID NO: 3789 - protein, 506 aa, Homo sapiens
MPTVDDILEQVGESGWFQKQAFLILCLLSAAFAPICVGIVFLGFTPDHHCQSPGVAELSQRCGWSPAEELNYTVPGLGPAGEAFLGQCRRYEVDWNQSALSCVDPLASLATNRSHLPLGPCQDGWVYDTPGSSIVTEFNLVCADSWKLDLFQSCLNAGFLFGSLGVGYFADRFGRKLCLLGTVLVNAVSGVLMAFSPNYMSMLLFRLLQGLVSKGNWMAGYTLITEFVGSGSRRTVAIMYQMAFTVGLVALTGLAYALPHWRWLQLAVSLPTFLFLLYYWCVPESPRWLLSQKRNTEAIKIMDHIAQKNGKLPPADLKMLSLEEDVTEKLSPSFADLFRTPRLRKRTFILMYLWFTDSVLYQGLILHMGATSGNLYLDFLYSALVEIPGAFIALITIDRVGRIYPMAMSNLLAGAACLVMIFISPDLHWLNIIIMCVGRMGITIAIQMICLVNAELYPTFVSGVGPACRGSDATSSRDQGGRFARDHEGRREPWEKSKAQRKHDLP

SEQ ID NO: 3790 - protein, 483 aa, Homo sapiens
MPTVDDILEQVGESGWFQKQAFLILCLLSAAFAPICVGIVFLGFTPDHHCQSPGVAELSQRCGWSPAEELNYTVPGLGPAGEAFLGQCRRYEVDWNQSALSCVDPLASLATNRSHLPLGPCQDGWVYDTPGSSIVTEFNLVCADSWKLDLFQSCLNAGFLFGSLGVGYFADRFGRKLCLLGTVLVNAVSGVLMAFSPNYMSMLLFRLLQGLVSKGNWMAGYTLITEFVGSGSRRTVAIMYQMAFTVGLVALTGLAYALPHWRWLQLAVSLPTFLFLLYYWCVPESPRWLLSQKRNTEAIKIMDHIAQKNGKLPPADLKMLSLEEDVTEKLSPSFADLFRTPRLRKRTFILMYLWFTDSVLYQGLILHMGATSGNLYLDFLYSALVEIPGAFIALITIDRVGRIYPMAMSNLLAGAACLVMIFISPDLHWLNIIIMCVGRMGITIAIQMICLVNAELYPTFVRKAKPKENTIYLKVQTSEPSGT

SEQ ID NO: 3791 - protein, 353 aa, Homo sapiens
MPTVDDILEQVGESGWFQKQAFLILCLLSAAFAPICVGIVFLGFTPDHHCQSPGVAELSQRCGWSPAEELNYTVPGLGPAGEAFLGQCRRYEVDWNQSALSCVDPLASLATNRSHLPLGPCQDGWVYDTPGSSIVTEFNLVCADSWKLDLFQSCLNAGFLFGSLGVGYFADRFGRKLCLLGTVLVNAVSGVLMAFSPNYMSMLLFRLLQGLVSKGNWMAGYTLITEFVGSGSRRTVAIMYQMAFTVGLVALTGLAYALPHWRWLQLAVSLPTFLFLLYYWCVPESPRWLLSQKRNTEAIKIMDHIAQKNGKLPPADLKMLSLEEDVTEKLSPSFADLFRTPRLRKRTFILMYL

SEQ ID NO: 3792 - protein, 173 aa, Homo sapiens
MPMKGRFPIRRTLQYLSQGNVVFKDSVKVMTVNYNTHGELGEGARKFVFFNIPQIQYKNPWVQIMMFKNMTPSPFLRFYLDSGEQVLVDVETKSNKEIMEHIRKILGKNEETLREEEEEKKQLSHPANFGPRKYCLRECICEVEGQVPCPSLVPLPKEMRGKYKAALKADAQD

SEQ ID NO: 3793 - protein, 145 aa, Homo sapiens
MPMKGRFPIRRTLQYLSQGNVVFKDSVKVMTVNYNTHGELGEGARKFVFFNIPQIQYKNPWVQIMMFKNMTPSPFLRFYLDSGEQVLVDVETKSNKEIMEHIRKILGKNEHYLAAPSKPVSSAVVPVTQEAEAGGSLEPRRLRLE

SEQ ID NO: 3794 - protein, 129 aa, Homo sapiens
MPMKGRFPIRRTLQYLSQGNVVFKDSVKVMTVNYNTHGELGEGARKFVFFNIPQIQYKNPWVQIMMFKNMTPSPFLRFYLGKPSGKRRRRKSSFLTQPTSALESTACGSASVKWKGRCPAPAWCHYPRR

SEQ ID NO: 3795 - protein, 555 aa, Homo sapiens
MPTTVDDVLEHGGEFHFFQKQMFFLLALLSATFAPIYVGIVFLGFTPDHRCRSPGVAELSLRCGWSPAEELNYTVPGPGPAGEASPRQCRRYEVDWNQSTFDCVDPLASLDTNRSRLPLGPCRDGWVYETPGSSIVTEFNLVCANSWMLDLFQSSVNVGFFIGSMSIGYIADRFGRKLCLLTTVLINAAAGVLMAISPTYTWMLIFRLIQGLVSKAGWLIGYILITEFVGRRYRRTVGIFYQVAYTVGLLVLAGVAYALPHWRWLQFTVSLPNFFFLLYYWCIPESPRWLISQNKNAEAMRIIKHIAKKNGKSLPASLQRLRLEEETGKKLNPSFLDLVRTPQIRKHTMILMYNWFTSSVLYQGLIMHMGLAGDNIYLDFFYSALVEFPAAFMIILTIDRIGRRYPWAASNMVAGAACLASVFIPGDLQWLKIIISCLGRMGITMAYEIVCLVNAELYPTFIRNLGVHICSSMCDIGGIITPFLVYRLTNIWLELPLMVFGVLGLVAGGLVLLLPETKGKALPETIEEAENMQRPRKNKEKMIYLQVQKLDIPLN

SEQ ID NO: 3796 - protein, 483 aa, Homo sapiens
MPTTVDDVLEHGGEFHFFQKQMFFLLALLSATFAPIYVGIVFLGFTPDHRCRSPGVAELSLRCGWSPAEELNYTVPGPGPAGEASPRQCRRYEVDWNQSTFDCVDPLASLDTNRSRLPLGPCRDGWVYETPGSSIVTEFNLVCANSWMLDLFQSSVNVGFFIGSMSIGYIADRFGRKLCLLTTVLINAAAGVLMAISPTYTWMLIFRLIQGLVSKAGWLIGYILITEFVGRRYRRTVGIFYQVAYTVGLLVLAGVAYALPHWRWLQFTVSLPNFFFLLYYWCIPESPRWLISQNKNAEAMRIIKHIAKKNGKSLPASLQRLRLEEETGKKLNPSFLDLVRTPQIRKHTMILMYNWFTSSVLYQGLIMHMGLAGDNIYLDFFYSALVEFPAAFMIILTIDRIGRRYPWAASNMVAGAACLASVFIPGGKFQVKLESYLQDPGERECHGPLIGKPCNLSSKSIWKDKLEGSIWDPSEQIHMASLL

SEQ ID NO: 3797 - protein, 242 aa, Homo sapiens
MPTTVDDVLEHGGEFHFFQKQMFFLLALLSATFAPIYVGIVFLGFTPDHRCRSPGVAELSLRCGWSPAEELNYTVPGPGPAGEASPRQCRRYEVDWNQSTFDCVDPLASLDTNRSRLPLGPCRDGWVYETPGSSIVTEFNLVCANSWMLDLFQSSVNVGFFIGSMSIGYIADRFGRKLCLLTTVLINAAAGVLMAISPTYTWMLIFRLIQGLVSKAGWLIGYILSKNVCACNCENKATSLPK

SEQ ID NO: 3798 - protein, 556 aa, Homo sapiens
MPSFDEALQRVGEFGRFQRRVFLLLCLTGVTFAFLFVGVVFLGTQPDHYWCRGPSAAALAERCGWSPEEEWNRTAPASRGPEPPERRGRCQRYLLEAANDSASATSALSCADPLAAFPNRSAPLVPCRGGWRYAQAHSTIVSEFDLVCVNAWMLDLTQAILNLGFLTGAFTLGYAADRYGRIVIYLLSCLGVGVTGVVVAFAPNFPVFVIFRFLQGVFGKGTWMTCYVIVTEIVGSKQRRIVGIVIQMFFTLGIIILPGIAYFIPNWQGIQLAITLPSFLFLLYYWVVPESPRWLITRKKGDKALQILRRIAKCNGKYLSSNYSEITVTDEEVSNPSFLDLVRTPQMRKCTLILMFAWFTSAVVYQGLVMRLGIIGGNLYIDFFISGVVELPGALLILLTIERLGRRLPFAASNIVAGVACLVTAFLPEGIAWLRTTVATLGRLGITMAFEIVYLVNSELYPTTLRNFGVSLCSGLCDFGGIIAPFLLFRLAAVWLELPLIIFGILASICGGLVMLLPETKGIALPETVDDVEKLGSPHSCKCGRNKKTPVSRSHL

SEQ ID NO: 3799 - protein, 551 aa, Homo sapiens
MRDYDEVIAFLGEWGPFQRLIFFLLSASIIPNGFNGMSVVFLAGTPEHRCRVPDAANLSSAWRNNSVPLRLRDGREVPHSCSRYRLATIANFSALGLEPGRDVDLGQLEQESCLDGWEFSQDVYLSTVVTEWNLVCEDNWKVPLTTSLFFVGVLLGSFVSGQLSDRFGRKNVLFATMAVQTGFSFLQIFSISWEMFTVLFVIVGMGQISNYVVAFILGTEILGKSVRIIFSTLGVCTFFAVGYMLLPLFAYFIRDWRMLLLALTVPGVLCVPLWWFIPESPRWLISQRRFREAEDIIQKAAKMNNIAVPAVIFDSVEELNPLKQQKAFILDLFRTRNIAIMTIMSLLLWMLTSVGYFALSLDAPNLHGDAYLNCFLSALIEIPAYITAWLLLRTLPRRYIIAAVLFWGGGVLLFIQLVPVDYYFLSIGLVMLGKFGITSAFSMLYVFTAELYPTLVRNMAVGVTSTASRVGSIIAPYFVYLGAYNRMLPYIVMGSLTVLIGILTLFFPESLGMTLPETLEQMQKVKWFRSGKKTRDSMETEENPKVLITAF

SEQ ID NO: 3800 - protein, 557 aa, Homo sapiens
MRDYDEVTAFLGEWGPFQRLIFFLLSASIIPNGFTGLSSVFLIATPEHRCRVPDAANLSSAWRNHTVPLRLRDGREVPHSCRRYRLATIANFSALGLEPGRDVDLGQLEQESCLDGWEFSQDVYLSTIVTEWNLVCEDDWKAPLTISLFFVGVLLGSFISGQLSDRFGRKNVLFVTMGMQTGFSFLQIFSKNFEMFVVLFVLVGMGQISNYVAAFVLGTEILGKSVRIIFSTLGVCIFYAFGYMVLPLFAYFIRDWRMLLVALTMPGVLCVALWWFIPESPRWLISQGRFEEAEVIIRKAAKANGIVVPSTIFDPSELQDLSSKKQQSHNILDLLRTWNIRMVTIMSIMLWMTISVGYFGLSLDTPNLHGDIFVNCFLSAMVEVPAYVLAWLLLQYLPRRYSMATALFLGGSVLLFMQLVPPDLYYLATVLVMVGKFGVTAAFSMVYVYTAELYPTVVRNMGVGVSSTASRLGSILSPYFVYLGAYDRFLPYILMGSLTILTAILTLFLPESFGTPLPDTIDQMLRVKGMKHRKTPSHTRMLKDGQERPTILKSTAF

SEQ ID NO: 3801 - protein, 221 aa, Homo sapiens
MWILLFQLSSALCFRMTISVGYFGLSLDTPNLHGDIFVNCFLSAMVEVPAYVLAWLLLQYLPRRYSMATALFLGGSVLLFMQLVPPDLYYLATVLVMVGKFGVTAAFSMVYVYTAELYPTVVRNMGVGVSSTASRLGSILSPYFVYLGAYDRFLPYILMGSLTILTAILTLFLPESFGTPLPDTIDQMLRVKGMKHRKTPSHTRMLKDGQERPTILKSTAF

SEQ ID NO: 3802 - protein, 581 aa, Homo sapiens
MRDYDEVTAFLGEWGPFQRLIFFLLSASIIPNGFTGLSSVFLIATPEHRCRVPDAANLSSAWRNHTVPLRLRDGREVPHSCRRYRLATIANFSALGLEPGRDVDLGQLEQESCLDGWEFSQDVYLSTIVTEQDSGAYNAMKNRMGKKPALCLPAQWNLVCEDDWKAPLTISLFFVGVLLGSFISGQLSDRFGRKNVLFVTMGMQTGFSFLQIFSKNFEMFVVLFVLVGMGQISNYVAAFVLGTEILGKSVRIIFSTLGVCIFYAFGYMVLPLFAYFIRDWRMLLVALTMPGVLCVALWWFIPESPRWLISQGRFEEAEVIIRKAAKANGIVVPSTIFDPSELQDLSSKKQQSHNILDLLRTWNIRMVTIMSIMLWMTISVGYFGLSLDTPNLHGDIFVNCFLSAMVEVPAYVLAWLLLQYLPRRYSMATALFLGGSVLLFMQLVPPDLYYLATVLVMVGKFGVTAAFSMVYVYTAELYPTVVRNMGVGVSSTASRLGSILSPYFVYLGAYDRFLPYILMGSLTILTAILTLFLPESFGTPLPDTIDQMLRVKGMKHRKTPSHTRMLKDGQERPTILKSTAF

SEQ ID NO: 3803 - protein, 563 aa, Homo sapiens
MAFNDLLQQVGGVGRFQQIQVTLVVLPLLLMASHNTLQNFTAAIPTHHCRPPADANLSKNGGLEVWLPRDRQGQPESCLRFTSPQWGLPFLNGTEANGTGATEPCTDGWIYDNSTFPSTIVTEWDLVCSHRALRQLAQSLYMVGVLLGAMVFGYLADRLGRRKVLILNYLQTAVSGTCAAFAPNFPIYCAFRLLSGMALAGISLNCMTLNVEWMPIHTRACVGTLIGYVYSLGQFLLAGVAYAVPHWRHLQLLVSAPFFAFFIYSWFFIESARWHSSSGRLDLTLRALQRVARINGKREEGAKLSMEVLRASLQKELTMGKGQASAMELLRCPTLRHLFLCLSMLWFATSFAYYGLVMDLQGFGVSIYLIQVIFGAVDLPAKLVGFLVINSLGRRPAQMAALLLAGICILLNGVIPQDQSIVRTSLAVLGKGCLAASFNCIFLYTGELYPTMIRQTGMGMGSTMARVGSIVSPLVSMTAELYPSMPLFIYGAVPVAASAVTVLLPETLGQPLPDTVQDLESRWAPTQKEAGIYPRKGKQTRQQQEHQKYMVPLQASAQEKNGL

SEQ ID NO: 3804 - protein, 550 aa, Homo sapiens
MAFNDLLQQVGGVGRFQQIQVTLVVLPLLLMASHNTLQNFTAAIPTHHCRPPADANLSKNGGLEVWLPRDRQGQPESCLRFTSPQWGLPFLNGTEANGTGATEPCTDGWIYDNSTFPSTIVTEWDLVCSHRALRQLAQSLYMVGVLLGAMVFGYLADRLGRRKVLILNYLQTAVSGTCAAFAPNFPIYCAFRLLSGMALAGISLNCMTLNVEWMPIHTRACVGTLIGYVYSLGQFLLAGVAYAVPHWRHLQLLVSAPFFAFFIYSWFFIESARWHSSSGRLDLTLRALQRVARINGKREEGAKLSMEVLRASLQKELTMGKGQASAMELLRCPTLRHLFLCLSMLWFATSFAYYGLVMDLQGFGVSIYLIQVIFGAVDLPAKLVGFLVINSLGRRPAQMAALLLAGICILLNGVIPQDQSIVRTSLAVLGKGCLAASFNCIFLYTGELYPTMIRQTGMGMGSTMARVGSIVSPLVSMTAELYPSMPLFIYGAVPVAASAVTVLLPETLGQPLPDTVQDLESRKGKQTRQQQEHQKYMVPLQASAQEKNGL

SEQ ID NO: 3805 - protein, 506 aa, Homo sapiens
MAFNDLLQQVGGVGRFQQIQVTLVVLPLLLMASHNTLQNFTAAIPTHHCRPPADANLSKNGGLEVWLPRDRQGQPESCLRFTSPQWGLPFLNGTEANGTGATEPCTDGWIYDNSTFPSTIVTEWDLVCSHRALRQLAQSLYMVGVLLGAMVFGYLADRLGRRKVLILNYLQTAVSGTCAAFAPNFPIYCAFRLLSGMALAGISLNCMTLNVEWMPIHTRACVGTLIGYVYSLGQFLLAGVAYAVPHWRHLQLLVSAPFFAFFIYSWFFIESARWHSSSGRLDLTLRALQRVARINGKREEGAKLSMEVLRASLQKELTMGKGQASAMELLRCPTLRHLFLCLSMLWFATSFAYYGLVMDLQGFGVSIYLIQVIFGAVDLPAKLVGFLVINSLGRRPAQMAALLLAGICILLNGVIPQDQSIVRTSLAVLGKGCLAASFNCIFLYTGELYPTMIRAVTVLLPETLGQPLPDTVQDLESRKGKQTRQQQEHQKYMVPLQASAQEKNGL

SEQ ID NO: 3806 - protein, 519 aa, Homo sapiens
MAFNDLLQQVGGVGRFQQIQVTLVVLPLLLMASHNTLQNFTAAIPTHHCRPPADANLSKNGGLEVWLPRDRQGQPESCLRFTSPQWGLPFLNGTEANGTGATEPCTDGWIYDNSTFPSTIVTEWDLVCSHRALRQLAQSLYMVGVLLGAMVFGYLADRLGRRKVLILNYLQTAVSGTCAAFAPNFPIYCAFRLLSGMALAGISLNCMTLNVEWMPIHTRACVGTLIGYVYSLGQFLLAGVAYAVPHWRHLQLLVSAPFFAFFIYSWFFIESARWHSSSGRLDLTLRALQRVARINGKREEGAKLSMEVLRASLQKELTMGKGQASAMELLRCPTLRHLFLCLSMLWFATSFAYYGLVMDLQGFGVSIYLIQVIFGAVDLPAKLVGFLVINSLGRRPAQMAALLLAGICILLNGVIPQDQSIVRTSLAVLGKGCLAASFNCIFLYTGELYPTMIRAVTVLLPETLGQPLPDTVQDLESRWAPTQKEAGIYPRKGKQTRQQQEHQKYMVPLQASAQEKNGL

SEQ ID NO: 3807 - protein, 548 aa, Homo sapiens
MGFEELLEQVGGFGPFQLRNVALLALPRVLLPLHFLLPIFLAAVPAHRCALPGAPANFSHQDVWLEAHLPREPDGTLSSCLRFAYPQALPNTTLGEERQSRGELEDEPATVPCSQGWEYDHSEFSSTIATESQWDLVCEQKGLNRAASTFFFAGVLVGAVAFGYLSDRFGRRRLLLVAYVSTLVLGLASAASVSYVMFAITRTLTGSALAGFTIIVMPLELEWLDVEHRTVAGVLSSTFWTGGVMLLALVGYLIRDWRWLLLAVTLPCAPGILSLWWVPESARWLLTQGHVKEAHRYLLHCARLNGRPVCEDSFSQEAVSKVAAGERVVRRPSYLDLFRTPRLRHISLCCVVVWFGVNFSYYGLSLDVSGLGLNVYQTQLLFGAVELPSKLLVYLSVRYAGRRLTQAGTLLGTALAFGTRLLVSSDMKSWSTVLAVMGKAFSEAAFTTAYLFTSELYPTVLRQTGMGLTALVGRLGGSLAPLAALLDGVWLSLPKLTYGGIALLAAGTALLLPETRQAQLPETIQDVERKSAPTSLQEEEMPMKQVQN

SEQ ID NO: 3808 - protein, 546 aa, Homo sapiens
MGFEELLEQVGGFGPFQLRNVALLALPRVLLPLHFLLPIFLAAVPAHRCALPGAPANFSHQDVWLEAHLPREPDGTLSSCLRFAYPQALPNTTLGEERQSRGELEDEPATVPCSQGWEYDHSEFSSTIATEWDLVCEQKGLNRAASTFFFAGVLVGAVAFGYLSDRFGRRRLLLVAYVSTLVLGLASAASVSYVMFAITRTLTGSALAGFTIIVMPLELEWLDVEHRTVAGVLSSTFWTGGVMLLALVGYLIRDWRWLLLAVTLPCAPGILSLWWVPESARWLLTQGHVKEAHRYLLHCARLNGRPVCEDSFSQEAVSKVAAGERVVRRPSYLDLFRTPRLRHISLCCVVVWFGVNFSYYGLSLDVSGLGLNVYQTQLLFGAVELPSKLLVYLSVRYAGRRLTQAGTLLGTALAFGTRLLVSSDMKSWSTVLAVMGKAFSEAAFTTAYLFTSELYPTVLRQTGMGLTALVGRLGGSLAPLAALLDGVWLSLPKLTYGGIALLAAGTALLLPETRQAQLPETIQDVERKSAPTSLQEEEMPMKQVQN

SEQ ID NO: 3809 - protein, 539 aa, Homo sapiens
MGFEELLEQVGGFGPFQLRNVALLALPRVLLPLHFLLPIFLAAVPAHRCALPGAPANFSHQDVWLEAHLPREPDGTLSSCLRFAYPQALPNTTLGEERQSRGELEDEPATVPCSQGWEYDHSEFSSTIATEWDLVCEQKGLNRAASTFFFAGVLVGAVAFGYLSDRFGRRRLLLVAYVSTLVLGLASAASVSYVMFAITRTLTGSALAGFTIIVMPLELEWLDVEHRTVAGVLSSTFWTGGVMLLALVGYLIRDWRWLLLAVTLPCAPGILSLWWVPESARWLLTQGHVKEAHRYLLHCARLNGRPVCEDSFSQEAVSKVAAGERVVRRPSYLDLFRTPRLRHISLCCVVVWFGVNFSYYGLSLDVSGLGLNVYQTQLLFGAVELPSKLLVYLSVRYAGRRLTQAGTLLGTALAFGTRLLVSSDMKSWSTVLAVMGKAFSEAAFTTAYLFTSELYPTVLRQTGMGLTALVGRLGGSLAPLAALLDGVWLSLPKLTYGGIALLAAGTALLLPETRQAQLPETIQDVERKRCVHRTVSVYV

SEQ ID NO: 3810 - protein, 241 aa, Homo sapiens
MLQPHLLPYQAVSKVAAGERVVRRPSYLDLFRTPRLRHISLCCVVVWFGVNFSYYGLSLDVSGLGLNVYQTQLLFGAVELPSKLLVYLSVRYAGRRLTQAGTLLGTALAFGTRLLVSSDMKSWSTVLAVMGKAFSEAAFTTAYLFTSELYPTVLRQTGMGLTALVGRLGGSLAPLAALLDGVWLSLPKLTYGGIALLAAGTALLLPETRQAQLPETIQDVERKSAPTSLQEEEMPMKQVQN

SEQ ID NO: 3811 - protein, 542 aa, Homo sapiens
MTFSEILDRVGSMGHFQFLHVAILGLPILNMANHNLLQIFTAATPVHHCRPPHNASTGPWVLPMGPNGKPERCLRFVHPPNASLPNDTQRAMEPCLDGWVYNSTKDSIVTEWDLVCNSNKLKEMAQSIFMAGILIGGLVLGDLSDRFGRRPILTCSYLLLAASGSGAAFSPTFPIYMVFRFLCGFGISGITLSTVILNVEWVPTRMRAIMSTALGYCYTFGQFILPGLAYAIPQWRWLQLTVSIPFFVFFLSSWWTPESIRWLVLSGKSSKALKILRRVAVFNGKKEEGERLSLEELKLNLQKEISLAKAKYTASDLFRIPMLRRMTFCLSLAWFATGFAYYSLAMGVEEFGVNLYILQIIFGGVDVPAKFITILSLSYLGRHTTQAAALLLAGGAILALTFVPLDLQTVRTVLAVFGKGCLSSSFSCLFLYTSELYPTVIRQTGMGVSNLWTRVGSMVSPLVKITGEVQPFIPNIIYGITALLGGSAALFLPETLNQPLPETIEDLENWSLRAKKPKQEPEVEKASQRIPLQPHGPGLGSS

SEQ ID NO: 3812 - protein, 551 aa, Homo sapiens
MTFSEILDRVGSMGHFQFLHVAILGLPILNMANHNLLQIFTAATPVHHCRPPHNASTGPWVLPMGPNGKPERCLRFVHPPNASLPNDTQRAMEPCLDGWVYNSTKDSIVTEWDLVCNSNKLKEMAQSIFMAGILIGGLVLGDLSDRFGRRPILTCSYLLLAASGSGAAFSPTFPIYMVFRFLCGFGISGITLSTVILNVEWVPTRMRAIMSTALGYCYTFGQFILPGLAYAIPQWRWLQLTVSIPFFVFFLSSWWTPESIRWLVLSGKSSKALKILRRVAVFNGKKEEGERLSLEELKLNLQKEISLAKAKYTASDLFRIPMLRRMTFCLSLAWFATGFAYYSLAMGVEEFGVNLYILQIIFGGVDVPAKFITILSLSYLGRHTTQAAALLLAGGAILALTFVPLDLQTVRTVLAVFGKGCLSSSFSCLFLYTSELYPTVIRQTGMGVSNLWTRVGSMVSPLVKITGEVQPFIPNIIYGITALLGGSAALFLPETLNQPLPETIEDLENWSVTASGPPRSLRAKKPKQEPEVEKASQRIPLQPHGPGLGSS

SEQ ID NO: 3813 - protein, 419 aa, Homo sapiens
MAQSIFMAGILIGGLVLGDLSDRFGRRPILTCSYLLLAASGSGAAFSPTFPIYMVFRFLCGFGISGITLSTVILNVEWVPTRMRAIMSTALGYCYTFGQFILPGLAYAIPQWRWLQLTVSIPFFVFFLSSWWTPESIRWLVLSGKSSKALKILRRVAVFNGKKEEGERLSLEELKLNLQKEISLAKAKYTASDLFRIPMLRRMTFCLSLAWFATGFAYYSLAMGVEEFGVNLYILQIIFGGVDVPAKFITILSLSYLGRHTTQAAALLLAGGAILALTFVPLDLQTVRTVLAVFGKGCLSSSFSCLFLYTSELYPTVIRQTGMGVSNLWTRVGSMVSPLVKITGEVQPFIPNIIYGITALLGGSAALFLPETLNQPLPETIEDLENWSLRAKKPKQEPEVEKASQRIPLQPHGPGLGSS

SEQ ID NO: 3814 - protein, 110 aa, Homo sapiens
MGVEEFGVNLYILQIIFGGVDVPAKFITILSLSYLGRHTTQAAALLLAGGAILALTFVPLGERLGLPQNPLEEAARLGARDFTAGSASKSLCYLEQVPALSGAQGLSSRK

SEQ ID NO: 3815 - protein, 451 aa, Homo sapiens
MEPCLDGWVYNSTKDSIVTEWDLVCNSNKLKEMAQSIFMAGILIGGLVLGDLSDRFGRRPILTCSYLLLAASGSGAAFSPTFPIYMVFRFLCGFGISGITLSTVILNVEWVPTRMRAIMSTALGYCYTFGQFILPGLAYAIPQWRWLQLTVSIPFFVFFLSSWWTPESIRWLVLSGKSSKALKILRRVAVFNGKKEEGERLSLEELKLNLQKEISLAKAKYTASDLFRIPMLRRMTFCLSLAWFATGFAYYSLAMGVEEFGVNLYILQIIFGGVDVPAKFITILSLSYLGRHTTQAAALLLAGGAILALTFVPLDLQTVRTVLAVFGKGCLSSSFSCLFLYTSELYPTVIRQTGMGVSNLWTRVGSMVSPLVKITGEVQPFIPNIIYGITALLGGSAALFLPETLNQPLPETIEDLENWSLRAKKPKQEPEVEKASQRIPLQPHGPGLGSS

SEQ ID NO: 3816 - protein, 443 aa, Homo sapiens
MRLTRKRLCSFLIALYCLFSLYAAYHVFFGRRRQAPAGSPRGLRKGAAPARERRGREQSTLESEEWNPWEGDEKNEQQHRFKTSLQILDKSTKGKTDLSVQIWGKAAIGLYLWEHIFEGLLDPSDVTAQWREGKSIVGRTQYSFITGPAVIPGYFSVDVNNVVLILNGREKAKIFYATQWLLYAQNLVQIQKLQHLAVVLLGNEHCDNEWINPFLKRNGGFVELLFIIYDSPWINDVDVFQWPLGVATYRNFPVVEASWSMLHDERPYLCNFLGTIYENSSRQALMNILKKDGNDKLCWVSAREHWQPQETNESLKNYQDALLQSDLTLCPVGVNTECYRIYEACSYGSIPVVEDVMTAGNCGNTSVHHGAPLQLLKSMGAPFIFIKNWKELPAVLEKEKTIILQEKIERRKMLLQWYQHFKTELKMKFTNILESSFLMNNKS

SEQ ID NO: 3817 - protein, 553 aa, Homo sapiens
MAFQDLLGHAGDLWRFQILQTVFLSIFAVATYLHFMLENFTAFIPGHRCWVHILDNDTVSDNDTGALSQDALLRISIPLDSNMRPEKCRRFVHPQWQLLHLNGTFPNTSDADMEPCVDGWVYDRISFSSTIVTEWDLVCDSQSLTSVAKFVFMAGMMVGGILGGHLSDRFGRRFVLRWCYLQVAIVGTCAALAPTFLIYCSLRFLSGIAAMSLITNTIMLIAEWATHRFQAMGITLGMCPSGIAFMTLAGLAFAIRDWHILQLVVSVPYFVIFLTSSWLLESARWLIINNKPEEGLKELRKAAHRSGMKNARDTLTLEILKSTMKKELEAAQKKKPSLCEMLHMPNICKRISLLSFTRFANFMAYFGLNLHVQHLGNNVFLLQTLFGAVILLANCVAPWALKYMNRRASQMLLMFLLAICLLAIIFVPQEMQTLREVLATLGLGASALANTLAFAHGNEVIPTIIRARAMGINATFANIAGALAPLMMILSVYSPPLPWIIYGVFPFISGFAFLLLPETRNKPLFDTIQDEKNERKDPREPKQEDPRVEVTQF

SEQ ID NO: 3818 - protein, 238 aa, Homo sapiens
MAFQDLLGHAGDLWRFQILQTVFLSIFAVATYLHFMLENFTAFIPGHRCWVHILDNDTVSDNDTGALSQDALLRISIPLDSNMRPEKCRRFVHPQWQLLHLNGTFPNTSDADMEPCVDGWVYDRISFSSTIVTEWDLVCDSQSLTSVAKFVFMAGMMVGGILGGHLSDSSRVGNTQIPGHGNYIGNVPFWYCIYDPGRPGFCHSRLAYPPAGGVCTILCDLSDLKLAARVCSVAHYQQ

SEQ ID NO: 3819 - protein, 541 aa, Homo sapiens
MAFEELLSQVGGLGRFQMLHLVFILPSLMLLIPHILLENFAAAIPGHRCWVHMLDNNTGSGNETGILSEDALLRISIPLDSNLRPEKCRRFVHPQWQLLHLNGTIHSTSEADTEPCVDGWVYDQSYFPSTIVTKWDLVCDYQSLKSVVQFLLLTGMLVGGIIGGHVSDRFGRRFILRWCLLQLAITDTCAAFAPTFPVYCVLRFLAGFSSMIIISNNSLPITEWIRPNSKALVVILSSGALSIGQIILGGLAYVFRDWQTLHVVASVPFFVFFLLSRWLVESARWLIITNKLDEGLKALRKVARTNGIKNAEETLNIEVVRSTMQEELDAAQTKTTVCDLFRNPSMRKRICILVFLRFANTIPFYGTMVNLQHVGSNIFLLQVLYGAVALIVRCLALLTLNHMGRRISQILFMFLVGLSILANTFVPKEMQTLRVALACLGIGCSAATFSSVAVHFIELIPTVLRARASGIDLTASRIGAALAPLLMTLTVFFTTLPWIIYGIFPIIGGLIVFLLPETKNLPLPDTIKDVENQKKNLKEKA

SEQ ID NO: 3820 - protein, 269 aa, Homo sapiens
MLVGGIIGGHVSDRFGRRFILRWCLLQLAITDTCAAFAPTFPVYCVLRFLAGFSSMIIISNNSLPITEWIRPNSKALVVILSSGALSIGQIILGGLAYVFRDWQTLHVVASVPFFVFFLLSRWLVESARWLIITNKLDEGLKALRKVARTNGIKNAEETLNIEVVRSTMQEELDAAQTKTTVCDLFRNPSMRKRICILVFLRFANTIPFYGTMVNLQHVGSNIFLLQKCRPCVWLWHVWESAVLLLLFPVLLFTSLNSSPLFSGQELQE

SEQ ID NO: 3821 - protein, 550 aa, Homo sapiens
MAFSKLLEQAGGVGLFQTLQVLTFILPCLMIPSQMLLENFSAAIPGHRCWTHMLDNGSAVSTNMTPKALLTISIPPGPNQGPHQCRRFRQPQWQLLDPNATATSWSEADTEPCVDGWVYDRSVFTSTIVAKWDLVCSSQGLKPLSQSIFMSGILVGSFIWGLLSYRFGRKPMLSWCCLQLAVAGTSTIFAPTFVIYCGLRFVAAFGMAGIFLSSLTLMVEWTTTSRRAVTMTVVGCAFSAGQAALGGLAFALRDWRTLQLAASVPFFAISLISWWLPESARWLIIKGKPDQALQELRKVARINGHKEAKNLTIEVLMSSVKEEVASAKEPRSVLDLFCVPVLRWRSCAMLVVNFSLLISYYGLVFDLQSLGRDIFLLQALFGAVDFLGRATTALLLSFLGRRTIQAGSQAMAGLAILANMLVPQDLQTLRVVFAVLGKGCFGISLTCLTIYKAELFPTPVRMTADGILHTVGRLGAMMGPLILMSRQALPLLPPLLYGVISIASSLVVLFFLPETQGLPLPDTIQDLESQKSTAAQGNRQEAVTVESTSL

SEQ ID NO: 3822 - protein, 442 aa, Homo sapiens
MAFSKLLEQAGGVGLFQTLQVLTFILPCLMIPSQMLLENFSAAIPGHRCWTHMLDNGSAVSTNMTPKALLTISIPPGPNQGPHQCRRFRQPQWQLLDPNATATSWSEADTEPCVDGWVYDRSVFTSTIVAKWDLVCSSQGLKPLSQSIFMSGILVGSFIWGLLSYRFGRKPMLSWCCLQLAVAGTSTIFAPTFVIYCGLRFVAAFGMAGIFLSSLTLMVEWTTTSRRAVTMTVVGCAFSAGQAALGGLAFALRDWRTLQLAASVPFFAISLISWWLPESARWLIIKGKPDQALQELRKVARINGHKEAKNLTIEVLMSSVKEEVASAKEPRSVLDLFCVPVLRWRSCAMLVVKMTADGILHTVGRLGAMMGPLILMSRQALPLLPPLLYGVISIASSLVVLFFLPETQGLPLPDTIQDLESQKSTAAQGNRQEAVTVESTSL

SEQ ID NO: 3823 - protein, 553 aa, Homo sapiens
MAFSELLDLVGGLGRFQVLQTMALMVSIMWLCTQSMLENFSAAVPSHRCWAPLLDNSTAQASILGSLSPEALLAISIPPGPNQRPHQCRRFRQPQWQLLDPNATATSWSEADTEPCVDGWVYDRSIFTSTIVAKWNLVCDSHALKPMAQSIYLAGILVGAAACGPASDRFGRRLVLTWSYLQMAVMGTAAAFAPAFPVYCLFRFLLAFAVAGVMMNTGTLLMEWTAARARPLVMTLNSLGFSFGHGLTAAVAYGVRDWTLLQLVVSVPFFLCFLYSWWLAESARWLLTTGRLDWGLQELWRVAAINGKGAVQDTLTPEVLLSAMREELSMGQPPASLGTLLRMPGLRFRTCISTLCWFAFGFTFFGLALDLQALGSNIFLLQMFIGVVDIPAKMGALLLLSHLGRRPTLAASLLLAGLCILANTLVPHEMGALRSALAVLGLGGVGAAFTCITIYSSELFPTVLRMTAVGLGQMAARGGAILGPLVRLLGVHGPWLPLLVYGTVPVLSGLAALLLPETQSLPLPDTIQDVQNQAVKKATHGTLGNSVLKSTQF

SEQ ID NO: 3824 - protein, 445 aa, Homo sapiens
MAFSELLDLVGGLGRFQVLQTMALMVSIMWLCTQSMLENFSAAVPSHRCWAPLLDNSTAQASILGSLSPEALLAISIPPGPNQRPHQCRRFRQPQWQLLDPNATATSWSEADTEPCVDGWVYDRSIFTSTIVAKWNLVCDSHALKPMAQSIYLAGILVGAAACGPASDRWLAESARWLLTTGRLDWGLQELWRVAAINGKGAVQDTLTPEVLLSAMREELSMGQPPASLGTLLRMPGLRFRTCISTLCWFAFGFTFFGLALDLQALGSNIFLLQMFIGVVDIPAKMGALLLLSHLGRRPTLAASLLLAGLCILANTLVPHEMGALRSALAVLGLGGVGAAFTCITIYSSELFPTVLRMTAVGLGQMAARGGAILGPLVRLLGVHGPWLPLLVYGTVPVLSGLAALLLPETQSLPLPDTIQDVQNQAVKKATHGTLGNSVLKSTQF

SEQ ID NO: 3825 - protein, 332 aa, Homo sapiens
MEWTAARARPLVMTLNSLGFSFGHGLTAAVAYGVRDWTLLQLVVSVPFFLCFLYSWWLAESARWLLTTGRLDWGLQELWRVAAINGKGAVQDTLTPEVLLSAMREELSMGQPPASLGTLLRMPGLRFRTCISTLCWFAFGFTFFGLALDLQALGSNIFLLQMFIGVVDIPAKMGALLLLSHLGRRPTLAASLLLAGLCILANTLVPHEMGALRSALAVLGLGGVGAAFTCITIYSSELFPTVLRMTAVGLGQMAARGGAILGPLVRLLGVHGPWLPLLVYGTVPVLSGLAALLLPETQSLPLPDTIQDVQNQAVKKATHGTLGNSVLKSTQF

SEQ ID NO: 3826 - protein, 519 aa, Homo sapiens
MAFSELLDLVGGLGRFQVLQTMALMVSIMWLCTQSMLENFSAAVPSHRCWAPLLDNSTAQASILGSLSPEALLAISIPPGPNQRPHQCRRFRQPQWQLLDPNATATSWSEADTEPCVDGWVYDRSIFTSTIVAKWNLVCDSHALKPMAQSIYLAGILVGAAACGPASDRFGRRLVLTWSYLQMAVMVMEWTAARARPLVMTLNSLGFSFGHGLTAAVAYGVRDWTLLQLVVSVPFFLCFLYSWWLAESARWLLTTGRLDWGLQELWRVAAINGKGAVQDTLTPEVLLSAMREELSMGQPPASLGTLLRMPGLRFRTCISTLCWFAFGFTFFGLALDLQALGSNIFLLQMFIGVVDIPAKMGALLLLSHLGRRPTLAASLLLAGLCILANTLVPHEMGALRSALAVLGLGGVGAAFTCITIYSSELFPTVLRMTAVGLGQMAARGGAILGPLVRLLGVHGPWLPLLVYGTVPVLSGLAALLLPETQSLPLPDTIQDVQNQAVKKATHGTLGNSVLKSTQF

SEQ ID NO: 3827 - protein, 551 aa, Homo sapiens
MAQFVQVLAEIGDFGRFQIQLLILLCVLNFLSPFYFFAHVFMVLDEPHHCAVAWVKNHTFNLSAAEQLVLSVPLDTAGHPEPCLMFRPPPANASLQDILSHRFNETQPCDMGWEYPENRLPSLKNEFNLVCDRKHLKDTTQSVFMAGLLVGTLMFGPLCDRIGRKATILAQLLLFTLIGLATAFVPSFELYMALRFAVATAVAGLSFSNVTLLTEWVGPSWRTQAVVLAQCNFSLGQMVLAGLAYGFRNWRLLQITGTAPGLLLFFYFWALPESARWLLTRGRMDEAIQLIQKAASVNRRKLSPELMNQLVPEKTGPSGNALDLFRHPQLRKVTLIIFCVWFVDSLGYYGLSLQVGDFGLDVYLTQLIFGAVEVPARCSSIFMMQRFGRKWSQLGTLVLGGLMCIIIIFIPADLPVVVTMLAVVGKMATAAAFTISYVYSAELFPTILRQTGMGLVGIFSRIGGILTPLVILLGEYHAALPMLIYGSLPIVAGLLCTLLPETHGQGLKDTLQDLELGPHPRSPKSVPSEKETEAKGRTSSPGVAFVSSTYF

SEQ ID NO: 3828 - protein, 468 aa, Homo sapiens
MAQFVQVLAEIGDFGRFQIQLLILLCVLNFLSPFYFFAHVFMVLDEPHHCAVAWVKNHTFNLSAAEQLVLSVPLDTAGHPEPCLMFRPPPANASLQDILSHRFNETQPCDMGWEYPENRLPSLKNEFNLVCDRKHLKDTTQSVFMAGLLVGTLMFGPLCDRIGRKATILAQLLLFTLIGLATAFVPSFELYMALRFAVATAVAGLSFSNVTLLTEWVGPSWRTQAVVLAQCNFSLGQMVLAGLAYGFRNWRLLQITGTAPGLLLFFYFWALPESARWLLTRGRMDEAIQLIQKAASVNRRKLSPELMNQLVPEKTGPSGNALDLFRHPQLRKVTLIIFCVWFVDSLGYYGLSLQVGDFGLDVYLTQLIFGAVEVPARCSSIFMMQRFGRKWSQLGTLVLGGLMCIIIIFIPADLPVVVTMLAVVGKMATAAAFTISYVYSAELFPTILRQAWGWWASSHGSGASSHHL

SEQ ID NO: 3829 - protein, 462 aa, Homo sapiens
MDTKHFLPLDFSTQVNSSLTSPTGRGSMAAPSLHPSLGPGIGSPGQLHSPISTLSSPINGMGPPFSVISSPMGPHSMSVPTTPTLGFSTGSPQLSSPMNPVSSSEDIKPPLGLNGVLKVPAHPSGNMASFTKHICAICGDRSSGKHYGVYSCEGCKGFFKRTVRKDLTYTCRDNKDCLIDKRQRNRCQYCRYQKCLAMGMKREAVQEERQRGKDRNENEVESTSSANEDMPVERILEAELAVEPKTETYVEANMGLNPSSPNDPVTNICQAADKQLFTLVEWAKRIPHFSELPLDDQVILLRAGWNELLIASFSHRSIAVKDGILLATGLHVHRNSAHSAGVGAIFDRVLTELVSKMRDMQMDKTELGCLRAIVLFNPDSKGLSNPAEVEALREKVYASLEAYCKHKYPEQPGRFAKLLLRLPALRSIGLKCLEHLFFFKLIGDTPIDTFLMEMLEAPHQMT

SEQ ID NO: 3830 - protein, 365 aa, Homo sapiens
MNPVSSSEDIKPPLGLNGVLKVPAHPSGNMASFTKHICAICGDRSSGKHYGVYSCEGCKGFFKRTVRKDLTYTCRDNKDCLIDKRQRNRCQYCRYQKCLAMGMKREAVQEERQRGKDRNENEVESTSSANEDMPVERILEAELAVEPKTETYVEANMGLNPSSPNDPVTNICQAADKQLFTLVEWAKRIPHFSELPLDDQVILLRAGWNELLIASFSHRSIAVKDGILLATGLHVHRNSAHSAGVGAIFDRVLTELVSKMRDMQMDKTELGCLRAIVLFNPDSKGLSNPAEVEALREKVYASLEAYCKHKYPEQPGRFAKLLLRLPALRSIGLKCLEHLFFFKLIGDTPIDTFLMEMLEAPHQMT

SEQ ID NO: 3831 - protein, 594 aa, Homo sapiens
MAGEENFKEELRSQDASRNLNQHEVAGHPHSWSLEMLLRRLRAVHTKQDDKFANLLDAVGEFGTFQQRLVALTFIPSIMSAFFMFADHFVFTAQKPYCNTSWILAVGPHLSKAEQLNLTIPQAPNGSFLTCFMYLPVPWNLDSIIQFGLNDTDTCQDGWIYPDAKKRSLINEFDLVCGMETKKDTAQIMFMAGLPIGSLIFRLITDKMGRYPAILLSLLGLIIFGFGTAFMNSFHLYLFFRFGISQSVVGYAISSISLATEWLVGEHRAHAIILGHCFFAVGAVLLTGIAYSLPHWQLLFLVGGILVIPFISYIWILPESPRWLMMKGKVKEAKQVLCYAASVNKKTIPSNLLDELQLPRKKVTRASVLDFCKNRQLCKVTLVMSCVWFTVSYTYFTLSLRMRELGVSVHFRHVVPSIMEVPARLCCIFLLQQIGRKWSLAVTLLQAIIWCLLLLFLPEGEDGLRLKWPRCPATELKSMTILVLMLREFSLAATVTVFFLYTAELLPTVLRATGLGLVSLASVAGAILSLTIISQTPSLLPIFLCCVLAIVAFSLSSLLPETRDQPLSESLNHSSQIRNKVKDMKTKETSSDDV

SEQ ID NO: 3832 - protein, 533 aa, Homo sapiens
MSWAARPPFLPQRHAAGQCGPVGVRKEMHCGVASRWRRRRPWLDPAAAAAAAVAGGEQQTPEPEPGEAGRDGMGDSGRDSRSPDSSSPNPLPQGVPPPSPPGPPLPPSTAPSLGGSGAPPPPPMPPPPLGSPFPVISSSMGSPGLPPPAPPGFSGPVSSPQINSTVSLPGGGSGPPEDVKPPVLGVRGLHCPPPPGGPGAGKRLCAICGDRSSGKHYGVYSCEGCKGFFKRTIRKDLTYSCRDNKDCTVDKRQRNRCQYCRYQKCLATGMKREAVQEERQRGKDKDGDGEGAGGAPEEMPVDRILEAELAVEQKSDQGVEGPGGTGGSGSSPNDPVTNICQAADKQLFTLVEWAKRIPHFSSLPLDDQVILLRAGWNELLIASFSHRSIDVRDGILLATGLHVHRNSAHSAGVGAIFDRVLTELVSKMRDMRMDKTELGCLRAIILFNPDAKGLSNPSEVEVLREKVYASLETYCKQKYPEQQGRFAKLLLRLPALRSIGLKCLEHLFFFKLIGDTPIDTFLMEMLEAPHQLA

SEQ ID NO: 3833 - protein, 537 aa, Homo sapiens
MSWAARPPFLPQRHAAGQCGPVGVRKEMHCGVASRWRRRRPWLDPAAAAAAAVAGGEQQTPEPEPGEAGRDGMGDSGRDSRSPDSSSPNPLPQGVPPPSPPGPPLPPSTAPSLGGSGAPPPPPMPPPPLGSPFPVISSSMGSPGLPPPAPPGFSGPVSSPQINSTVSLPGGGSGPPEDVKPPVLGVRGLHCPPPPGGPGAGKRLCAICGDRSSGKHYGVYSCEGCKGFFKRTIRKDLTYSCRDNKDCTVDKRQRNRCQYCRYQKCLATGMKREAVQEERQRGKDKDGDGEGAGGAPEEMPVDRILEAELAVEQKSDQGVEGPGGTGGSGSSPNDPVTNICQAADKQLFTLVEWAKRIPHFSSLPLDDQVILLRAGWNELLIASFSHRSIDVRDGILLATGLHVHRNSAHSAGVGAIFDRSLSRVLTELVSKMRDMRMDKTELGCLRAIILFNPDAKGLSNPSEVEVLREKVYASLETYCKQKYPEQQGRFAKLLLRLPALRSIGLKCLEHLFFFKLIGDTPIDTFLMEMLEAPHQLA

SEQ ID NO: 3834 - protein, 577 aa, Homo sapiens
MGSRHFEGIYDHVGHFGRFQRVLYFICAFQNISCGIHYLASVFMGVTPHHVCRPPGNVSQVVFHNHSNWSLEDTGALLSSGQKDYVTVQLQNGEIWELSRCSRNKRENTSSLGYEYTGSKKEFPCVDGYIYDQNTWKSTAVTQWNLVCDRKWLAMLIQPLFMFGVLLGSVTFGYFSDRLGRRVVLWATSSSMFLFGIAAAFAVDYYTFMAARFFLAMVASGYLVVGFVYVMEFIGMKSRTWASVHLHSFFAVGTLLVALTGYLVRTWWLYQMILSTVTVPFILCCWVLPETPFWLLSEGRYEEAQKIVDIMAKWNRASSCKLSELLSLDLQGPVSNSPTEVQKHNLSYLFYNWSITKRTLTVWLIWFTGSLGFYSFSLNSVNLGGNEYLNLFLLGVVEIPAYTFVCIAMDKVGRRTVLAYSLFCSALACGVVMVIPQKHYILGVVTAMVGKFAIGAAFGLIYLYTAELYPTIVRSLAVGSGSMVCRLASILAPFSVDLSSIWIFIPQLFVGTMALLSGVLTLKLPETLGKRLATTWEEAAKLESENESKSSKLLLTTNNSGLEKTEAITPRDSGLGE

SEQ ID NO: 3835 - protein, 543 aa, Homo sapiens
MRTLHAVSHPYSNSMRFQRVLYFICAFQNISCGIHYLASVFMGVTPHHVCRPPGNLQNGEIWELSRCSRNKRENTSSLGYEYTGSKKEFPCVDGYIYDQNTWKSTAVTQWNLVCDRKWLAMLIQPLFMFGVLLGSVTFGYFSDRLGRRVVLWATSSSMFLFGIAAAFAVDYYTFMAARFFLAMVASGYLVVGFVYVMEFIGMKSRTWASVHLHSFFAVGTLLVALTGYLVRTWWLYQMILSTVTVPFILCCWVLPETPFWLLSEGRYEEAQKIVDIMAKWNRASSCKLSELLSLDLQGPVSNSPTEVQKHNLSYLFYNWSITKRTLTVWLIWFTGSLGFYSFSLNSVNLGGNEYLNLFLLGVVEIPAYTFVCIAMDKVGRRTVLAYSLFCSALACGVVMVIPQKHYILGVVTAMVGKFAIGAAFGLIYLYTAELYPTIVRSLAVGSGSMVCRLASILAPFSVDLSSIWIFIPQLFVGTMALLSGVLTLKLPETLGKRLATTWEEAAKLESENESKSSKLLLTTNNSGLEKTEAITPRDSGLGE

SEQ ID NO: 3836 - protein, 515 aa, Homo sapiens
MGSRHFEGIYDHVGHFGRFQRVLYFICAFQNISCGIHYLASVFMGVTPHHVCRPPGNVSQVVFHNHSNWSLEDTGALLSSGQKDYVTVQLQNGEIWELSRCSRNKRENTSSLGYEYTGSKKEFPCVDGYIYDQNTWKSTAVTQWNLVCDRKWLAMLIQPLFMFGVLLGSVTFGYFSDRLGRRVVLWATSSSMFLFGIAAAFAVDYYTFMAARFFLAMVASGYLVVGFVYVMEFIGMKSRTWASVHLHSFFAVGTLLVALTGYLVRTWWLYQMILSTVTVPFILCCWVLPETPFWLLSEGRYEEAQKIVDIMAKWNRASSCKLSELLSLDLQGPVSNSPTEVQKHNLSYLFYNWSITKRTLTVWLIWFTGSLGFYSFSLNSVNLGGNEYLNLFLLGVVEIPAYTFVCIAMDKVGRRTVLAYSLFCSALACGVVMVIPQKHYILGVVTAMVGKFAIGAAFGLIYLYTAELYPTIVRSLAVGSGSMVCRLASILAPFSVDLSSIWIFIPQLLGQHLQE

SEQ ID NO: 3837 - protein, 456 aa, Homo sapiens
MKIEEVKSTTKTQRIASHSHVKGLGLDESGLAKQAASGLVGQENAREACGVIVELIKSKKMAGRAVLLAGPPGTGKTALALAIAQELGSKVPFCPMVGSEVYSTEIKKTEVLMENFRRAIGLRIKETKEVYEGEVTELTPCETENPMGGYGKTISHVIIGLKTAKGTKQLKLDPSIFESLQKERVEAGDVIYIEANSGAVKRQGRCDTYATEFDLEAEEYVPLPKGDVHKKKEIIQDVTLHDLDVANARPQGGQDILSMMGQLMKPKKTEITDKLRGEINKVVNKYIDQGIAELVPGVLFVDEVHMLDIECFTYLHRALESSIAPIVIFASNRGNCVIRGTEDITSPHGIPLDLLDRVMIIRTMLYTPQEMKQIIKIRAQTEGINISEEALNHLGEIGTKTTLRYSVQLLTPANLLAKINGKDSIEKEHVEEISELFYDAKSSAKILADQQDKYMK

SEQ ID NO: 3838 - protein, 386 aa, Homo sapiens
MKIEEVKSTTKTQRIASHSHVKGLGLDESGLAKQAASGLVGQENAREACGVIVELIKSKKMAGRAVLLAGPPGTGKTALALAIAQELGSKVPFCPMVGSEVYSTEIKKTEVLMENFRRAIGLRIKETKEVYEGEVTELTPCETENPMGGYGKTISHVIIGLKTAKGTKQLKLDPSIFESLQKERVEAGDVIYIEANSGAVKRQGRCDTYATEFDLEAEEYVPLPKGDVHKKKEIIQDVTLHDLDVANARPQGGQDILSMMGQLMKPKKTEITDKLRGEINKVVNKYIDQGIAELVPGVLFVDEVHMLDIECFTYLHRALESSIAPIVIFASNRGNCVIRGTEDITSPHGIPLDLLDRVMIIRTMLYTPQEMKQVLSAAADPGQLAC

SEQ ID NO: 3839 - protein, 346 aa, Homo sapiens
MHLPGCAPAMADGSFSLAGHLLRSPGGSTSRLHSIEAILGFTKDDGILGTFPAERGARGAKERDRRLGARPACPKAPEEGSEPSPPPAPAPAPEYEAPRPYCPKEPGEARPSPGLPVGPATGEAKLSEEEQPKKKHRRNRTTFTTYQLHELERAFEKSHYPDVYSREELAGKVNLPEVRVQVWFQNRRAKWRRQEKLEVSSMKLQDSPLLSFSRSPPSATLSPLGAGPGSGGGPAGGALPLESWLGPPLPGGGATALQSLPGFGPPAQSLPASYTPPPPPPPFLNSPPLGPGLQPLAPPPPSYPCGPGFGDKFPLDEADPRNSSIAALRLKAKEHIQAIGKPWQAL

SEQ ID NO: 3840 - protein, 104 aa, Homo sapiens
MHLPGCAPAMADGSFSLAGHLLRSPGGSTSRLHSIEAILGFTKDDGILGTFPAERGARGAKERDRRLGARPACPKAPEEGSEPSPPPAPAPAPEYEGVVPEPTG

SEQ ID NO: 3841 - protein, 244 aa, Homo sapiens
MKERRASQKLSSKSIMDPNQNVKCKIVVVGDSQCGKTALLHVFAKDCFPENYVPTVFENYTASFEIDTQRIELSLWDTSGSPYYDNVRPLSYPDSDAVLICFDISRPETLDSVLKKWKGEIQEFCPNTKMLLVGCKSDLRTDVSTLVELSNHRQTPVSYDQGANMAKQIGAATYIECSALQSENSVRDIFHVATLACVNKTNKNVKRNKSQRATKRISHMPSRPELSAVATDLRKDKAKSCTVM

SEQ ID NO: 3842 - protein, 474 aa, Homo sapiens
MDRNPSPPPPGRDKEEEEEVAGGDCIGSTVYSKHWLFGVLSGLIQIVSPENTKSSSDDEEQLTELDEEMENEICRVWDMSMDEDVALFLQEFNAPDIFMGVLAKSKCPRLREICVGILGNMACFQEICVSISSDKNLGQVLLHCLYDSDPPTLLETSRLLLTCLSQAEVASVWVERIQEHPAIYDSICFIMSSSTNVDLLVKVGEVVDKLFDLDEKLMLEWVRNGAAQPLDQPQEESEEQPVFRLVPCILEAAKQVRSENPEWLDVYMHILQLLTTVDDGIQAIVHCPDTGKDIWNLLFDLVCHEFCQSDDPPIILQEQKTVLASVFSVLSAIYASQTEQEYLKIEKVDLPLIDSLIRVLQNMEQCQKKPENSAESNTEETKRTDLTQDDFHLKILKDILCEFLSNIFQALTKETVAQGVKEGQLSKQKCSSAFQNLLPFYSPVVEDFIKILREVDKALADDLEKNFPSLKVQT

SEQ ID NO: 3843 - protein, 228 aa, Homo sapiens
MASGCKIGPSILNSDLANLGAECLRMLDSGADYLHLDVMDGHFVPNITFGHPVVESLRKQLGQDPFFDMHMMVSKPEQWVKPMAVAGANQYTFHLEATENPGALIKDIRENGMKVGLAIKPGTSVEYLAPWANQIDMALVMTVEPGFGGQKFMEDMMPKVHWLRTQFPSLDIEVDGGVGPDTVHKCAEAGANMIVSGSAIMRSEDPRSVINLLRNVCSEAAQKRSLDR

SEQ ID NO: 3844 - protein, 220 aa, Homo sapiens
MASGCKIGPSILNSDLANLGAECLRMLDSGADYLHLDVMDGHMHMMVSKPEQWVKPMAVAGANQYTFHLEATENPGALIKDIRENGMKSCSVTQAEVQWHSQGPLQVGLAIKPGTSVEYLAPWANQIDMALVMTVEPGFGGQKFMEDMMPKVHWLRTQFPSLDIEVDGGVGPDTVHKCAEAGANMIVSGSAIMRSEDPRSVINLLRNVCSEAAQKRSLDR

SEQ ID NO: 3845 - protein, 178 aa, Homo sapiens
MHMMVSKPEQWVKPMAVAGANQYTFHLEATENPGALIKDIRENGMKSCSVTQAEVQWHSQGPLQVGLAIKPGTSVEYLAPWANQIDMALVMTVEPGFGGQKFMEDMMPKVHWLRTQFPSLDIEVDGGVGPDTVHKCAEAGANMIVSGSAIMRSEDPRSVINLLRNVCSEAAQKRSLDR

SEQ ID NO: 3846 - protein, 199 aa, Homo sapiens
MASGCKIGPSILNSDLANLGAECLRMLDSGADYLHLDVMDGHFVPNITFGHPVVESLRKQLGQDPFFDMHMMVSKPEQWVKPMAVAGANQYTFHLEATENPGALIKDIRENGMKVGLAIKPGTSVEYLAPWANQIDMALVMTVEPGFGGQKFMEDMMPKAGANMIVSGSAIMRSEDPRSVINLLRNVCSEAAQKRSLDR

SEQ ID NO: 3847 - protein, 160 aa, Homo sapiens
MHMMVSKPEQWVKPMAVAGANQYTFHLEATENPGALIKDIRENGMKVGLAIKPGTSVEYLAPWANQIDMALVMTVEPGFGGQKFMEDMMPKVHWLRTQFPSLDIEVDGGVGPDTVHKCAEAGANMIVSGSAIMRSEDPRSVINLLRNVCSEAAQKRSLDR

SEQ ID NO: 3848 - protein, 625 aa, Homo sapiens
MNVTSIALRAETWLLAAWHVKVPPMWLEACINWIQEENNNVNLSQAQMNKQVFEQWLLTDLRDLEHPLLPDGILEIPKGELNGFYALQINSLVDVSQPAYSQIQKLRGKNTTNDLVTAEAQVTPKPWEAKPSRMLMLQLTDGIVQIQGMEYQPIPILHSDLPPGTKILIYGNISFRLGVLLLKPENVKVLGGEVDALLEEYAQEKVLARLIGEPDLVVSVIPNNSNENIPRVTDVLDPALGPSDEELLASLDENDELTANNDTSSERCFTTGSSSNTIPTRQSSFEPEFVISPRPKEEPSNLSIHVMDGELDDFSLEEALLLEETVQKEQMETKELQPLTFNRNADRSIERFSHNPNTTNNFSLTCKNGNNNWSEKNVSEQMTNEDKSFGCPSVRDQNRSIFSVHCNVPLAHDFTNKEKNLETDNKIKQTSSSDSHSLNNKILNREVVNYVQKRNSQISNENDCNLQSCSLRSSENSINLSIAMDLYSPPFVYLSVLMASKPKEVTTVKVKAFIVTLTGNLSSSGGIWSITAKVSDGTAYLDVDFVDEILTSLIGFSVPEMKQSKKDPLQYQKFLEGLQKCQRDLIDLCCLMTISFNPSLSKAMVLALQDVNMEHLENLKKRLNK

SEQ ID NO: 3849 - protein, 449 aa, Homo sapiens
MPATLLRAVARSHHILSKAHQCRRIGHLMLKPLKEFENTTCSTLTIRQSLDLFLPDKTASGLNKSQILEMNQKKSDTSMLSPLNAARCQDEKAHLPTMKSFGTHRRVTHKPNLLGSKWFIKILKRHFSSVSTETFVPKQDFPQVKRPLKASRTRQPSRTNLPVLSVNEDLMHCTAFATADEYHLGNLSQDLASHGYVEVTSLPRDAANILVMGVENSAKEGDPGTIFFFREGAAVFWNVKDKTMKHVMKVLEKHEIQPYEIALVHWENEELNYIKIEGQSKLHRGEIKLNSELDLDDAILEKFAFSNALCLSVKLAIWEASLDKFIESIQSIPEALKAGKKVKLSHEEVMQKIGELFALRHRINLSSDFLITPDFYWDRENLEGLYDKTCQFLSIGRRVKVMNEKLQHCMELTDLMRNHLNEKRALRLEWMIVILITIEVMFELGRVFF

SEQ ID NO: 3850 - protein, 238 aa, Homo sapiens
MGVENSAKEGDPGTIFFFREGAAVFWNVKDKTMKHVMKVLEKHEIQPYEIALVHWENEELNYIKIEGQSKLHRGEIKLNSELDLDDAILEKFAFSNALCLSVKLAIWEASLDKFIESIQSIPEALKAGKKVKLSHEEVMQKIGELFALRHRINLSSDFLITPDFYWDRENLEGLYDKTCQFLSIGRRVKVMNEKLQHCMELTDLMRNHLNEKRALRLEWMIVILITIEVMFELGRVFF

SEQ ID NO: 3851 - protein, 208 aa, Homo sapiens
MPATLLRAVARSHHILSKAHQCRRIGHLMLKPLKEFENTTCSTLTIRQSLDLFLPDKTASGLNKSQILEMNQKKSDTSMLSPLNAARCQDEKAHLPTMKSFGTHRRVTHKPNLLGSKWFIKILKRHFSSVSTETFVPKQDFPQVKRPLKASRTRQPSRTNLPVLSVNEDLMHCTAFATADEYHLGNLSQDLASHGYVEVTSLPRGTSS

SEQ ID NO: 3852 - protein, 923 aa, Homo sapiens
MKVGWPGESCWQVGLAVEDSPALGAPRVGALPDVVPEGTLLNMVLRRMHRPRSCSYQLLLEHQRPSCIQGLRWTPLTNSEESLDFSESLEQASTERVLRAGRQLHRHLLATCPNLIRDRKYHLRLYRQCCSGRELVDGILALGLGVHSRSQVVGICQVLLDEGALCHVKHDWAFQDRDAQFYRFPGPEPEPVRTHEMEEELAEAVALLSQRGPDALLTVALRKPPGQRTDEELDLIFEELLHIKAVAHLSNSVKRELAAVLLFEPHSKAGTVLFSQGDKGTSWYIIWKGSVNVVTHGKGLVTTLHEGDDFGQLALVNDAPRAATIILREDNCHFLRVDKQDFNRIIKDVEAKTMRLEEHGKVVLVLERASQGAGPSRPPTPGRNRYTVMSGTPEKILELLLEAMGPDSSAHDPTETFLSDFLLTHRVFMPSAQLCAALLHHFHVEPAGGSEQERSTYVCNKRQQILRLVSQWVALYGSMLHTDPVATSFLQKLSDLVGRDTRLSNLLREQWPERRRCHRLENGCGNASPQMKARNLPVWLPNQDEPLPGSSCAIQVGDKVPYDICRPDHSVLTLQLPVTASVREVMAALAQEDGWTKGQVLVKVNSAGDAIGLQPDARGVATSLGLNERLFVVNPQEVHELIPHPDQLGPTVGSAEGLDLVSAKDLAGQLTDHDWSLFNSIHQVELIHYVLGPQHLRDVTTANLERFMRRFNELQYWVATELCLCPVPGPRAQLLRKFIKLAAHLKEQKNLNSFFAVMFGLSNSAISRLAHTWERLPHKVRKLYSALERLLDPSWNHRVYRLALAKLSPPVIPFMPLLLKDMTFIHEGNHTLVENLINFEKMRMMARAARMLHHCRSHNPVPLSPLRSRVSHLHEDSQVARISTCSEQSLSTRSPASTWAYVQQLKVIDNQRELSRLSRELEP

SEQ ID NO: 3853 - protein, 598 aa, Homo sapiens
MKVGWPGESCWQVGLAVEDSPALGAPRVGALPDVVPEGTLLNMVLRRMHRPRSCSYQLLLEHQRPSCIQGLRWTPLTNSEESLDFSESLEQASTERVLRAGRQLHRHLLATCPNLIRDRKYHLRLYRQCCSGRELVDGILALGLGVHSRSQVVGICQVLLDEGALCHVKHDWAFQDRDAQFYRFPGPEPEPVRTHEMEEELAEAVALLSQRGPDALLTVALRKPPGQRTDEELDLIFEELLHIKAVAHLSNSVKRELAAVLLFEPHSKAGTVLFSQGDKGTSWYIIWKGSVNVVTHGKGLVTTLHEGDDFGQLALVNDAPRAATIILREDNCHFLRVDKQDFNRIIKDVEAKTMRLEEHGKVVLVLERASQGAGPSRPPTPGRNRYTVMSGTPEKILELLLEAMGPDSSAHDPTETFLSDFLLTHRVFMPSAQLCAALLHHFHVEPAGGSEQERSTYVCNKRQQILRLVSQWVALYGSMLHTDPVATSFLQKLSDLVGRDTRLSNLLREQWPERRRCHRLENGCGNASPQMKVSAWPQFLSSAPPGLQAPPSPPDPEGLCGRGKLSSHRHTLGSLIGVHGALAACGALGQAVPGGAEA

SEQ ID NO: 3854 - protein, 881 aa, Homo sapiens
MVLRRMHRPRSCSYQLLLEHQRPSCIQGLRWTPLTNSEESLDFSESLEQASTERVLRAGRQLHRHLLATCPNLIRDRKYHLRLYRQCCSGRELVDGILALGLGVHSRSQVVGICQVLLDEGALCHVKHDWAFQDRDAQFYRFPGPEPEPVRTHEMEEELAEAVALLSQRGPDALLTVALRKPPGQRTDEELDLIFEELLHIKAVAHLSNSVKRELAAVLLFEPHSKAGTVLFSQGDKGTSWYIIWKGSVNVVTHGKGLVTTLHEGDDFGQLALVNDAPRAATIILREDNCHFLRVDKQDFNRIIKDVEAKTMRLEEHGKVVLVLERASQGAGPSRPPTPGRNRYTVMSGTPEKILELLLEAMGPDSSAHDPTETFLSDFLLTHRVFMPSAQLCAALLHHFHVEPAGGSEQERSTYVCNKRQQILRLVSQWVALYGSMLHTDPVATSFLQKLSDLVGRDTRLSNLLREQWPERRRCHRLENGCGNASPQMKARNLPVWLPNQDEPLPGSSCAIQVGDKVPYDICRPDHSVLTLQLPVTASVREVMAALAQEDGWTKGQVLVKVNSAGDAIGLQPDARGVATSLGLNERLFVVNPQEVHELIPHPDQLGPTVGSAEGLDLVSAKDLAGQLTDHDWSLFNSIHQVELIHYVLGPQHLRDVTTANLERFMRRFNELQYWVATELCLCPVPGPRAQLLRKFIKLAAHLKEQKNLNSFFAVMFGLSNSAISRLAHTWERLPHKVRKLYSALERLLDPSWNHRVYRLALAKLSPPVIPFMPLLLKDMTFIHEGNHTLVENLINFEKMRMMARAARMLHHCRSHNPVPLSPLRSRVSHLHEDSQVARISTCSEQSLSTRSPASTWAYVQQLKVIDNQRELSRLSRELEP

SEQ ID NO: 3855 - protein, 1077 aa, Homo sapiens
MDTDSQRSHLSSFTMKLMDKFHSPKIKRTPSKKGKPAEVSVKIPEKPVNKEATDRFLPEGYPLPLDLEQQAVEFMSTSAVASRSQRQKNLSWLEEKEKEVVSALRYFKTIVDKMAIDKKVLEMLPGSASKVLEAILPLVQNDPRIQHSSALSSCYSRVYQSLANLIRWSDQVMLEGVNSEDKEMVTTVKGVIKAVLDGVKELVRLTIEKQGRPSPTSPVKPSSPASKPDGPAELPLTDREVEILNKTTGMSQSTELLPDATDEEVAPPKPPLPGIRVVDNSPPPALPPKKRQSAPSPTRVAVVAPMSRATSGSSLPVGINRQDFDVDCYAQRRLSGGSHSYGGESPRLSPCSSIGKLSKSDEQLSSLDRDSGQCSRNTSCETLDHYDPDYEFLQQDLSNADQIPQQTAWNLSPLPESLGESGSPFLGPPFQLPLGGHPQPDGPLAPGQQTDTPPALPEKKRRSAASQTADGSGCRVSYERHPSQYDNISGEDLQSTAPIPSVPYAPFAAILPFQHGGSSAPVEFVGDFTAPESTGDPEKPPPLPEKKNKHMLAYMQLLEDYSEPQPSMFYQTPQNEHIYQQKNKLLMEVYGFSDSFSGVDSVQELAPPPALPPKQRQLEPPAGKDGHPRDPSAVSGVPGKDSRDGSERAPKSPDALESAQSEEEVDELSLIDHNEIMSRLTLKQEGDDGPDVRGGSGDILLVHATETDRKDLVLYCEAFLTTYRTFISPEELIKKLQYRYEKFSPFADTFKKRVSKNTFFVLVRVVDELCLVELTEEILKLLMELVFRLVCNGELSLARVLRKNILDKVDQKKLLRCATSSQPLAARGVAARPGTLHDFHSHEIAEQLTLLDAELFYKIEIPEVLLWAKEQNEEKSPNLTQFTEHFNNMSYWVRSIIMLQEKAQDRERLLLKFIKIMKHLRKLNNFNSYLAILSALDSAPIRRLEWQKQTSEGLAEYCTLIDSSSSFRAYRAALSEVEPPCIPYLGLILQDLTFVHLGNPDYIDGKVNFSKRWQQFNILDSMRCFQQAHYDMRRNDDIINFFNDFSDHLAEEALWELSLKIKPRNITRRKTDREEKT

SEQ ID NO: 3856 - protein, 1038 aa, Homo sapiens
MDTDSQRSHLSSFTMKLMDKFHSPKIKRTPSKKGKPAEVSVKIPEKPVNNLSWLEEKEKEVVSALRYFKTIVDKMAIDKKVLEMLPGSASKVLEAILPLVQNDPRIQHSSALSSCYSRVYQSLANLIRWSDQVMLEGVNSEDKEMVTTVKGVIKAVLDGVKELVRLTIEKQGRPSPTSPVKPSSPASKPDGPAELPLTDREVEILNKTTGMSQSTELLPDATDEEVAPPKPPLPGIRVVDNSPPPALPPKKRQSAPSPTRVAVVAPMSRATSGSSLPVGINRQDFDVDCYAQRRLSGGSHSYGGESPRLSPCSSIGKLSKSDEQLSSLDRDSGQCSRNTSCETLDHYDPDYEFLQQDLSNADQIPQQTAWNLSPLPESLGESGSPFLGPPFQLPLGGHPQPDGPLAPGQQTDTPPALPEKKRRSAASQTADGSGCRVSYERHPSQYDNISGEDLQSTAPIPSVPYAPFAAILPFQHGGSSAPVEFVGDFTAPESTGDPEKPPPLPEKKNKHMLAYMQLLEDYSEPQPSMFYQTPQNEHIYQQKNKLLMEVYGFSDSFSGVDSVQELAPPPALPPKQRQLEPPAGKDGHPRDPSAVSGVPGKDSRDGSERAPKSPDALESAQSEEEVDELSLIDHNEIMSRLTLKQEGDDGPDVRGGSGDILLVHATETDRKDLVLYCEAFLTTYRTFISPEELIKKLQYRYEKFSPFADTFKKRVSKNTFFVLVRVVDELCLVELTEEILKLLMELVFRLVCNGELSLARVLRKNILDKVDQKKLLRCATSSQPLAARGVAARPGTLHDFHSHEIAEQLTLLDAELFYKIEIPEVLLWAKEQNEEKSPNLTQFTEHFNNMSYWVRSIIMLQEKAQDRERLLLKFIKIMKHLRKLNNFNSYLAILSALDSAPIRRLEWQKQTSEGLAEYCTLIDSSSSFRAYRAALSEVEPPCIPYLGLILQDLTFVHLGNPDYIDGKVNFSKRWQQFNILDSMRCFQQAHYDMRRNDDIINFFNDFSDHLAEEALWELSLKIKPRNITRRKTDREEKT

SEQ ID NO: 3857 - protein, 1095 aa, Homo sapiens
MGNAIEKQKPLKRSHLYPWKQDSQRSHLSSFTMKLMDKFHSPKIKRTPSKKGKPAEVSVKIPEKPVNKEATDRFLPEGYPLPLDLEQQAVEFMSTSAVASRSQRQKNLSWLEEKEKEVVSALRYFKTIVDKMAIDKKVLEMLPGSASKVLEAILPLVQNDPRIQHSSALSSCYSRVYQSLANLIRWSDQVMLEGVNSEDKEMVTTVKGVIKAVLDGVKELVRLTIEKQGRPSPTSPVKPSSPASKPDGPAELPLTDREVEILNKTTGMSQSTELLPDATDEEVAPPKPPLPGIRVVDNSPPPALPPKKRQSAPSPTRVAVVAPMSRATSGSSLPVGINRQDFDVDCYAQRRLSGGSHSYGGESPRLSPCSSIGKLSKSDEQLSSLDRDSGQCSRNTSCETLDHYDPDYEFLQQDLSNADQIPQQTAWNLSPLPESLGESGSPFLGPPFQLPLGGHPQPDGPLAPGQQTDTPPALPEKKRRSAASQTADGSGCRVSYERHPSQYDNISGEDLQSTAPIPSVPYAPFAAILPFQHGGSSAPVEFVGDFTAPESTGDPEKPPPLPEKKNKHMLAYMQLLEDYSEPQPSMFYQTPQNEHIYQQKNKLLMEVYGFSDSFSGVDSVQELAPPPALPPKQRQLEPPAGKDGHPRDPSAVSGVPGKDSRDGSERAPKSPDALESAQSEEEVDELSLIDHNEIMSRLTLKQEGDDGPDVRGGSGDILLVHATETDRKDLVLYCEAFLTTYRTFISPEELIKKLQYRYEKFSPFADTFKKRVSKNTFFVLVRVVDELCLVELTEEILKLLMELVFRLVCNGELSLARVLRKNILDKVDQKKLLRCATSSQPLAARGVAARPGTLHDFHSHEIAEQLTLLDAELFYKIEIPEVLLWAKEQNEEKSPNLTQFTEHFNNMSYWVRSIIMLQEKAQDRERLLLKFIKIMKHLRKLNNFNSYLAILSALDSAPIRRLEWQKQTSEGLAEYCTLIDSSSSFRAYRAALSEVEPPCIPYLGLILQDLTFVHLGNPDYIDGKVNFSKRWQQFNILDSMRCFQQAHYDMRRNDDIINFFNDFSDHLAEEALWELSLKIKPRNITRRKTDREEKT

SEQ ID NO: 3858 - protein, 1094 aa, Homo sapiens
MSGGLGLRRSPEMSGKIEKADSQRSHLSSFTMKLMDKFHSPKIKRTPSKKGKPAEVSVKIPEKPVNKEATDRFLPEGYPLPLDLEQQAVEFMSTSAVASRSQRQKNLSWLEEKEKEVVSALRYFKTIVDKMAIDKKVLEMLPGSASKVLEAILPLVQNDPRIQHSSALSSCYSRVYQSLANLIRWSDQVMLEGVNSEDKEMVTTVKGVIKAVLDGVKELVRLTIEKQGRPSPTSPVKPSSPASKPDGPAELPLTDREVEILNKTTGMSQSTELLPDATDEEVAPPKPPLPGIRVVDNSPPPALPPKKRQSAPSPTRVAVVAPMSRATSGSSLPVGINRQDFDVDCYAQRRLSGGSHSYGGESPRLSPCSSIGKLSKSDEQLSSLDRDSGQCSRNTSCETLDHYDPDYEFLQQDLSNADQIPQQTAWNLSPLPESLGESGSPFLGPPFQLPLGGHPQPDGPLAPGQQTDTPPALPEKKRRSAASQTADGSGCRVSYERHPSQYDNISGEDLQSTAPIPSVPYAPFAAILPFQHGGSSAPVEFVGDFTAPESTGDPEKPPPLPEKKNKHMLAYMQLLEDYSEPQPSMFYQTPQNEHIYQQKNKLLMEVYGFSDSFSGVDSVQELAPPPALPPKQRQLEPPAGKDGHPRDPSAVSGVPGKDSRDGSERAPKSPDALESAQSEEEVDELSLIDHNEIMSRLTLKQEGDDGPDVRGGSGDILLVHATETDRKDLVLYCEAFLTTYRTFISPEELIKKLQYRYEKFSPFADTFKKRVSKNTFFVLVRVVDELCLVELTEEILKLLMELVFRLVCNGELSLARVLRKNILDKVDQKKLLRCATSSQPLAARGVAARPGTLHDFHSHEIAEQLTLLDAELFYKIEIPEVLLWAKEQNEEKSPNLTQFTEHFNNMSYWVRSIIMLQEKAQDRERLLLKFIKIMKHLRKLNNFNSYLAILSALDSAPIRRLEWQKQTSEGLAEYCTLIDSSSSFRAYRAALSEVEPPCIPYLGLILQDLTFVHLGNPDYIDGKVNFSKRWQQFNILDSMRCFQQAHYDMRRNDDIINFFNDFSDHLAEEALWELSLKIKPRNITRRKTDREEKT

SEQ ID NO: 3859 - protein, 1011 aa, Homo sapiens
MVAAHAAHSSSSAEWIACLDKRPLERSSEDVDIIFTRLKEVKAFEKFHPNLLHQICLCGYYENLEKGITLFRQGDIGTNWYAVLAGSLDVKVSETSSHQDAVTICTLGIGTAFGESILDNTPRHATIVTRESSELLRIEQKDFKALWEKYRQYMAGLLAPPYGVMETGSNNDRIPDKENTPLIEPHVPLRPANTITKVPSEKILRAGKILRNAILSRAPHMIRDRKYHLKTYRQCCVGTELVDWMMQQTPCVHSRTQAVGMWQVLLEDGVLNHVDQEHHFQDKYLFYRFLDDEHEDAPLPTEEEKKECDEELQDTMLLLSQMGPDAHMRMILRKPPGQRTVDDLEIIYEELLHIKALSHLSTTVKRELAGVLIFESHAKGGTVLFNQGEEGTSWYIILKGSVNVVIYGKGVVCTLHEGDDFGKLALVNDAPRAASIVLREDNCHFLRVDKEDFNRILRDVEANTVRLKEHDQDVLVLEKVPAGNRASNQGNSQPQQKYTVMSGTPEKILEHFLETIRLEATLNEATDSVLNDFIMMHCVFMPNTQLCPALVAHYHAQPSQGTEQEKMDYALNNKRRVIRLVLQWAAMYGDLLQEDDVSMAFLEEFYVSVSDDARMIAALKEQLPELEKIVKQISEDAKAPQKKHKVLLQQFNTGDERAQKRQPIRGSDEVLFKVYCMDHTYTTIRVPVATSVKEVISAVADKLGSGEGLIIVKMSSGGEKVVLKPNDVSVFTTLTINGRLFACPREQFDSLTPLPEQEGPTVGTVGTFELMSSKDLAYQMTIYDWELFNCVHELELIYHTFGRHNFKKTTANLDLFLRRFNEIQFWVVTEICLCSQLSKRVQLLKKFIKIAAHCKEYKNLNSFFAIVMGLSNVAVSRLALTWEKLPSKFKKFYAEFESLMDPSRNHRAYRLTVAKLEPPLIPFMPLLIKDMTFTHEGNKTFIDNLVNFEKMRMIANTARTVRYYRSQPFNPDAAQANKNHQDVRSYVRQLNVIDNQRTLSQMSHRLEPRRP

SEQ ID NO: 3860 - protein, 696 aa, Homo sapiens
MLLLSQMGPDAHMRMILRKPPGQRTVDDLEIIYEELLHIKALSHLSTTVKRELAGVLIFESHAKGGTVLFNQGEEGTSWYIILKGSVNVVIYGKGVVCTLHEGDDFGKLALVNDAPRAASIVLREDNCHFLRVDKEDFNRILRDVEANTVRLKEHDQDVLVLEKVPAGNRASNQGNSQPQQKYTVMSGTPEKILEHFLETIRLEATLNEATDSVLNDFIMMHCVFMPNTQLCPALVAHYHAQPSQGTEQEKMDYALNNKRRVIRLVLQWAAMYGDLLQEDDVSMAFLEEFYVSVSDDARMIAALKEQLPELEKIVKQISEDAKAPQKKHKVLLQQFNTGDERAQKRQPIRGSDEVLFKVYCMDHTYTTIRVPVATSVKEVISAVADKLGSGEGLIIVKMSSGGEKVVLKPNDVSVFTTLTINGRLFACPREQFDSLTPLPEQEGPTVGTVGTFELMSSKDLAYQMTIYDWELFNCVHELELIYHTFGRHNFKKTTANLDLFLRRFNEIQFWVVTEICLCSQLSKRVQLLKKFIKIAAHCKEYKNLNSFFAIVMGLSNVAVSRLALTWEKLPSKFKKFYAEFESLMDPSRNHRAYRLTVAKLEPPLIPFMPLLIKDMTFTHEGNKTFIDNLVNFEKMRMIANTARTVRYYRSQPFNPDAAQANKNHQDVRSYVRQLNVIDNQRTLSQMSHRLEPRRP

SEQ ID NO: 3861 - protein, 867 aa, Homo sapiens
MLYKKYRQYMAGLLAPPYGVMETGSNNDRIPDKENTPLIEPHVPLRPANTITKVPSEKILRAGKILRNAILSRAPHMIRDRKYHLKTYRQCCVGTELVDWMMQQTPCVHSRTQAVGMWQVLLEDGVLNHVDQEHHFQDKYLFYRFLDDEHEDAPLPTEEEKKECDEELQDTMLLLSQMGPDAHMRMILRKPPGQRTVDDLEIIYEELLHIKALSHLSTTVKRELAGVLIFESHAKGGTVLFNQGEEGTSWYIILKGSVNVVIYGKGVVCTLHEGDDFGKLALVNDAPRAASIVLREDNCHFLRVDKEDFNRILRDVEANTVRLKEHDQDVLVLEKVPAGNRASNQGNSQPQQKYTVMSGTPEKILEHFLETIRLEATLNEATDSVLNDFIMMHCVFMPNTQLCPALVAHYHAQPSQGTEQEKMDYALNNKRRVIRLVLQWAAMYGDLLQEDDVSMAFLEEFYVSVSDDARMIAALKEQLPELEKIVKQISEDAKAPQKKHKVLLQQFNTGDERAQKRQPIRGSDEVLFKVYCMDHTYTTIRVPVATSVKEVISAVADKLGSGEGLIIVKMSSGGEKVVLKPNDVSVFTTLTINGRLFACPREQFDSLTPLPEQEGPTVGTVGTFELMSSKDLAYQMTIYDWELFNCVHELELIYHTFGRHNFKKTTANLDLFLRRFNEIQFWVVTEICLCSQLSKRVQLLKKFIKIAAHCKEYKNLNSFFAIVMGLSNVAVSRLALTWEKLPSKFKKFYAEFESLMDPSRNHRAYRLTVAKLEPPLIPFMPLLIKDMTFTHEGNKTFIDNLVNFEKMRMIANTARTVRYYRSQPFNPDAAQANKNHQDVRSYVRQLNVIDNQRTLSQMSHRLEPRRP

SEQ ID NO: 3862 - protein, 858 aa, Homo sapiens
MAGLLAPPYGVMETGSNNDRIPDKENTPLIEPHVPLRPANTITKVPSEKILRAGKILRNAILSRAPHMIRDRKYHLKTYRQCCVGTELVDWMMQQTPCVHSRTQAVGMWQVLLEDGVLNHVDQEHHFQDKYLFYRFLDDEHEDAPLPTEEEKKECDEELQDTMLLLSQMGPDAHMRMILRKPPGQRTVDDLEIIYEELLHIKALSHLSTTVKRELAGVLIFESHAKGGTVLFNQGEEGTSWYIILKGSVNVVIYGKGVVCTLHEGDDFGKLALVNDAPRAASIVLREDNCHFLRVDKEDFNRILRDVEANTVRLKEHDQDVLVLEKVPAGNRASNQGNSQPQQKYTVMSGTPEKILEHFLETIRLEATLNEATDSVLNDFIMMHCVFMPNTQLCPALVAHYHAQPSQGTEQEKMDYALNNKRRVIRLVLQWAAMYGDLLQEDDVSMAFLEEFYVSVSDDARMIAALKEQLPELEKIVKQISEDAKAPQKKHKVLLQQFNTGDERAQKRQPIRGSDEVLFKVYCMDHTYTTIRVPVATSVKEVISAVADKLGSGEGLIIVKMSSGGEKVVLKPNDVSVFTTLTINGRLFACPREQFDSLTPLPEQEGPTVGTVGTFELMSSKDLAYQMTIYDWELFNCVHELELIYHTFGRHNFKKTTANLDLFLRRFNEIQFWVVTEICLCSQLSKRVQLLKKFIKIAAHCKEYKNLNSFFAIVMGLSNVAVSRLALTWEKLPSKFKKFYAEFESLMDPSRNHRAYRLTVAKLEPPLIPFMPLLIKDMTFTHEGNKTFIDNLVNFEKMRMIANTARTVRYYRSQPFNPDAAQANKNHQDVRSYVRQLNVIDNQRTLSQMSHRLEPRRP

SEQ ID NO: 3863 - protein, 840 aa, Homo sapiens
MAGLLAPPYGVMETGSNNDRIPDKENVPSEKILRAGKILRNAILSRAPHMIRDRKYHLKTYRQCCVGTELVDWMMQQTPCVHSRTQAVGMWQVLLEDGVLNHVDQEHHFQDKYLFYRFLDDEHEDAPLPTEEEKKECDEELQDTMLLLSQMGPDAHMRMILRKPPGQRTVDDLEIIYEELLHIKALSHLSTTVKRELAGVLIFESHAKGGTVLFNQGEEGTSWYIILKGSVNVVIYGKGVVCTLHEGDDFGKLALVNDAPRAASIVLREDNCHFLRVDKEDFNRILRDVEANTVRLKEHDQDVLVLEKVPAGNRASNQGNSQPQQKYTVMSGTPEKILEHFLETIRLEATLNEATDSVLNDFIMMHCVFMPNTQLCPALVAHYHAQPSQGTEQEKMDYALNNKRRVIRLVLQWAAMYGDLLQEDDVSMAFLEEFYVSVSDDARMIAALKEQLPELEKIVKQISEDAKAPQKKHKVLLQQFNTGDERAQKRQPIRGSDEVLFKVYCMDHTYTTIRVPVATSVKEVISAVADKLGSGEGLIIVKMSSGGEKVVLKPNDVSVFTTLTINGRLFACPREQFDSLTPLPEQEGPTVGTVGTFELMSSKDLAYQMTIYDWELFNCVHELELIYHTFGRHNFKKTTANLDLFLRRFNEIQFWVVTEICLCSQLSKRVQLLKKFIKIAAHCKEYKNLNSFFAIVMGLSNVAVSRLALTWEKLPSKFKKFYAEFESLMDPSRNHRAYRLTVAKLEPPLIPFMPLLIKDMTFTHEGNKTFIDNLVNFEKMRMIANTARTVRYYRSQPFNPDAAQANKNHQDVRSYVRQLNVIDNQRTLSQMSHRLEPRRP

SEQ ID NO: 3864 - protein, 145 aa, Homo sapiens [sequence omitted]

SEQ ID NO: 3865 - protein, 1970 aa, Homo sapiens
MHGGGPPSGDSACPLRTIKRVQFGVLSPDELKRMSVTEGGIKYPETTEGGRPKLGGLMDPRQGVIERTGRCQTCAGNMTECPGHFGHIELAKPVFHVGFLVKTMKVLRCVCFFCSKLLVDSNNPKIKDILAKSKGQPKKRLTHVYDLCKGKNICEGGEEMDNKFGVEQPEGDEDLTKEKGHGGCGRYQPRIRRSGLELYAEWKHVNEDSQEKKILLSPERVHEIFKRISDEECFVLGMEPRYARPEWMIVTVLPVPPLSVRPAVVMQGSARNQDDLTHKLADIVKINNQLRRNEQNGAAAHVIAEDVKLLQFHVATMVDNELPGLPRAMQKSGRPLKSLKQRLKGKEGRVRGNLMGKRVDFSARTVITPDPNLSIDQVGVPRSIAANMTFAEIVTPFNIDRLQELVRRGNSQYPGAKYIIRDNGDRIDLRFHPKPSDLHLQTGYKVERHMCDGDIVIFNRQPTLHKMSMMGHRVRILPWSTFRLNLSVTTPYNADFDGDEMNLHLPQSLETRAEIQELAMVPRMIVTPQSNRPVMGIVQDTLTAVRKFTKRDVFLERGEVMNLLMFLSTWDGKVPQPAILKPRPLWTGKQIFSLIIPGHINCIRTHSTHPDDEDSGPYKHISPGDTKVVVENGELIMGILCKKSLGTSAGSLVHISYLEMGHDITRLFYSNIQTVINNWLLIEGHTIGIGDSIADSKTYQDIQNTIKKAKQDVIEVIEKAHNNELEPTPGNTLRQTFENQVNRILNDARDKTGSSAQKSLSEYNNFKSMVVSGAKGSKINISQVIAVVGQQNVEGKRIPFGFKHRTLPHFIKDDYGPESRGFVENSYLAGLTPTEFFFHAMGGREGLIDTAVKTAETGYIQRRLIKSMESVMVKYDATVRNSINQVVQLRYGEDGLAGESVEFQNLATLKPSNKAFEKKFRFDYTNERALRRTLQEDLVKDVLSNAHIQNELEREFERMREDREVLRVIFPTGDSKVVLPCNLLRMIWNAQKIFHINPRLPSDLHPIKVVEGVKELSKKLVIVNGDDPLSRQAQENATLLFNIHLRSTLCSRRMAEEFRLSGEAFDWLLGEIESKFNQAIAHPGEMVGALAAQSLGEPATQMTLNTFHYAGVSAKNVTLGVPRLKELINISKKPKTPSLTVFLLGQSARDAERAKDILCRLEHTTLRKVTANTAIYYDPNPQSTVVAEDQEWVNVYYEMPDFDVARISPWLLRVELDRKHMTDRKLTMEQIAEKINAGFGDDLNCIFNDDNAEKLVLRIRIMNSDENKMQEEEEVVDKMDDDVFLRCIESNMLTDMTLQGIEQISKVYMHLPQTDNKKKIIITEDGEFKALQEWILETDGVSLMRVLSEKDVDPVRTTSNDIVEIFTVLGIEAVRKALERELYHVISFDGSYVNYRHLALLCDTMTCRGHLMAITRHGVNRQDTGPLMKCSFEETVDVLMEAAAHGESDPMKGVSENIMLGQLAPAGTGCFDLLLDAEKCKYGMEIPTNIPGLGAAGPTGMFFGSAPSPMGGISPAMTPWNQGATPAYGAWSPSVGSGMTPGAAGFSPSAASDASGFSPGYSPAWSPTPGSPGSPGPSSPYIPSPGGAMSPSYSPTSPAYEPRSPGGYTPQSPSYSPTSPSYSPTSPSYSPTSPNYSPTSPSYSPTSPSYSPTSPSYSPTSPSYSPTSPSYSPTSPSYSPTSPSYSPTSPSYSPTSPSYSPTSPSYSPTSPSYSPTSPSYSPTSPSYSPTSPSYSPTSPSYSPTSPNYSPTSPNYTPTSPSYSPTSPSYSPTSPNYTPTSPNYSPTSPSYSPTSPSYSPTSPSYSPSSPRYTPQSPTYTPSSPSYSPSSPSYSPASPKYTPTSPSYSPSSPEYTPTSPKYSPTSPKYSPTSPKYSPTSPTYSPTTPKYSPTSPTYSPTSPVYTPTSPKYSPTSPTYSPTSPKYSPTSPTYSPTSPKGSTYSPTSPGYSPTSPTYSLTSPAISPDDSDEEN

SEQ ID NO: 3866 - protein, 566 aa, Homo sapiens
MHGGGPPSGDSACPLRTIKRVQFGVLSPDELKRMSVTEGGIKYPETTEGGRPKLGGLMDPRQGVIERTGRCQTCAGNMTECPGHFGHIELAKPVFHVGFLVKTMKVLRCVCFFCSKLLVDSNNPKIKDILAKSKGQPKKRLTHVYDLCKGKNICEGGEEMDNKFGVEQPEGDEDLTKEKGHGGCGRYQPRIRRSGLELYAEWKHVNEDSQEKKILLSPERVHEIFKRISDEECFVLGMEPRYARPEWMIVTVLPVPPLSVRPAVVMQGSARNQDDLTHKLADIVKINNQLRRNEQNGAAAHVIAEDVKLLQFHVATMVDNELPGLPRAMQKSGRPLKSLKQRLKGKEGRVRGNLMGKRVDFSARTVITPDPNLSIDQVGVPRSIAANMTFAEIVTPFNIDRLQELVRRGNSQYPGAKYIIRDNGDRIDLRFHPKPSDLHLQTGYKVERHMCDGDIVIFNRQPTLHKMSMMGHRVRILPWSTFRLNLSVTTPYNADFDGDEMNLHLPQSLETRAEIQELAMVPRMIVTPQSNRPVMGIVQDTLTAVRKFTKRDVFLERVCGPNGNLA

SEQ ID NO: 3867 - protein, 152 aa, Homo sapiens
MGFAEAFLEHLWKNLQDPSNPAIIRQAAGNYIGSFLARAKFISLITVKPCLDLLVNWLHIYLNNQDSGTKAFCDVALHGPFYSACQAVFYTFVFRHKQLLSGNLKEGLQYPQSLNFERIVMSQLNPLKICLPSVVNFFAAITKMKTCGYGWW

SEQ ID NO: 3868 - protein, 631 aa, Homo sapiens
MAPPGSSTVFLLALTIIASTWALTPTHYLTKHDVERLKASLDRPFTNLESAFYSIVGLSSLGAQVPDAKKACTYIRSNLDPSNVDSLFYAAQASQALSGCEISISNETKDLLLAAVSEDSSVTQIYHAVAALSGFGLPLASQEALSALTARLSKEETVLATVQALQTASHLSQQADLRSIVEEIEDLVARLDELGGVYLQFEEGLETTALFVAATYKLMDHVGTEPSIKEDQVIQLMNAIFSKKNFESLSEAFSVASAAAVLSHNRYHVPVVVVPEGSASDTHEQAILRLQVTNVLSQPLTQATVKLEHAKSVASRATVLQKTSFTPVGDVFELNFMNVKFSSGYYDFLVEVEGDNRYIANTVELRVKISTEVGITNVDLSTVDKDQSIAPKTTRVTYPAKAKGTFIADSHQNFALFFQLVDVNTGAELTPHQTFVRLHNQKTGQEVVFVAEPDNKNVYKFELDTSERKIEFDSASGTYTLYLIIGDATLKNPILWNVADVVIKFPEEEAPSTVLSQNLFTPKQEIQHLFREPEKRPPTVVSNTFTALILSPLLLLFALWIRIGANVSNFTFAPSTIIFHLGHAAMLGLMYVYWTQLNMFQTLKYLAILGSVTFLAGNRMLAQQAVKRTAH

SEQ ID NO: 3869 - protein, 615 aa, Homo sapiens
MAPPGSSTVFLLALTIIASTWALTPTHYLTKHDVERLKASLDRPFTNLESAFYSIVGLSSLGAQVPDAKISISNETKDLLLAAVSEDSSVTQIYHAVAALSGFGLPLASQEALSALTARLSKEETVLATVQALQTASHLSQQADLRSIVEEIEDLVARLDELGGVYLQFEEGLETTALFVAATYKLMDHVGTEPSIKEDQVIQLMNAIFSKKNFESLSEAFSVASAAAVLSHNRYHVPVVVVPEGSASDTHEQAILRLQVTNVLSQPLTQATVKLEHAKSVASRATVLQKTSFTPVGDVFELNFMNVKFSSGYYDFLVEVEGDNRYIANTVELRVKISTEVGITNVDLSTVDKDQSIAPKTTRVTYPAKAKGTFIADSHQNFALFFQLVDVNTGAELTPHQTFVRLHNQKTGQEVVFVAEPDNKNVYKFELDTSERKIEFDSASGTYTLYLIIGDATLKNPILWNVADVVIKFPEEEAPSTVLSQNLFTPKQEIQHLFREPEKRPPTVVSNTFTALILSPLLLLFALWIRIGANVSNFTFAPSTIIFHLGHAAMLGLMYVYWTQLNMFQTLKYLAILGSVTFLAGNRMLAQQAVKRIAAEQSSRLAKYRTLRTAH

SEQ ID NO: 3870 - protein, 292 aa, Homo sapiens [sequence omitted]

SEQ ID NO: 3871 - protein, 175 aa, Homo sapiens [sequence omitted]

SEQ ID NO: 3872 - protein, 206 aa, Homo sapiens
MAAAVLGQLGALWIHNLRSRGKLALGVLPQSYIHTSASLDISRKWEKKNKIVYPPQLPGEPRRPAEIYHCRRQIKYSKDKMWYLAKLIRGMSIDQALAQLEFNDKKGAKIIKEVLLEAQDMAVRDHNVEFRSNLYIAESTSGRGQCLKRIRYHGRGRFGIMEKVYCHYFVKLVEGPPPPPEPPKTAVAHAKEYIQQLRSRTIVHTL

SEQ ID NO: 3873 - protein, 120 aa, Homo sapiens
MIRGMSIDQALAQLEFNDKKGAKIIKEVLLEAQDMAVRDHNVEFRSNLYIAESTSGRGQCLKRIRYHGRGRFGIMEKVYCHYFVKLVEGPPPPPEPPKTAVAHAKEYIQQLRSRTIVHTL

SEQ ID NO: 3874 - protein, 126 aa, Homo sapiens
MWYLAKLIRGMSIDQALAQLEFNDKKGAKIIKEVLLEAQDMAVRDHNVEFRSNLYIAESTSGRGQCLKRIRYHGRGRFGIMEKVYCHYFVKLVEGPPPPPEPPKTAVAHAKEYIQQLRSRTIVHTL

SEQ ID NO: 3875 - protein, 172 aa, Homo sapiens
MFYHISLEHEILLHPRYFGPNLLNTVKQKLFTEVEGTCTGKYGFVIAVTTIDNIGAGVIQPGRGFVLYPVKYKAIVFRPFKGEVVDAVVTQVNKVGLFTEIGPMSCFISRHSIPSEMEFDPNSNPPCYKTMDEDIVIQQDDEIRLKIVGTRVDKNDIFAIGSLMDDYLGLVS

SEQ ID NO: 3876 - protein, 831 aa, Homo sapiens
MKVHMHTKFCLICLLTFIFHHCNHCHEEHDHGPEALHRQHRGMTELEPSKFSKQAAENEKKYYIEKLFERYGENGRLSFFGLEKLLTNLGLGERKVVEINHEDLGHDHVSHLDILAVQEGKHFHSHNHQHSHNHLNSENQTVTSVSTKRNHKCDPEKETVEVSVKSDDKHMHDHNHRLRHHHRLHHHLDHNNTHHFHNDSITPSERGEPSNEPSTETNKTQEQSDVKLPKGKRKKKGRKSNENSEVITPGFPPNHDQGEQYEHNRVHKPDRVHNPGHSHVHLPERNGHDPGRGHQDLDPDNEGELRHTRKREAPHVKNNAIISLRKDLNEDDHHHECLNVTQLLKYYGHGANSPISTDLFTYLCPALLYQIDSRLCIEHFDKLLVEDINKDKNLVPEDEANIGASAWICGIISITVISLLSLLGVILVPIINQGCFKFLLTFLVALAVGTMSGDALLHLLPHSQGGHDHSHQHAHGHGHSHGHESNKFLEEYDAVLKGLVALGGIYLLFIIEHCIRMFKHYKQQRGKQKWFMKQNTEESTIGRKLSDHKLNNTPDSDWLQLKPLAGTDDSVVSEDRLNETELTDLEGQQESPPKNYLCIEEEKIIDHSHSDGLHTIHEHDLHAAAHNHHGENKTVLRKHNHQWHHKHSHHSHGPCHSGSDLKETGIANIAWMVIMGDGIHNFSDGLAIGAAFSAGLTGGISTSIAVFCHELPHELGDFAVLLKAGMTVKQAIVYNLLSAMMAYIGMLIGTAVGQYANNITLWIFAVTAGMFLYVALVDMLPEMLHGDGDNEEHGFCPVGQFILQNLGLLFGFAIMLVIALYEDKIVFDIQF

SEQ ID NO: 3877 - protein, 381 aa, Homo sapiens
MSGDALLHLLPHSQGGHDHSHQHAHGHGHSHGHESNKFLEEYDAVLKGLVALGGIYLLFIIEHCIRMFKHYKQQRGKQKWFMKQNTEESTIGRKLSDHKLNNTPDSDWLQLKPLAGTDDSVVSEDRLNETELTDLEGQQESPPKNYLCIEEEKIIDHSHSDGLHTIHEHDLHAAAHNHHGENKTVLRKHNHQWHHKHSHHSHGPCHSGSDLKETGIANIAWMVIMGDGIHNFSDGLAIGAAFSAGLTGGISTSIAVFCHELPHELGDFAVLLKAGMTVKQAIVYNLLSAMMAYIGMLIGTAVGQYANNITLWIFAVTAGMFLYVALVDMLPEMLHGDGDNEEHGFCPVGQFILQNLGLLFGFAIMLVIALYEDKIVFDIQF

SEQ ID NO: 3878 - protein, 125 aa, Homo sapiens
MPGRHVSRVRALYKRVLQLHRVLPPDLKSLGDQYVKDEFRRHKTVGSDEAQRFLQEWEVYATALLQQANENRQNSTGKACFGTFLPEEKLNDFRDEQIGQLQELMQEATKPNRQFSISESMKPKF

SEQ ID NO: 3879 - protein, 1374 aa, Homo sapiens
MMQGNTCHRMSFHPGRGCPRGRGGHGARPSAPSFRPQNLRLLHPQQPPVQYQYEPPSAPSTTFSNSPAPNFLPPRPDFVPFPPPMPPSAQGPLPPCPIRPPFPNHQMRHPFPVPPCFPPMPPPMPCPNNPPVPGAPPGQGTFPFMMPPPSMPHPPPPPVMPQQVNYQYPPGYSHHNFPPPSFNSFQNNPSSFLPSANNSSSPHFRHLPPYPLPKAPSERRSPERLKHYDDHRHRDHSHGRGERHRSLDRRERGRSPDRRRQDSRYRSDYDRGRTPSRHRSYERSRERERERHRHRDNRRSPSLERSYKKEYKRSGRSYGLSVVPEPAGCTPELPGEIIKNTDSWAPPLEIVNHRSPSREKKRARWEEEKDRWSDNQSSGKDKNYTSIKEKEPEETMPDKNEEEEEELLKPVWIRCTHSENYYSSDPMDQVGDSTVVGTSRLRDLYDKFEEELGSRQEKAKAARPPWEPPKTKLDEDLESSSESECESDEDSTCSSSSDSEVFDVIAEIKRKKAHPDRLHDELWYNDPGQMNDGPLCKCSAKARRTGIRHSIYPGEEAIKPCRPMTNNAGRLFHYRITVSPPTNFLTDRPTVIEYDDHEYIFEGFSMFAHAPLTNIPLCKVIRFNIDYTIHFIEEMMPENFCVKGLELFSLFLFRDILELYDWNLKGPLFEDSPPCCPRFHFMPRFVRFLPDGGKEVLSMHQILLYLLRCSKALVPEEEIANMLQWEELEWQKYAEECKGMIVTNPGTKPSSVRIDQLDREQFNPDVITFPIIVHFGIRPAQLSYAGDPQYQKLWKSYVKLRHLLANSPKVKQTDKQKLAQREEALQKIRQKNTMRREVTVELSSQGFWKTGIRSDVCQHAMMLPVLTHHIRYHQCLMHLDKLIGYTFQDRCLLQLAMTHPSHHLNFGMNPDHARNSLSNCGIRQPKYGDRKVHHMHMRKKGINTLINIMSRLGQDDPTPSRINHNERLEFLGDAVVEFLTSVHLYYLFPSLEEGGLATYRTAIVQNQHLAMLAKKLELDRFMLYAHGPDLCRESDLRHAMANCFEALIGAVYLEGSLEEAKQLFGRLLFNDPDLREVWLNYPLHPLQLQEPNTDRQLIETSPVLQKLTEFEEAIGVIFTHVRLLARAFTLRTVGFNHLTLGHNQRMEFLGDSIMQLVATEYLFIHFPDHHEGHLTLLRSSLVNNRTQAKVAEELGMQEYAITNDKTKRPVALRTKTLADLLESFIAALYIDKDLEYVHTFMNVCFFPRLKEFILNQDWNDPKSQLQQCCLTLRTEGKEPDIPLYKTLQTVGPSHARTYTVAVYFKGERIGCGKGPSIQQAEMGAAMDALEKYNFPQMAHQKRFIERKYRQELKEMRWEREHQEREPDETEDIKK

SEQ ID NO: 3880 - protein, 1306 aa, Homo sapiens
MMQGNTCHRMSFHPGRGCPRGRGGHGARPSAPSFRPQNLRLLHPQQPPVQYQYEPPSAPSTTFSNSPAPNFLPPRPDFVPFPPPMPPSAQGPLPPCPIRPPFPNHQMRHPFPVPPCFPPMPPPMPCPNNPPVPGAPPGQGTFPFMMPPPSMPHPPPPPVMPQQVNYQYPPGYSHHNFPPPSFNSFQNNPSSFLPSANNSSSPHFRHLPPYPLPKAPSERRSPERLKHYDDHRHRDHSHGRGERHRSLDRRERGRSPDRRRQDSRYRSDYDRGRTPSRHRSYERSSRSPSREKKRARWEEEKDRWSDNQSSGKDKNYTSIKEKEPEETMPDKNEEEEEELLKPVWIRCTHSENYYSSDPMDQVGDSTVVGTSRLRDLYDKFEEELGSRQEKAKAARPPWEPPKTKLDEDLESSSESECESDEDSTCSSSSDSEVFDVIAEIKRKKAHPDRLHDELWYNDPGQMNDGPLCKCSAKARRTGIRHSIYPGEEAIKPCRPMTNNAGRLFHYRITVSPPTNFLTDRPTVIEYDDHEYIFEGFSMFAHAPLTNIPLCKVIRFNIDYTIHFIEEMMPENFCVKGLELFSLFLFRDILELYDWNLKGPLFEDSPPCCPRFHFMPRFVRFLPDGGKEVLSMHQILLYLLRCSKALVPEEEIANMLQWEELEWQKYAEECKGMIVTNPGTKPSSVRIDQLDREQFNPDVITFPIIVHFGIRPAQLSYAGDPQYQKLWKSYVKLRHLLANSPKVKQTDKQKLAQREEALQKIRQKNTMRREVTVELSSQGFWKTGIRSDVCQHAMMLPVLTHHIRYHQCLMHLDKLIGYTFQDRCLLQLAMTHPSHHLNFGMNPDHARNSLSNCGIRQPKYGDRKVHHMHMRKKGINTLINIMSRLGQDDPTPSRINHNERLEFLGDAVVEFLTSVHLYYLFPSLEEGGLATYRTAIVQNQHLAMLAKKLELDRFMLYAHGPDLCRESDLRHAMANCFEALIGAVYLEGSLEEAKQLFGRLLFNDPDLREVWLNYPLHPLQLQEPNTDRQLIETSPVLQKLTEFEEAIGVIFTHVRLLARAFTLRTVGFNHLTLGHNQRMEFLGDSIMQLVATEYLFIHFPDHHEGHLTLLRSSLVNNRTQAKVAEELGMQEYAITNDKTKRPVALRTKTLADLLESFIAALYIDKDLEYVHTFMNVCFFPRLKEFILNQDWNDPKSQLQQCCLTLRTEGKEPDIPLYKTLQTVGPSHARTYTVAVYFKGERIGCGKGPSIQQAEMGAAMDALEKYNFPQMAHQKRFIERKYRQELKEMRWEREHQEREPDETEDIKK

SEQ ID NO: 3881 - protein, 1192 aa, Homo sapiens
MMQGNTCHRMSFHPGRGCPRGRGGHGARPSAPSFRPQNLRLLHPQQPPVQYQYEPPSAPSTTFSNSPAPNFLPPRPDFVPFPPPMPPSAQGPLPPCPIRPPFPNHQMRHPFPVPPCFPPMPPPMPCPNNPPVPGAPPGQGTFPFMMPPPSMPHPPPPPVMPQQVNYQYPPGYSHHNFPPPSFNSFQNNPSSFLPSANNSSSPHFRHLPPYPLPKAPSERRSPERLKHYDDHRHRDHSHGRGERHRSLDRRERGRSPDRRRQDSRYRSDYDRGRTPSRHRSYERSRERERERHRHRDNRRSPSLERSYKKEYKRSGSRSPSREKKRARWEEEKDRWSDNQSSGKDKNYTSIKEKEPEETMPDKNEEEEEELLKPVWIRCTHSENYYSSDPMDQVGDSTVVGTSRLRDLYDKFEEELGSRQEKAKAARPPWEPPKTKLDEDLESSSESECESDEDSTCSSSSDSEVFDVIAEIKRKKAHPDRLHDELWYNDPGQMNDGPLCKCSAKARRTGIRHSIYPGEEAIKPCRPMTNNAGRLFHYRITVSPPTNFLTDRPTVIEYDDHEYIFEGFSMFAHAPLTNIPLCKVIRFNIDYTIHFIEEMMPENFCVKGLELFSLFLFRDILELYDWNLKGPLFEDSPPCCPRFHFMPRFVRFLPDGGKEVLSMHQILLYLLRCSKALVPEEEIANMLQWEELEWQKYAEECKGMIVTNPGTKPSSVRIDQLDREQFNPDVITFPIIVHFGIRPAQLSYAGDPQYQKLWKSYVKLRHLLANSPKVKQTDKQKLAQREEALQKIRQKNTMRREVTVELSSQGFWKTGIRSDVCQHAMMLPVLTHHIRYHQCLMHLDKLIGYTFQDRCLLQLAMTHPSHHLNFGMNPDHARNSLSNCGIRQPKYGDRKVHHMHMRKKGINTLINIMSRLGQDDPTPSRINHNERLEFLGDAVVEFLTSVHLYYLFPSLEEGGLATYRTAIVQNQHLAMLAKKLELDRFMLYAHGPDLCRESDLRHAMANCFEALIGAVYLEGSLEEAKQLFGRLLFNDPDLREVWLNYPLHPLQLQEPNTDRQLIETSPVLQKLTEFEEAIGVIFTHVRLLARAFTLRTVGFNHLTLGHNQRMEFLGDSIMQLVATEYLFIHFPDHHEGHLTLLRSSLVNNRTQAKVAEELGMQVWSIYLLSNCDCCLLRPSLVFLQTMNEVCSLK

SEQ ID NO: 3882 - protein, 1337 aa, Homo sapiens
MMQGNTCHRMSFHPGRGCPRGRGGHGARPSAPSFRPQNLRLLHPQQPPVQYQYEPPSAPSTTFSNSPAPNFLPPRPDFVPFPPPMPPSAQGPLPPCPIRPPFPNHQMRHPFPVPPCFPPMPPPMPCPNNPPVPGAPPGQGTFPFMMPPPSMPHPPPPPVMPQQVNYQYPPGYSHHNFPPPSFNSFQNNPSSFLPSANNSSSPHFRHLPPYPLPKAPSERRSPERLKHYDDHRHRDHSHGRGERHRSLDRRERGRSPDRRRQDSRYRSDYDRGRTPSRHRSYERSRERERERHRHRDNRRSPSLERSYKKEYKRSGSRSPSREKKRARWEEEKDRWSDNQSSGKDKNYTSIKEKEPEETMPDKNEEEEEELLKPVWIRCTHSENYYSSDPMDQVGDSTVVGTSRLRDLYDKFEEELGSRQEKAKAARPPWEPPKTKLDEDLESSSESECESDEDSTCSSSSDSEVFDVIAEIKRKKAHPDRLHDELWYNDPGQMNDGPLCKCSAKARRTGIRHSIYPGEEAIKPCRPMTNNAGRLFHYRITVSPPTNFLTDRPTVIEYDDHEYIFEGFSMFAHAPLTNIPLCKVIRFNIDYTIHFIEEMMPENFCVKGLELFSLFLFRDILELYDWNLKGPLFEDSPPCCPRFHFMPRFVRFLPDGGKEVLSMHQILLYLLRCSKALVPEEEIANMLQWEELEWQKYAEECKGMIVTNPGTKPSSVRIDQLDREQFNPDVITFPIIVHFGIRPAQLSYAGDPQYQKLWKSYVKLRHLLANSPKVKQTDKQKLAQREEALQKIRQKNTMRREVTVELSSQGFWKTGIRSDVCQHAMMLPVLTHHIRYHQCLMHLDKLIGYTFQDRCLLQLAMTHPSHHLNFGMNPDHARNSLSNCGIRQPKYGDRKVHHMHMRKKGINTLINIMSRLGQDDPTPSRINHNERLEFLGDAVVEFLTSVHLYYLFPSLEEGGLATYRTAIVQNQHLAMLAKKLELDRFMLYAHGPDLCRESDLRHAMANCFEALIGAVYLEGSLEEAKQLFGRLLFNDPDLREVWLNYPLHPLQLQEPNTDRQLIETSPVLQKLTEFEEAIGVIFTHVRLLARAFTLRTVGFNHLTLGHNQRMEFLGDSIMQLVATEYLFIHFPDHHEGHLTLLRSSLVNNRTQAKVAEELGMQEYAITNDKTKRPVALRTKTLADLLESFIAALYIDKDLEYVHTFMNVCFFPRLKEFILNQDWNDPKSQLQQCCLTLRTEGKEPDIPLYKTLQTVGPSHARTYTVAVYFKGERIGCGKGPSIQQAEMGAAMDALEKYNFPQMAHQKRFIERKYRQELKEMRWEREHQEREPDETEDIKK

SEQ ID NO: 3883 - protein, 685 aa, Homo sapiens
MWLKLFFLLLYFLVLFVLARFFEAIVWYETGIFATQLVDPVALSFKKLKTILECRGLGYSGLPEKKDVRELVEKSGDLMEGELYSALKEEEASESVSSTNFSGEMHFYELVEDTKDGIWLVQVIANDRSPLVGKIHWEKMVKKVSRFGIRTGTFNCSSDPRYCRRRGWVRSTLIMSVPQTSTSKGKVMLKEYSGRKIEVEHIFKWITAHAASRIKTIYNAEHLKEEWNKSDQYWLKIYLFANLDQPPAFFSALSIKFTGRVEFIFVNVENWDNKSYMTDIGIYNMPSYILRTPEGIYRYGNHTGEFISLQAMDSFLRSLQPEVNDLFVLSLVLVNLMAWMDLFITQGATIKRFVVLISTLGTYNSLLIISWLPVLGFLQLPYLDSFYEYSLKLLRYSNTTTLASWVRADWMFYSSHPALFLSTYLGHGLLIDYFEKKRRRNNNNDEVNANNLEWLSSLWDWYTSYLFHPIASFQNFPVESDWDEDPDLFLERLAFPDLWLHPLIPTDYIKNLPMWRFKCLGVQSEEEMSEGSQDTENDSESENTDTLSSEKEVFEDKQSVLHNSPGTASHCDAEACSCANKYCQTSPCERKGRSYGSYNTNEDMEPDWLTWPADMLHCTECVVCLENFENGCLLMGLPCGHVFHQNCIVMWLAGGRHCCPVCRWPSYKKKQPYAQHQPLSNDVPS

SEQ ID NO: 3884 - protein, 690 aa, Homo sapiens
MGVRQQLALLLLLLLLLWGLGQPVWPVAVALTLRWLLGDPTCCVLLGLAMLARPWLGPWVPHGLSLAAAALALTLLPARLPPGLRWLPADVIFLAKILHLGLKIRGCLSRQPPDTFVDAFERRARAQPGRALLVWTGPGAGSVTFGELDARACQAAWALKAELGDPASLCAGEPTALLVLASQAVPALCMWLGLAKLGCPTAWINPHGRGMPLAHSVLSSGARVLVVDPDLRESLEEILPKLQAENIRCFYLSHTSPTPGVGALGAALDAAPSHPVPADLRAGITWRSPALFIYTSGTTGLPKPAILTHERVLQMSKMLSLSGATADDVVYTVLPLYHVMGLVVGILGCLDLGATCVLAPKFSTSCFWDDCRQHGVTVILYVGELLRYLCNIPQQPEDRTHTVRLAMGNGLRADVWETFQQRFGPIRIWEVYGSTEGNMGLVNYVGRCGALGKMSCLLRMLSPFELVQFDMEAAEPVRDNQGFCIPVGLGEPGLLLTKVVSQQPFVGYRGPRELSERKLVRNVRQSGDVYYNTGDVLAMDREGFLYFRDRLGDTFRWKGENVSTHEVEGVLSQVDFLQQVNVYGVCVPGCEGKVGMAAVQLAPGQTFDGEKLYQHVRAWLPAYATPHFIRIQDAMEVTSTFKLMKTRLVREGFNVGIVVDPLFVLDNRAQSFRPLTAEMYQAVCEGTWRL

SEQ ID NO: 3885 - protein, 606 aa, Homo sapiens
MGVRQQLALLLLLLLLLWGLGQPVWPVAVALTLRWLLGDPTCCVLLGLAMLARPWLGPWVPHGLSLAAAALALTLLPARLPPGLRWLPADVIFLAKILHLGLKIRGCLSRQPPDTFVDAFERRARAQPGRALLVWTGPGAGSVTFDLRESLEEILPKLQAENIRCFYLSHTSPTPGVGALGAALDAAPSHPVPADLRAGITWRSPALFIYTSGTTGLPKPAILTHERVLQMSKMLSLSGATADDVVYTVLPLYHVMGLVVGILGCLDLGATCVLAPKFSTSCFWDDCRQHGVTVILYVGELLRYLCNIPQQPEDRTHTVRLAMGNGLRADVWETFQQRFGPIRIWEVYGSTEGNMGLVNYVGRCGALGKMSCLLRMLSPFELVQFDMEAAEPVRDNQGFCIPVGLGEPGLLLTKVVSQQPFVGYRGPRELSERKLVRNVRQSGDVYYNTGDVLAMDREGFLYFRDRLGDTFRWKGENVSTHEVEGVLSQVDFLQQVNVYGVCVPGCEGKVGMAAVQLAPGQTFDGEKLYQHVRAWLPAYATPHFIRIQDAMEVTSTFKLMKTRLVREGFNVGIVVDPLFVLDNRAQSFRPLTAEMYQAVCEGTWRL

SEQ ID NO: 3886 - protein, 137 aa, Homo sapiens [sequence omitted]

SEQ ID NO: 3887 - protein, 299 aa, Homo sapiens
MDLSELERDNTGRCRLSSPVPAVCRKEPCVLGVDEAGRGPVLGPMVYAICYCPLPRLADLEALKVADSKTLLESERERLFAKMEDTDFVGWALDVLSPNLISTSMLGRVKYNLNSLSHDTATGLIQYALDQGVNVTQVFVDTVGMPETYQARLQQSFPGIEVTVKAKADALYPVVSAASICAKVARDQAVKKWQFVEKLQDLDTDYGSGYPNDPKTKAWLKEHVEPVFGFPQFVRFSWRTAQTILEKEAEDVIWEDSASENQEGLRKITSYFLNEGSQARPRSSHRYFLERGLESATSL

SEQ ID NO: 3888 - protein, 571 aa, Homo sapiens
MALPKDAIPSLSECQCGICMEILVEPVTLPCNHTLCKPCFQSTVEKASLCCPFCRRRVSSWTRYHTRRNSLVNVELWTIIQKHYPRECKLRASGQESEEVADDYQPVRLLSKPGELRREYEEEISKVAAERRASEEEENKASEEYIQRLLAEEEEEEKRQAEKRRRAMEEQLKSDEELARKLSIDINNFCEGSISASPLNSRKSDPVTPKSEKKSKNKQRNTGDIQKYLTPKSQFGSASHSEAVQEVRKDSVSKDIDSSDRKSPTGQDTEIEDMPTLSPQISLGVGEQGADSSIESPMPWLCACGAEWYHEGNVKTRPSNHGKELCVLSHERPKTRVPYSKETAVMPCGRTESGCAPTSGVTQTNGNNTGETENEESCLLISKEISKRKNQESSFEAVKDPCFSAKRRKVSPESSPDQEETEINFTQKLIDLEHLLFERHKQEEQDRLLALQLQKEVDKEQMVPNRQKGSPDEYHLRATSSPPDKVLNGQRKNPKDGNFKRQTHTKHPTPERGSRDKNRQVSLKMQLKQSVNRRKMPNSTRDHCKVSKSAHSLQPSISQKSVFQMFQRCTK

SEQ ID NO: 3889 - protein, 1980 aa, Homo sapiens
MAARLLAPPGPDSFKPFTPESLANIERRIAESKLKKPPKADGSHREDDEDSKPKPNSDLEAGKSLPFIYGDIPQGLVAVPLEDFDPYYLTQKTFVVLNRGKTLFRFSATPALYILSPFNLIRRIAIKILIHSVFSMIIMCTILTNCVFMTFSNPPDWSKNVEYTFTGIYTFESLVKIIARGFCIDGFTFLRDPWNWLDFSVIMMAYITEFVNLGNVSALRTFRVLRALKTISVIPGLKTIVGALIQSVKKLSDVMILTVFCLSVFALIGLQLFMGNLRNKCVVWPINFNESYLENGTKGFDWEEYINNKTNFYTVPGMLEPLLCGNSSDAGQCPEGYQCMKAGRNPNYGYTSFDTFSWAFLALFRLMTQDYWENLYQLTLRAAGKTYMIFFVLVIFVGSFYLVNLILAVVAMAYEEQNQATLEEAEQKEAEFKAMLEQLKKQQEEAQAAAMATSAGTVSEDAIEEEGEEGGGSPRSSSEISKLSSKSAKERRNRRKKRKQKELSEGEEKGDPEKVFKSESEDGMRRKAFRLPDNRIGRKFSIMNQSLLSIPGSPFLSRHNSKSSIFSFRGPGRFRDPGSENEFADDEHSTVEESEGRRDSLFIPIRARERRSSYSGYSGYSQGSRSSRIFPSLRRSVKRNSTVDCNGVVSLIGGPGSHIGGRLLPEATTEVEIKKKGPGSLLVSMDQLASYGRKDRINSIMSVVTNTLVEELEESQRKCPPCWYKFANTFLIWECHPYWIKLKEIVNLIVMDPFVDLAITICIVLNTLFMAMEHHPMTPQFEHVLAVGNLVFTGIFTAEMFLKLIAMDPYYYFQEGWNIFDGFIVSLSLMELSLADVEGLSVLRSFRLLRVFKLAKSWPTLNMLIKIIGNSVGALGNLTLVLAIIVFIFAVVGMQLFGKSYKECVCKINQDCELPRWHMHDFFHSFLIVFRVLCGEWIETMWDCMEVAGQAMCLIVFMMVMVIGNLVVLNLFLALLLSSFSADNLAATDDDGEMNNLQISVIRIKKGVAWTKLKVHAFMQAHFKQREADEVKPLDELYEKKANCIANHTGADIHRNGDFQKNGNGTTSGIGSSVEKYIIDEDHMSFINNPNLTVRVPIAVGESDFENLNTEDVSSESDPEGSKDKLDDTSSSEGSTIDIKPEVEEVPVEQPEEYLDPDACFTEGCVQRFKCCQVNIEEGLGKSWWILRKTCFLIVEHNWFETFIIFMILLSSGALAFEDIYIEQRKTIRTILEYADKVFTYIFILEMLLKWTAYGFVKFFTNAWCWLDFLIVAVSLVSLIANALGYSELGAIKSLRTLRALRPLRALSRFEGMRVVVNALVGAIPSIMNVLLVCLIFWLIFSIMGVNLFAGKYHYCFNETSEIRFEIEDVNNKTECEKLMEGNNTEIRWKNVKINFDNVGAGYLALLQVATFKGWMDIMYAAVDSRKPDEQPKYEDNIYMYIYFVIFIIFGSFFTLNLFIGVIIDNFNQQKKKFGGQDIFMTEEQKKYYNAMKKLGSKKPQKPIPRPLNKIQGIVFDFVTQQAFDIVIMMLICLNMVTMMVETDTQSKQMENILYWINLVFVIFFTCECVLKMFALRHYYFTIGWNIFDFVVVILSIVGMFLADIIEKYFVSPTLFRVIRLARIGRILRLIKGAKGIRTLLFALMMSLPALFNIGLLLFLVMFIFSIFGMSNFAYVKHEAGIDDMFNFETFGNSMICLFQITTSAGWDGLLLPILNRPPDCSLDKEHPGSGFKGDCGNPSVGIFFFVSYIIISFLIVVNMYIAIILENFSVATEESADPLSEDDFETFYEIWEKFDPDATQFIEYCKLADFADALEHPLRVPKPNTIELIAMDLPMVSGDRIHCLDILFAFTKRVLGDSGELDILRQQMEERFVASNPSKVSYEPITTTLRRKQEEVSAVVLQRAYRGHLARRGFICKKTTSNKLENGGTHREKKESTPSTASLPSYDSVTKPEKEKQQRAEEGRRERAKRQKEVRESKC

SEQ ID NO: 3890 - protein, 1980 aa, Homo sapiens
MAARLLAPPGPDSFKPFTPESLANIERRIAESKLKKPPKADGSHREDDEDSKPKPNSDLEAGKSLPFIYGDIPQGLVAVPLEDFDPYYLTQKTFVVLNRGKTLFRFSATPALYILSPFNLIRRIAIKILIHSVFSMIIMCTILTNCVFMTFSNPPDWSKNVEYTFTGIYTFESLVKIIARGFCIDGFTFLRDPWNWLDFSVIMMAYVTEFVDLGNVSALRTFRVLRALKTISVIPGLKTIVGALIQSVKKLSDVMILTVFCLSVFALIGLQLFMGNLRNKCVVWPINFNESYLENGTKGFDWEEYINNKTNFYTVPGMLEPLLCGNSSDAGQCPEGYQCMKAGRNPNYGYTSFDTFSWAFLALFRLMTQDYWENLYQLTLRAAGKTYMIFFVLVIFVGSFYLVNLILAVVAMAYEEQNQATLEEAEQKEAEFKAMLEQLKKQQEEAQAAAMATSAGTVSEDAIEEEGEEGGGSPRSSSEISKLSSKSAKERRNRRKKRKQKELSEGEEKGDPEKVFKSESEDGMRRKAFRLPDNRIGRKFSIMNQSLLSIPGSPFLSRHNSKSSIFSFRGPGRFRDPGSENEFADDEHSTVEESEGRRDSLFIPIRARERRSSYSGYSGYSQGSRSSRIFPSLRRSVKRNSTVDCNGVVSLIGGPGSHIGGRLLPEATTEVEIKKKGPGSLLVSMDQLASYGRKDRINSIMSVVTNTLVEELEESQRKCPPCWYKFANTFLIWECHPYWIKLKEIVNLIVMDPFVDLAITICIVLNTLFMAMEHHPMTPQFEHVLAVGNLVFTGIFTAEMFLKLIAMDPYYYFQEGWNIFDGFIVSLSLMELSLADVEGLSVLRSFRLLRVFKLAKSWPTLNMLIKIIGNSVGALGNLTLVLAIIVFIFAVVGMQLFGKSYKECVCKINQDCELPRWHMHDFFHSFLIVFRVLCGEWIETMWDCMEVAGQAMCLIVFMMVMVIGNLVVLNLFLALLLSSFSADNLAATDDDGEMNNLQISVIRIKKGVAWTKLKVHAFMQAHFKQREADEVKPLDELYEKKANCIANHTGADIHRNGDFQKNGNGTTSGIGSSVEKYIIDEDHMSFINNPNLTVRVPIAVGESDFENLNTEDVSSESDPEGSKDKLDDTSSSEGSTIDIKPEVEEVPVEQPEEYLDPDACFTEGCVQRFKCCQVNIEEGLGKSWWILRKTCFLIVEHNWFETFIIFMILLSSGALAFEDIYIEQRKTIRTILEYADKVFTYIFILEMLLKWTAYGFVKFFTNAWCWLDFLIVAVSLVSLIANALGYSELGAIKSLRTLRALRPLRALSRFEGMRVVVNALVGAIPSIMNVLLVCLIFWLIFSIMGVNLFAGKYHYCFNETSEIRFEIEDVNNKTECEKLMEGNNTEIRWKNVKINFDNVGAGYLALLQVATFKGWMDIMYAAVDSRKPDEQPKYEDNIYMYIYFVIFIIFGSFFTLNLFIGVIIDNFNQQKKKFGGQDIFMTEEQKKYYNAMKKLGSKKPQKPIPRPLNKIQGIVFDFVTQQAFDIVIMMLICLNMVTMMVETDTQSKQMENILYWINLVFVIFFTCECVLKMFALRHYYFTIGWNIFDFVVVILSIVGMFLADIIEKYFVSPTLFRVIRLARIGRILRLIKGAKGIRTLLFALMMSLPALFNIGLLLFLVMFIFSIFGMSNFAYVKHEAGIDDMFNFETFGNSMICLFQITTSAGWDGLLLPILNRPPDCSLDKEHPGSGFKGDCGNPSVGIFFFVSYIIISFLIVVNMYIAIILENFSVATEESADPLSEDDFETFYEIWEKFDPDATQFIEYCKLADFADALEHPLRVPKPNTIELIAMDLPMVSGDRIHCLDILFAFTKRVLGDSGELDILRQQMEERFVASNPSKVSYEPITTTLRRKQEEVSAVVLQRAYRGHLARRGFICKKTTSNKLENGGTHREKKESTPSTASLPSYDSVTKPEKEKQQRAEEGRRERAKRQKEVRESKC

SEQ ID NO: 3891 - protein, 1991 aa, Homo sapiens
MAARLLAPPGPDSFKPFTPESLANIERRIAESKLKKPPKADGSHREDDEDSKPKPNSDLEAGKSLPFIYGDIPQGLVAVPLEDFDPYYLTQKTFVVLNRGKTLFRFSATPALYILSPFNLIRRIAIKILIHSVFSMIIMCTILTNCVFMTFSNPPDWSKNVEYTFTGIYTFESLVKIIARGFCIDGFTFLRDPWNWLDFSVIMMAYITEFVNLGNVSALRTFRVLRALKTISVIPGLKTIVGALIQSVKKLSDVMILTVFCLSVFALIGLQLFMGNLRNKCVVWPINFNESYLENGTKGFDWEEYINNKTNFYTVPGMLEPLLCGNSSDAGQCPEGYQCMKAGRNPNYGYTSFDTFSWAFLALFRLMTQDYWENLYQLTLRAAGKTYMIFFVLVIFVGSFYLVNLILAVVAMAYEEQNQATLEEAEQKEAEFKAMLEQLKKQQEEAQAAAMATSAGTVSEDAIEEEGEEGGGSPRSSSEISKLSSKSAKERRNRRKKRKQKELSEGEEKGDPEKVFKSESEDGMRRKAFRLPDNRIGRKFSIMNQSLLSIPGSPFLSRHNSKSSIFSFRGPGRFRDPGSENEFADDEHSTVEESEGRRDSLFIPIRARERRSSYSGYSGYSQGSRSSRIFPSLRRSVKRNSTVDCNGVVSLIGGPGSHIGGRLLPEVKIDKAATDDSATTEVEIKKKGPGSLLVSMDQLASYGRKDRINSIMSVVTNTLVEELEESQRKCPPCWYKFANTFLIWECHPYWIKLKEIVNLIVMDPFVDLAITICIVLNTLFMAMEHHPMTPQFEHVLAVGNLVFTGIFTAEMFLKLIAMDPYYYFQEGWNIFDGFIVSLSLMELSLADVEGLSVLRSFRLLRVFKLAKSWPTLNMLIKIIGNSVGALGNLTLVLAIIVFIFAVVGMQLFGKSYKECVCKINQDCELPRWHMHDFFHSFLIVFRVLCGEWIETMWDCMEVAGQAMCLIVFMMVMVIGNLVVLNLFLALLLSSFSADNLAATDDDGEMNNLQISVIRIKKGVAWTKLKVHAFMQAHFKQREADEVKPLDELYEKKANCIANHTGADIHRNGDFQKNGNGTTSGIGSSVEKYIIDEDHMSFINNPNLTVRVPIAVGESDFENLNTEDVSSESDPEGSKDKLDDTSSSEGSTIDIKPEVEEVPVEQPEEYLDPDACFTEGCVQRFKCCQVNIEEGLGKSWWILRKTCFLIVEHNWFETFIIFMILLSSGALAFEDIYIEQRKTIRTILEYADKVFTYIFILEMLLKWTAYGFVKFFTNAWCWLDFLIVAVSLVSLIANALGYSELGAIKSLRTLRALRPLRALSRFEGMRVVVNALVGAIPSIMNVLLVCLIFWLIFSIMGVNLFAGKYHYCFNETSEIRFEIEDVNNKTECEKLMEGNNTEIRWKNVKINFDNVGAGYLALLQVATFKGWMDIMYAAVDSRKPDEQPKYEDNIYMYIYFVIFIIFGSFFTLNLFIGVIIDNFNQQKKKFGGQDIFMTEEQKKYYNAMKKLGSKKPQKPIPRPLNKIQGIVFDFVTQQAFDIVIMMLICLNMVTMMVETDTQSKQMENILYWINLVFVIFFTCECVLKMFALRHYYFTIGWNIFDFVVVILSIVGMFLADIIEKYFVSPTLFRVIRLARIGRILRLIKGAKGIRTLLFALMMSLPALFNIGLLLFLVMFIFSIFGMSNFAYVKHEAGIDDMFNFETFGNSMICLFQITTSAGWDGLLLPILNRPPDCSLDKEHPGSGFKGDCGNPSVGIFFFVSYIIISFLIVVNMYIAIILENFSVATEESADPLSEDDFETFYEIWEKFDPDATQFIEYCKLADFADALEHPLRVPKPNTIELIAMDLPMVSGDRIHCLDILFAFTKRVLGDSGELDILRQQMEERFVASNPSKVSYEPITTTLRRKQEEVSAVVLQRAYRGHLARRGFICKKTTSNKLENGGTHREKKESTPSTASLPSYDSVTKPEKEKQQRAEEGRRERAKRQKEVRESKC

SEQ ID NO: 3892 - protein, 1282 aa, Homo sapiens
MAARLLAPPGPDSFKPFTPESLANIERRIAESKLKKPPKADGSHREDDEDSKPKPNSDLEAGKSLPFIYGDIPQGLVAVPLEDFDPYYLTQKTFVVLNRGKTLFRFSATPALYILSPFNLIRRIAIKILIHSVFSMIIMCTILTNCVFMTFSNPPDWSKNVEYTFTGIYTFESLVKIIARGFCIDGFTFLRDPWNWLDFSVIMMAYITEFVNLGNVSALRTFRVLRALKTISVIPGLKTIVGALIQSVKKLSDVMILTVFCLSVFALIGLQLFMGNLRNKCVVWPINFNESYLENGTKGFDWEEYINNKTNFYTVPGMLEPLLCGNSSDAGQCPEGYQCMKAGRNPNYGYTSFDTFSWAFLALFRLMTQDYWENLYQLTLRAAGKTYMIFFVLVIFVGSFYLVNLILAVVAMAYEEQNQATLEEAEQKEAEFKAMLEQLKKQQEEAQAAAMATSAGTVSEDAIEEEGEEGGGSPRSSSEISKLSSKSAKERRNRRKKRKQKELSEGEEKGDPEKVFKSESEDGMRRKAFRLPDNRIGRKFSIMNQSLLSIPGSPFLSRHNSKSSIFSFRGPGRFRDPGSENEFADDEHSTVEESEGRRDSLFIPIRARERRSSYSGYSGYSQGSRSSRIFPSLRRSVKRNSTVDCNGVVSLIGGPGSHIGGRLLPEATTEVEIKKKGPGSLLVSMDQLASYGRKDRINSIMSVVTNTLVEELEESQRKCPPCWYKFANTFLIWECHPYWIKLKEIVNLIVMDPFVDLAITICIVLNTLFMAMEHHPMTPQFEHVLAVGNLVFTGIFTAEMFLKLIAMDPYYYFQEGWNIFDGFIVSLSLMELSLADVEGLSVLRSFRLLRVFKLAKSWPTLNMLIKIIGNSVGALGNLTLVLAIIVFIFAVVGMQLFGKSYKECVCKINQDCELPRWHMHDFFHSFLIVFRVLCGEWIETMWDCMEVAGQAMCLIVFMMVMVIGNLVVLNLFLALLLSSFSADNLAATDDDGEMNNLQISVIRIKKGVAWTKLKVHAFMQAHFKQREADEVKPLDELYEKKANCIANHTGADIHRNGDFQKNGNGTTSGIGSSVEKYIIDEDHMSFINNPNLTVRVPIAVGESDFENLNTEDVSSESDPEGSKDKLDDTSSSEGSTIDIKPEVEEVPVEQPEEYLDPDACFTEGCVQRFKCCQVNIEEGLGKSWWILRKTCFLIVEHNWFETFIIFMILLSSGALAFEDIYIEQRKTIRTILEYADKVFTYIFILEMLLKWTAYGFVKFFTNAWCWLDFLIVAVPLNLSGLI

SEQ ID NO: 3893 - protein, 1939 aa, Homo sapiens
MAARLLAPPGPDSFKPFTPESLANIERRIAESKLKKPPKADGSHREDDEDSKPKPNSDLEAGKSLPFIYGDIPQGLVAVPLEDFDPYYLTQKTFVVLNRGKTLFRFSATPALYILSPFNLIRRIAIKILIHSVFSMIIMCTILTNCVFMTFSNPPDWSKNVEYTFTGIYTFESLVKIIARGFCIDGFTFLRDPWNWLDFSVIMMAYITEFVNLGNVSALRTFRVLRALKTISVIPGLKTIVGALIQSVKKLSDVMILTVFCLSVFALIGLQLFMGNLRNKCVVWPINFNESYLENGTKGFDWEEYINNKTNFYTVPGMLEPLLCGNSSDAGQCPEGYQCMKAGRNPNYGYTSFDTFSWAFLALFRLMTQDYWENLYQLTLRAAGKTYMIFFVLVIFVGSFYLVNLILAVVAMAYEEQNQATLEEAEQKEAEFKAMLEQLKKQQEEAQAAAMATSAGTVSEDAIEEEGEEGGGSPRSSSEISKLSSKSAKERRNRRKKRKQKELSEGEEKGDPEKVFKSESEDGMRRKAFRLPDNRIGRKFSIMNQSLLSIPGSPFLSRHNSKSSIFSFRGPGRFRDPGSENEFADDEHSTVEESEGRRDSLFIPIRARERRSSYSGYSGYSQGSRSSRIFPSLRRSVKRNSTVDCNGVVSLIGGPGSHIGGRLLPEATTEVEIKKKGPGSLLVSMDQLASYGRKDRINSIMSVVTNTLVEELEESQRKCPPCWYKFANTFLIWECHPYWIKLKEIVNLIVMDPFVDLAITICIVLNTLFMAMEHHPMTPQFEHVLAVGNLVFTGIFTAEMFLKLIAMDPYYYFQEGWNIFDGFIVSLSLMELSLADVEGLSVLRSFRLLRVFKLAKSWPTLNMLIKIIGNSVGALGNLTLVLAIIVFIFAVVGMQLFGKSYKECVCKINQDCELPRWHMHDFFHSFLIVFRVLCGEWIETMWDCMEVAGQAMCLIVFMMVMVIGNLVVLNLFLALLLSSFSADNLAATDDDGEMNNLQISVIRIKKGVAWTKLKVHAFMQAHFKQREADEVKPLDELYEKKANCIANHTGADIHRNGDFQKNGNGTTSGIGSSVEKYIIDEDHMSFINNPNLTVRVPIAVGESDFENLNTEDVSSESDPEGSKDKLDDTSSSEGSTIDIKPEVEEVPVEQPEEYLDPDACFTEGCVQRFKCCQVNIEEGLGKSWWILRKTCFLIVEHNWFETFIIFMILLSSGALAFEDIYIEQRKTIRTILEYADKVFTYIFILEMLLKWTAYGFVKFFTNAWCWLDFLIVAVVVNALVGAIPSIMNVLLVCLIFWLIFSIMGVNLFAGKYHYCFNETSEIRFEIEDVNNKTECEKLMEGNNTEIRWKNVKINFDNVGAGYLALLQVATFKGWMDIMYAAVDSRKPDEQPKYEDNIYMYIYFVIFIIFGSFFTLNLFIGVIIDNFNQQKKKFGGQDIFMTEEQKKYYNAMKKLGSKKPQKPIPRPLNKIQGIVFDFVTQQAFDIVIMMLICLNMVTMMVETDTQSKQMENILYWINLVFVIFFTCECVLKMFALRHYYFTIGWNIFDFVVVILSIVGMFLADIIEKYFVSPTLFRVIRLARIGRILRLIKGAKGIRTLLFALMMSLPALFNIGLLLFLVMFIFSIFGMSNFAYVKHEAGIDDMFNFETFGNSMICLFQITTSAGWDGLLLPILNRPPDCSLDKEHPGSGFKGDCGNPSVGIFFFVSYIIISFLIVVNMYIAIILENFSVATEESADPLSEDDFETFYEIWEKFDPDATQFIEYCKLADFADALEHPLRVPKPNTIELIAMDLPMVSGDRIHCLDILFAFTKRVLGDSGELDILRQQMEERFVASNPSKVSYEPITTTLRRKQEEVSAVVLQRAYRGHLARRGFICKKTTSNKLENGGTHREKKESTPSTASLPSYDSVTKPEKEKQQRAEEGRRERAKRQKEVRESKC

SEQ ID NO: 3894 - protein, 332 aa, Homo sapiens
MSEAGEEQPMETTGATENGHEAVPEASRGRGWTGAAAGAGGATAAPPSGNQNGAEGDQINASKNEEDAGKMFVGGLSWDTSKKDLKDYFTKFGEVVDCTIKMDPNTGRSRGFGFILFKDAASVEKVLDQKEHRLDGRVIDPKKAMAMKKDPVKKIFVGGLNPESPTEEKIREYFGEFGEIEAIELPMDPKLNKRRGFVFITFKEEEPVKKVLEKKFHTVSGSKCEIKVAQPKEVYQQQQYGSGGRGNRNRGNRGSGGGGGGGGQSQSWNQGYGNYWNQGYGYQQGYGPGYGGYDYSPYGYYGYGPGYDYSQGSTNYGKSQRRGGHQNNYKPY

SEQ ID NO: 3895 - protein, 332 aa, Homo sapiens
MSEAGEEQPMETTGATENGHEAVPEGESPAGAGTGAAAGAGGATAAPPSGNQNGAEGDQINASKNEEDAGKMFVGGLSWDTSKKDLKDYFTKFGEVVDCTIKMDPNTGRSRGFGFILFKDAASVEKVLDQKEHRLDGRVIDPKKAMAMKKDPVKKIFVGGLNPEATEEKIREYFGEFGEIEAIELPMDPKLNKRRGFVFITFKEEEPVKKVLEKKFHTVSGSKCEIKVAQPKEVYQQQQYGSGGRGNRNRGNRGSGGGGGGGGQSQSWNQGYGNYWNQGYGYQQGYGPGYGGYDYSPYGYYGYGPGYDYSQGSTNYGKSQRRGGHQNNYKPY

SEQ ID NO: 3896 - protein, 285 aa, Homo sapiens
MSEAGEEQPMETTGATENGHEAVPEGESPAGAGTGAAAGAGGATAAPPSGNQNGAEGDQINASKNEEDAGKMFVGGLSWDTSKKDLKDYFTKFGEVVDCTIKMDPNTGRSRGFGFILFKDAASVEKVLDQKEHRLDGRVIDPKKAMAMKKDPVKKIFVGGLNPEATEEKIREYFGEFGEIEAIELPMDPKLNKRRGFVFITFKEEEPVKKVLEKKFHTVSGSKCEIKVAQPKEVYQQQQYGSGGRGNRNRGNRGSGGGGGGGGQGSTNYGKSQRRGGHQNNYKPY

SEQ ID NO: 3897 - protein, 286 aa, Homo sapiens
MSEAGEEQPMETTGATENGHEAVPEGESPAGAGTGAAAGAGGATAAPPSGNQNGAEGDQINASKNEEDAGKMFVGGLSWDTSKKDLKDYFTKFGEVVDCTIKMDPNTGRSRGFGFILFKDAASVEKVLDQKEHRLDGRVIDPKKAMAMKKDPVKKIFVGGLNPESPTEEKIREYFGEFGEIEAIELPMDPKLNKRRGFVFITFKEEEPVKKVLEKKFHTVSGSKCEIKVAQPKEVYQQQQYGSGGRGNRNRGNRGSGGGGGGGGQGSTNYGKSQRRGGHQNNYKPY

SEQ ID NO: 3898 - protein, 346 aa, Homo sapiens
MVLVHVGYLVLPVFGSVRNRGAPFQRSQHPHATSCRHFHLGPPQPQQLAPDFPLAHPVQSQPGLSAHMAPAHQHSGALHQSLTPLPTLQFQDVTGPSFLPQALHQQYLLQQQLLEAQHRRLVSHPRRSQERVSVHPHRLHPSFDFGQLQTPQPRYLAEGTDWDLSVDAGLSPAQFQVRPIPQHYQHYLATPRMHHFPRNSSSTQMVVHEIRNYPYPQLHFLALQGLNPSRHTSAVRESYEELLQLEDRLGNVTRGAVQNTIERFTFPHKYKKRRPQDGKGKKDEGEESDTDEKCTICLSMLEDGEDVRRLPCMHLFHQLCVDQWLAMSKKCPICRVDIETQLGADS

SEQ ID NO: 3899 - protein, 154 aa, Homo sapiens
MHHFPRNSSSTQMVVHEIRNYPYPQLHFLALQGLNPSRHTSAVRESYEELLQLEDRLGNVTRGAVQNTIERFTFPHKYKKRRPQDGKGKKDEGEESDTDEKCTICLSMLEDGEDVRRLPCMHLFHQLCVDQWLAMSKKCPICRVDIETQLGADS

SEQ ID NO: 3900 - protein, 153 aa, Homo sapiens
MASYFDEHDCEPSDPEQETRTNMLLELARSLFNRMDFEDLGLVVDWDHHLPPPAAKTVVENLPRTVIRGSQAELKCPVCLLEFEEEETAIEMPCHHLFHSSCILPWLSKTNSCPLCRYELPTDDDTYEEHRRDKARKQQQQHRLENLHGAMYT

SEQ ID NO: 3901 - protein, 396 aa, Homo sapiens
MAAVGAGGSTAAPGPGAVSAGALEPGTASAAHRRLKYISLAVLVVQNASLILSIRYARTLPGDRFFATTAVVMAEVLKGLTCLLLLFAQKRGNVKHLVLFLHEAVLVQYVDTLKLAVPSLIYTLQNNLQYVAISNLPAATFQVTYQLKILTTALFSVLMLNRSLSRLQWASLLLLFTGVAIVQAQQAGGGGPRPLDQNPGAGLAAVVASCLSSGFAGVYFEKILKGSSGSVWLRNLQLGLFGTALGLVGLWWAEGTAVATRGFFFGYTPAVWGVVLNQAFGGLLVAVVVKYADNILKGFATSLSIVLSTVASIRLFGFHVDPLFALGAGLVIGAVYLYSLPRGAAKAIASASASASGPCVHQQPPGQPPPPQLSSHRGDLITEPFLPKLLTKVKGS

SEQ ID NO: 3902 - protein, 393 aa, Homo sapiens
MAAVGAGGSTAAPGPGAVSAGALEPGTASAAHRRLKYISLAVLVVQNASLILSIRYARTLPGDRFFATTAVVMAEVLKGLTCLLLLFAQKRGNVKHLVLFLHEAVLVQYVDTLKLAVPSLIYTLQNNLQYVAISNLPAATFQVTYQLKILTTALFSVLMLNRSLSRLQWASLLLLFTGVAIVQAQQAGGGGPRPLDQNPGAGLAAVVASCLSSGFAGVYFEKILKGSSGSVWLRNLQLGLFGTALGLVGLWWAEGTAVATRGFFFGYTPAVWGVVLNQAFGGLLVAVVVKYADNILKGFATSLSIVLSTVASIRLFGFHVDPLFALGAGLVIGAVYLYSLPRGAAKAIASASASASGPCVHQQPPGQPPPPQLSSHRGDLITEPFLPKSVLVK

SEQ ID NO: 3903 - protein, 242 aa, Homo sapiens
MAAVGAGGSTAAPGPGAVSAGALEPGTASAAHRRLKYISLAVLVVQNASLILSIRYARTLPGDRFFATTAVVMAEVLKGLTCLLLLFAQKRGNVKHLVLFLHEAVLVQYVDTLKLAVPSLIYTLQNNLQYVAISNLPAATFQPSPRCSQSHSLCLCLRLRALRSPAASRAATTTAAVFPPWRPHHGALSAKVSAGEVRAGSNGGTQGRGTGVEGVGHLQDPSRHPPGPGSSGFGRWSFLPGH

SEQ ID NO: 3904 - protein, 421 aa, Homo sapiens
MAAVGAGGSTAAPGPGAVSAGALEPGTASAELLLTWEEAEARGQGLPQPLPDTSVRIPAHRRLKYISLAVLVVQNASLILSIRYARTLPGDRFFATTAVVMAEVLKGLTCLLLLFAQKRGNVKHLVLFLHEAVLVQYVDTLKLAVPSLIYTLQNNLQYVAISNLPAATFQVTYQLKILTTALFSVLMLNRSLSRLQWASLLLLFTGVAIVQAQQAGGGGPRPLDQNPGAGLAAVVASCLSSGFAGVYFEKILKGSSGSVWLRNLQLGLFGTALGLVGLWWAEGTAVATRGFFFGYTPAVWGVVLNQAFGGLLVAVVVKYADNILKGFATSLSIVLSTVASIRLFGFHVDPLFALGAGLVIGAVYLYSLPRGAAKAIASASASASGPCVHQQPPGQPPPPQLSSHRGDLITEPFLPKSVLVK

SEQ ID NO: 3905 - protein, 332 aa, Homo sapiens
MAAVGAGGSTAAPGPGAVSAGALEPGTASAGNVKHLVLFLHEAVLVQYVDTLKLAVPSLIYTLQNNLQYVAISNLPAATFQVTYQLKILTTALFSVLMLNRSLSRLQWASLLLLFTGVAIVQAQQAGGGGPRPLDQNPGAGLAAVVASCLSSGFAGVYFEKILKGSSGSVWLRNLQLGLFGTALGLVGLWWAEGTAVATRGFFFGYTPAVWGVVLNQAFGGLLVAVVVKYADNILKGFATSLSIVLSTVASIRLFGFHVDPLFALGAGLVIGAVYLYSLPRGAAKAIASASASASGPCVHQQPPGQPPPPQLSSHRGDLITEPFLPKSVLVK

SEQ ID NO: 3906 - protein, 483 aa, Homo sapiens
MAATDLERFSNAEPEPRSLSLGGHVGFDSLPDQLVSKSVTQGFSFNILCVGETGIGKSTLMNTLFNTTFETEEASHHEACVRLRPQTYDLQESNVQLKLTIVDAVGFGDQINKDESYRPIVDYIDAQFENYLQEELKIRRSLFDYHDTRIHVCLYFITPTGHSLKSLDLVTMKKLDSKVNIIPIIAKADTISKSELHKFKIKIMGELVSNGVQIYQFPTDDEAVAEINAVMNAHLPFAVVGSTEEVKVGNKLVRARQYPWGVVQVENENHCDFVKLREMLIRVNMEDLREQTHSRHYELYRRCKLEEMGFQDSDGDSQPFSLQETYEAKRKEFLSELQRKEEEMRQMFVNKVKETELELKEKERELHEKFEHLKRVHQEEKRKVEEKRRELEEETNAFNRRKAAVEALQSQALHATSQQPLRKDKDKKNRSDIGAHQPGMSLSSSKVMMTKASVEPLNCSSWWPAIQCCSCLVRDATWREGFL

SEQ ID NO: 3907 - protein, 429 aa, Homo sapiens
MAATDLERFSNAEPEPRSLSLGGHVGFDSLPDQLVSKSVTQGFSFNILCVGETGIGKSTLMNTLFNTTFETEEASHHEACVRLRPQTYDLQESNVQLKLTIVDAVGFGDQINKDESYRPIVDYIDAQFENYLQEELKIRRSLFDYHDTRIHVCLYFITPTGHSLKSLDLVTMKKLDSKVNIIPIIAKADTISKSELHKFKIKIMGELVSNGVQIYQFPTDDEAVAEINAVMNAHLPFAVVGSTEEVKVGNKLVRARQYPWGVVQVENENHCDFVKLREMLIRVNMEDLREQTHSRHYELYRRCKLEEMGFQDSDGDSQPFSLQETYEAKRKEFLSELQRKEEEMRQMFVNKVKETELELKEKERELHEKFEHLKRVHQEEKRKVEEKRRELEEETNAFNRRKAAVEALQSQALHATSQQPLRKDKDKKN

SEQ ID NO: 3908 - protein, 369 aa, Homo sapiens
MNTLFNTTFETEEASHHEACVRLRPQTYDLQESNVQLKLTIVDAVGFGDQINKDESYRPIVDYIDAQFENYLQEELKIRRSLFDYHDTRIHVCLYFITPTGHSLKSLDLVTMKKLDSKVNIIPIIAKADTISKSELHKFKIKIMGELVSNGVQIYQFPTDDEAVAEINAVMNAHLPFAVVGSTEEVKVGNKLVRARQYPWGVVQVENENHCDFVKLREMLIRVNMEDLREQTHSRHYELYRRCKLEEMGFQDSDGDSQPFSLQETYEAKRKEFLSELQRKEEEMRQMFVNKVKETELELKEKERELHEKFEHLKRVHQEEKRKVEEKRRELEEETNAFNRRKAAVEALQSQALHATSQQPLRKDKDKKN

SEQ ID NO: 3909 - protein, 442 aa, Homo sapiens
MAATDLERFSNAEPEPRSLSLGGHVGFDSLPDQLVSKSVTQGFSFNILCVGETGIGKSTLMNTLFNTTFETEEASHHEACVRLRPQTYDLQESNVQLKLTIVDAVGFGDQINKDESYRPIVDYIDAQFENYLQEELKIRRSLFDYHDTRIHVCLYFITPTGHSLKSLDLVTMKKLDSKVNIIPIIAKADTISKSELHKFKIKIMGELVSNGVQIYQFPTDDEAVAEINAVMNAHLPFAVVGSTEEVKVGNKLVRARQYPWGVVQVENENHCDFVKLREMLIRVNMEDLREQTHSRHYELYRRCKLEEMGFQDSDGDSQPFSLQETYEAKRKEFLSELQRKEEEMRQMFVNKVKETELELKEKERELHEKFEHLKRVHQEEKRKVEEKRRELEEETNAFNRRKAAVEALQSQALHATSQQPLRKDKDKKKASGWSSIYSVTIP

SEQ ID NO: 3910 - protein, 325 aa, Homo sapiens
MFANLKYVSLGILVFQTTSLVLTMRYSRTLKEEGPRYLSSTAVVVAELLKIMACILLVYKDSKCSLRALNRVLHDEILNKPMETLKLAIPSGIYTLQNNLLYVALSNLDAATYQVTYQLKILTTALFSVSMLSKKLGVYQWLSLVILMTGVAFVQWPSDSQLDSKELSAGSQFVGLMAVLTACFSSGFAGVYFEKILKETKQSVWIRNIQLGFFGSIFGLMGVYIYDGELVSKNGFFQGYNRLTWIVVVLQALGGLVIAAVIKYADNILKGFATSLSIILSTLISYFWLQDFVPTSVFFLGAILVITATFLYGYDPKPAGNPTKA

SEQ ID NO: 3911 - protein, 367 aa, Homo sapiens
MSSRSVLSPVVGTDAPDQHLELKKPQELKEMERLPLANEDKTMFANLKYVSLGILVFQTTSLVLTMRYSRTLKEEGPRYLSSTAVVVAELLKIMACILLVYKDSKCSLRALNRVLHDEILNKPMETLKLAIPSGIYTLQNNLLYVALSNLDAATYQVTYQLKILTTALFSVSMLSKKLGVYQWLSLVILMTGVAFVQWPSDSQLDSKELSAGSQFVGLMAVLTACFSSGFAGVYFEKILKETKQSVWIRNIQLGFFGSIFGLMGVYIYDGELVSKNGFFQGYNRLTWIVVVLQALGGLVIAAVIKYADNILKGFATSLSIILSTLISYFWLQDFVPTSVFFLGAILVITATFLYGYDPKPAGNPTKA

SEQ ID NO: 3912 - protein, 220 aa, Homo sapiens
MFANLKYVSLGILVFQTTSLVLTMRYSRTLKEEGPRYLSSTAVVVAELLKIMACILLVYKDSKCSLRALNRVLHDEILNKPMETLKLAIPSGIYTLQNNLLYVALSNLDAATYQVTYQLKILTTALFSVSMLSKKLGVYQWLSLVILMTGVAFVQWPSDSQLDSKELSAGSQFVGLMAVLTACFSSGFAGVYFEKILKETKQSVWIRNIQLVSFSLEPSL

SEQ ID NO: 3913 - protein, 602 aa, Homo sapiens
MDSLQDTVALDHGGCCPALSRLVPRGFGTEMWTLFALSGPLFLFQVLTFMIYIVSTVFCGHLGKVELASVTLAVAFVNVCGVSVGVGLSSACDTLMSQSFGSPNKKHVGVILQRGALVLLLCCLPCWALFLNTQHILLLFRQDPDVSRLTQDYVMIFIPGLPVIFLYNLLAKYLQNQGWLKGQEEESPFQTPGLSILHPSHSHLSRASFHLFQKITWPQVLSGVVGNCVNGVANYALVSVLNLGVRGSAYANIISQFAQTVFLLLYIVLKKLHLETWAGWSSQCLQDWGPFFSLAVPSMLMICVEWWAYEIGSFLMGLLSVVDLSAQAVIYEVATVTYMIPLGLSIGVCVRVGMALGAADTVQAKRSAVSGVLSIVGISLVLGTLISILKNQLGHIFTNDEDVIALVSQVLPVYSVFHVFEAICCVYGGVLRGTGKQAFGAAVNAITYYIIGLPLGILLTFVVRMRIMGLWLGMLACVFLATAAFVAYTARLDWKLAAEEAKKHSGRQQQQRAESTATRPGPEKAVLSSVATGSSPGITLTTYSRSECHVDFFRTPEEAHALSAPTSRLSVKQLVIRRGAALGAASATLMVGLTVRILATRH

SEQ ID NO: 3914 - protein, 296 aa, Homo sapiens
MIYIVSTVFCGHLGKVELASVTLAVAFVNVCGVSVGVGLSSACDTLMSQSFGSPNKKHVGVILQRGALVLLLCCLPCWALFLNTQHILLLFRQDPDVSRLTQDYVMIFIPGLPVIFLYNLLAKYLQNQKITWPQVLSGVVGNCVNGVANYALVSVLNLGVRGSAYANIISQFAQTVFLLLYIVLKKLHLETWAGWSSQCLQDWGPFFSLAVPSMLMICVEWWAYEIGSFLMGLLSVVDLSAQAVIYEVATVTYMIPLGLSIGVCVRVGMALGAADTVQAKRSAVSGVLSIEMSLPW

SEQ ID NO: 3915 - protein, 566 aa, Homo sapiens
MDSLQDTVALDHGGCCPALSRLVPRGFGTEMWTLFALSGPLFLFQVLTFMIYIVSTVFCGHLGKVELASVTLAVAFVNVCGVSVGVGLSSACDTLMSQSFGSPNKKHVGVILQRGALVLLLCCLPCWALFLNTQHILLLFRQDPDVSRLTQDYVMIFIPGLPVIFLYNLLAKYLQNQKITWPQVLSGVVGNCVNGVANYALVSVLNLGVRGSAYANIISQFAQTVFLLLYIVLKKLHLETWAGWSSQCLQDWGPFFSLAVPSMLMICVEWWAYEIGSFLMGLLSVVDLSAQAVIYEVATVTYMIPLGLSIGVCVRVGMALGAADTVQAKRSAVSGVLSIVGISLVLGTLISILKNQLGHIFTNDEDVIALVSQVLPVYSVFHVFEAICCVYGGVLRGTGKQAFGAAVNAITYYIIGLPLGILLTFVVRMRIMGLWLGMLACVFLATAAFVAYTARLDWKLAAEEAKKHSGRQQQQRAESTATRPGPEKAVLSSVATGSSPGITLTTYSRSECHVDFFRTPEEAHALSAPTSRLSVKQLVIRRGAALGAASATLMVGLTVRILATRH

SEQ ID NO: 3916 - protein, 580 aa, Homo sapiens
MDSLQDTVALDHGGCCPALSRLVPRGFGTEMWTLFALSGPLFLFQVLTFMIYIVSTVFCGHLGKVELASVTLAVAFVNVCGVSVGVGLSSACDTLMSQSFGSPNKKHVGVILQRGALVLLLCCLPCWALFLNTQHILLLFRQDPDVSRLTQDYVMIFIPGLPVIFLYNLLAKYLQNQKITWPQVLSGVVGNCVNGVANYALVSVLNLGVRGSAYANIISQFAQTVFLLLYIVLKKLHLETWAGWSSQCLQDWGPFFSLAVPSMLMICVEWWAYEIGSFLMGLLSVVDLSAQAVIYEVATVTYMRHSHRLAYAAHVTRIPLGLSIGVCVRVGMALGAADTVQAKRSAVSGVLSIVGISLVLGTLISILKNQLGHIFTNDEDVIALVSQVLPVYSVFHVFEAICCVYGGVLRGTGKQAFGAAVNAITYYIIGLPLGILLTFVVRMRIMGLWLGMLACVFLATAAFVAYTARLDWKLAAEEAKKHSGRQQQQRAESTATRPGPEKAVLSSVATGSSPGITLTTYSRSECHVDFFRTPEEAHALSAPTSRLSVKQLVIRRGAALGAASATLMVGLTVRILATRH

SEQ ID NO: 3917 - protein, 362 aa, Homo sapiens
MDSLQDTVALDHGGCCPALSRLVPRGFGTEMWTLFALSGPLFLFQVLTFMIYIVSTVFCGHLGKVELASVTLAVAFVNVCGVSVGVGLSSACDTLMSQSFGSPNKKHVGVILQRGALVLLLCCLPCWALFLNTQHILLLFRQDPDVSRLTQDYVMIFIPGLPVIFLYNLLAKYLQNQKITWPQVLSGVVGNCVNGVANYALVSVLNLGVRGSAYANIISQFAQTVFLLLYIVLKKLHLETWAGWSSQCLQDWGPFFSLAVPSMLMICVEWWAYEIGSFLMEHAQCGGSLCPGCHLGGHCDLHDSLGAQHRGLCPSGDGSGGRGYCAGQALGRLGRAQHSWHFPGPGHPDKHPEKSAGAYFYQ

SEQ ID NO: 3918 - protein, 219 aa, Homo sapiens
MDSLQDTVALDHGGCCPALSRLVPRGFGTEMWTLFALSGPLFLFQVLTFMIYIVSTVFCGHLGKVELASVTLAVAFVNVCGVSVGVGLSSACDTLMSQSFGSPNKKHVGVILQRGALVLLLCCLPCWALFLNTQHILLLFRQDPDVSRLTQDYVMIFIPGLPVIFLYNLLAKYLQNQAGERLCVPASSNSSTGMAEGAGGGVPIPNPGFVHPPSISLTP

SEQ ID NO: 3919 - protein, 324 aa, Homo sapiens
MSVEDGGMPGLGRPRQARWTLMLLLSTAMYGAHAPLLALCHVDGRVPFRPSSAVLLTELTKLLLCAFSLLVGWQAWPQGPPPWRQAAPFALSALLYGANNNLVIYLQRYMDPSTYQVLSNLKIGSTAVLYCLCLRHRLSVRQGLALLLLMAAGACYAAGGLQVPGNTLPSPPPAAAASPMPLHITPLGLLLLILYCLISGLSSVYTELLMKRQRLPLALQNLFLYTFGVLLNLGLHAGGGSGPGLLEGFSGWAALVVLSQALNGLLMSAVMKHGSSITRLFVVSCSLVVNAVLSAVLLRLQLTAAFFLATLLIGLAMRLYYGSR

SEQ ID NO: 3920 - protein, 640 aa, Homo sapiens
MHVKKYLLKGLHRLQKGPGYTYKELLVWYCDNTNTHGPKRIICEGPKKKAMWFLLTLLFAALVCWQWGIFIRTYLSWEVSVSLSVGFKTMDFPAVTICNASPFKYSKIKHLLKDLDELMEAVLERILAPELSHANATRNLNFSIWNHTPLVLIDERNPHHPMVLDLFGDNHNGLTSSSASEKICNAHGCKMAMRLCSLNRTQCTFRNFTSATQALTEWYILQATNIFAQVPQQELVEMSYPGEQMILACLFGAEPCNYRNFTSIFYPHYGNCYIFNWGMTEKALPSANPGTEFGLKLILDIGQEDYVPFLASTAGVRLMLHEQRSYPFIRDEGIYAMSGTETSIGVLVDKLQRMGEPYSPCTVNGSEVPVQNFYSDYNTTYSIQACLRSCFQDHMIRNCNCGHYLYPLPRGEKYCNNRDFPDWAHCYSDLQMSVAQRETCIGMCKESCNDTQYKMTISMADWPSEASEDWIFHVLSQERDQSTNITLSRKGIVKLNIYFQEFNYRTIEESAANNIVWLLSNLGGQFGFWMGGSVLCLIEFGEIIIDFVWITIIKLVALAKSLRQRRAQASYAGPPPTVAELVEAHTNFGFQPDTAPRSPNTGPYPSEQALPIPGTPPPNYDSLRLQPLDVIESDSEGDAI

SEQ ID NO: 3921 - protein, 685 aa, Homo sapiens
MLLHINPAYLFKLLHGFPPWIMPTDGNLGDKNFQMGKPGHREGATMHVKKYLLKGLHRLQKGPGYTYKELLVWYCDNTNTHGPKRIICEGPKKKAMWFLLTLLFAALVCWQWGIFIRTYLSWEVSVSLSVGFKTMDFPAVTICNASPFKYSKIKHLLKDLDELMEAVLERILAPELSHANATRNLNFSIWNHTPLVLIDERNPHHPMVLDLFGDNHNGLTSSSASEKICNAHGCKMAMRLCSLNRTQCTFRNFTSATQALTEWYILQATNIFAQVPQQELVEMSYPGEQMILACLFGAEPCNYRNFTSIFYPHYGNCYIFNWGMTEKALPSANPGTEFGLKLILDIGQEDYVPFLASTAGVRLMLHEQRSYPFIRDEGIYAMSGTETSIGVLVDKLQRMGEPYSPCTVNGSEVPVQNFYSDYNTTYSIQACLRSCFQDHMIRNCNCGHYLYPLPRGEKYCNNRDFPDWAHCYSDLQMSVAQRETCIGMCKESCNDTQYKMTISMADWPSEASEDWIFHVLSQERDQSTNITLSRKGIVKLNIYFQEFNYRTIEESAANNIVWLLSNLGGQFGFWMGGSVLCLIEFGEIIIDFVWITIIKLVALAKSLRQRRAQASYAGPPPTVAELVEAHTNFGFQPDTAPRSPNTGPYPSEQALPIPGTPPPNYDSLRLQPLDVIESDSEGDAI

SEQ ID NO: 3922 - protein, 560 aa, Homo sapiens
MAGPTEAETGLAEPRALCAQRGHRTYARRWVFLLAISLLNCSNATLWLSFAPVADVIAEDLVLSMEQINWLSLVYLVVSTPFGVAAIWILDSVGLRAATILGAWLNFAGSVLRMVPCMVVGTQNPFAFLMGGQSLCALAQSLVIFSPAKLAALWFPEHQRATANMLATMSNPLGVLVANVLSPVLVKKGEDIPLMLGVYTIPAGVVCLLSTICLWESVPPTPPSAGAASSTSEKFLDGLKLQLMWNKAYVILAVCLGGMIGISASFSALLEQILCASGHSSGFSGLCGALFITFGILGALALGPYVDRTKHFTEATKIGLCLFSLACVPFALVSQLQGQTLALAATCSLLGLFGFSVGPVAMELAVECSFPVGEGAATGMIFVLGQAEGILIMLAMTALTVRRSEPSLSTCQQGEDPLDWTVSLLLMAGLCTFFSCILAVFFHTPYRRLQAESGEPPSTRNAVGGADSGPGVDRGGAGRAGVLGPSTATPECTARGASLEDPRGPGSPHPACHRATPRAQGPAATDAPSRPGRLAGRVQASRFIDPAGSHSSFSSPWVIT

SEQ ID NO: 3923 - protein, 559 aa, Homo sapiens
MAGPTEAETGLAEPRALCAQRGHRTYARRWVFLLAISLLNCSNATLWLSFAPVADVIAEDLVLSMEQINWLSLVYLVVSTPFGVAAIWILDSVGLRAATILGAWLNFAGSVLRMVPCMVVGTQNPFAFLMGGQSLCALAQSLVIFSPAKLAALWFPEHQRATANMLATMSNPLGVLVANVLSPVLVKKGEDIPLMLGVYTIPAGVVCLLSTICLWESVPPTPPSAGAASSTSEKFLDGLKLLMWNKAYVILAVCLGGMIGISASFSALLEQILCASGHSSGFSGLCGALFITFGILGALALGPYVDRTKHFTEATKIGLCLFSLACVPFALVSQLQGQTLALAATCSLLGLFGFSVGPVAMELAVECSFPVGEGAATGMIFVLGQAEGILIMLAMTALTVRRSEPSLSTCQQGEDPLDWTVSLLLMAGLCTFFSCILAVFFHTPYRRLQAESGEPPSTRNAVGGADSGPGVDRGGAGRAGVLGPSTATPECTARGASLEDPRGPGSPHPACHRATPRAQGPAATDAPSRPGRLAGRVQASRFIDPAGSHSSFSSPWVIT

SEQ ID NO: 3924 - protein, 441 aa, Homo sapiens
MAGPTEAETGLAEPRALCAQRGHRTYARRWVFLLAISLLNCSNATINWLSLVYLVVSTPFGVAAIWILDSVGLRAALGVYTIPAGVVCLLSTICLWESVPPTPPSAGAASSTSEKFLDGLKLQLMWNKAYVILAVCLGGMIGISASFSALLEQILCASGHSSGFSGLCGALFITFGILGALALGPYVDRTKHFTEATKIGLCLFSLACVPFALVSQLQGQTLALAATCSLLGLFGFSVGPVAMELAVECSFPVGEGAATGMIFVLGQAEGILIMLAMTALTVRRSEPSLSTCQQGEDPLDWTVSLLLMAGLCTFFSCILAVFFHTPYRRLQAESGEPPSTRNAVGGADSGPGVDRGGAGRAGVLGPSTATPECTARGASLEDPRGPGSPHPACHRATPRAQGPAATDAPSRPGRLAGRVQASRFIDPAGSHSSFSSPWVIT

SEQ ID NO: 3925 - protein, 802 aa, Homo sapiens
MRAVLSQKTTPLPRYLWPGHLSGPRRLTWSWCSDHRTPTCRELGSPHPTPCTGPARGWPRRGGGPCGFTSAGHVLCGYPLCLLSGPIQGCGTGLGDSSMAFLSRTSPVAAASFQSRQEARGSILLQSCQLPPQWLSTEAWTGEWKQPHGGALTSRSPGPVAPQRPCHLKGWQHRPTQHNAACKQGQAAAQTPPRPGPPSAPPPPPKEGHQEGLVELPASFRELLTFFCTNATIHGAIRLVCSRGNRLKTTSWGLLSLGALVALCWQLGLLFERHWHRPVLMAVSVHSERKLLPLVTLCDGNPRRPSPVLRHLELLDEFARENIDSLYNVNLSKGRAALSATVPRHEPPFHLDREIRLQRLSHSGSRVRVGFRLCNSTGGDCFYRGYTSGVAAVQDWYHFHYVDILALLPAAWEDSHGSQDGHFVLSCSYDGLDCQARQFRTFHHPTYGSCYTVDGVWTAQRPGITHGVGLVLRVEQQPHLPLLSTLAGIRVMVHGRNHTPFLGHHSFSVRPGTEATISIREDEVHRLGSPYGHCTAGGEGVEVELLHNTSYTRQACLVSCFQQLMVETCSCGYYLHPLPAGAEYCSSARHPAWGHCFYRLYQDLETHRLPCTSRCPRPCRESAFKLSTGTSRWPSAKSAGWTLATLGEQGLPHQSHRQRSSLAKINIVYQELNYRSVEEAPVYSVPQLLSAMGSLCSLWFGASVLSLLELLELLLDASALTLVLGGRRLRRAWFSWPRASPASGASSIKPEASQMPPPAGGTSDDPEPSGPHLPRVMLPGVLAGVSAEESWAGPQPLETLDT

SEQ ID NO: 3926 - protein, 638 aa, Homo sapiens
MAEHRSMDGRMEAATRGGSHLQAAAQTPPRPGPPSAPPPPPKEGHQEGLVELPASFRELLTFFCTNATIHGAIRLVCSRGNRLKTTSWGLLSLGALVALCWQLGLLFERHWHRPVLMAVSVHSERKLLPLVTLCDGNPRRPSPVLRHLELLDEFARENIDSLYNVNLSKGRAALSATVPRHEPPFHLDREIRLQRLSHSGSRVRVGFRLCNSTGGDCFYRGYTSGVAAVQDWYHFHYVDILALLPAAWEDSHGSQDGHFVLSCSYDGLDCQARQFRTFHHPTYGSCYTVDGVWTAQRPGITHGVGLVLRVEQQPHLPLLSTLAGIRVMVHGRNHTPFLGHHSFSVRPGTEATISIREDEVHRLGSPYGHCTAGGEGVEVELLHNTSYTRQACLVSCFQQLMVETCSCGYYLHPLPAGAEYCSSARHPAWGHCFYRLYQDLETHRLPCTSRCPRPCRESAFKLSTGTSRWPSAKSAGWTLATLGEQGLPHQSHRQRSSLAKINIVYQELNYRSVEEAPVYSVPQLLSAMGSLCSLWFGASVLSLLELLELLLDASALTLVLGGRRLRRAWFSWPRASPASGASSIKPEASQMPPPAGGTSDDPEPSGPHLPRVMLPGVLAGVSAEESWAGPQPLETLDT

SEQ ID NO: 3927 - protein, 704 aa, Homo sapiens
MAFLSRTSPVAAASFQSRQEARGSILLQSCQLPPQWLSTEAWTGEWKQPHGGALTSRSPGPVAPQRPCHLKGWQHRPTQHNAACKQGQAAAQTPPRPGPPSAPPPPPKEGHQEGLVELPASFRELLTFFCTNATIHGAIRLVCSRGNRLKTTSWGLLSLGALVALCWQLGLLFERHWHRPVLMAVSVHSERKLLPLVTLCDGNPRRPSPVLRHLELLDEFARENIDSLYNVNLSKGRAALSATVPRHEPPFHLDREIRLQRLSHSGSRVRVGFRLCNSTGGDCFYRGYTSGVAAVQDWYHFHYVDILALLPAAWEDSHGSQDGHFVLSCSYDGLDCQARQFRTFHHPTYGSCYTVDGVWTAQRPGITHGVGLVLRVEQQPHLPLLSTLAGIRVMVHGRNHTPFLGHHSFSVRPGTEATISIREDEVHRLGSPYGHCTAGGEGVEVELLHNTSYTRQACLVSCFQQLMVETCSCGYYLHPLPAGAEYCSSARHPAWGHCFYRLYQDLETHRLPCTSRCPRPCRESAFKLSTGTSRWPSAKSAGWTLATLGEQGLPHQSHRQRSSLAKINIVYQELNYRSVEEAPVYSVPQLLSAMGSLCSLWFGASVLSLLELLELLLDASALTLVLGGRRLRRAWFSWPRASPASGASSIKPEASQMPPPAGGTSDDPEPSGPHLPRVMLPGVLAGVSAEESWAGPQPLETLDT

SEQ ID NO: 3928 - protein, 322 aa, Homo sapiens
MASSSSLVPDRLRLPLCFLGVFVCYFYYGILQEKITRGKYGEGAKQETFTFALTLVFIQCVINAVFAKILIQFFDTARVDRTRSWLYAACSISYLGAMVSSNSALQFVNYPTQVLGKSCKPIPVMLLGVTLLKKKYPLAKYLCVLLIVAGVALFMYKPKKVVGIEEHTVGYGELLLLLSLTLDGLTGVSQDHMRAHYQTGSNHMMLNINLWSTLLLGMGILFTGELWEFLSFAERYPAIIYNILLFGLTSALGQSFIFMTVVYFGPLTCSIITTTRKFFTILASVILFANPISPMQWVGTVLVFLGLGLDAKFGKGAKKTSH

SEQ ID NO: 3929 - protein, 359 aa, Homo sapiens
MRPLPPVGDVRLELSPPPPLLPVPVVSGSPVGSSGRLMASSSSLVPDRLRLPLCFLGVFVCYFYYGILQEKITRGKYGEGAKQETFTFALTLVFIQCVINAVFAKILIQFFDTARVDRTRSWLYAACSISYLGAMVSSNSALQFVNYPTQVLGKSCKPIPVMLLGVTLLKKKYPLAKYLCVLLIVAGVALFMYKPKKVVGIEEHTVGYGELLLLLSLTLDGLTGVSQDHMRAHYQTGSNHMMLNINLWSTLLLGMGILFTGELWEFLSFAERYPAIIYNILLFGLTSALGQSFIFMTVVYFGPLTCSIITTTRKFFTILASVILFANPISPMQWVGTVLVFLGLGLDAKFGKGAKKTSH

SEQ ID NO: 3930 - protein, 432 aa, Homo sapiens
MDARWWAVVVLAAFPSLGAGGETPEAPPESWTQLWFFRFVVNAAGYASFMVPGYLLVQYFRRKNYLETGRGLCFPLVKACVFGNEPKASDEVPLAPRTEAAETTPMWQALKLLFCATGLQVSYLTWGVLQERVMTRSYGATATSPGERFTDSQFLVLMNRVLALIVAGLSCVLCKQPRHGAPMYRYSFASLSNVLSSWCQYEALKFVSFPTQVLAKASKVIPVMLMGKLVSRRSYEHWEYLTATLISIGVSMFLLSSGPEPRSSPATTLSGLILLAGYIAFDSFTSNWQDALFAYKMSSVQMMFGVNFFSCLFTVGSLLEQGALLEGTRFMGRHSEFAAHALLLSICSACGQLFIFYTIGQFGAAVFTIIMTLRQAFAILLSCLLYGHTVTVVGGLGVAVVFAALLLRVYARGRLKQRGKKAVPVESPVQKV

SEQ ID NO: 3931 - protein, 392 aa, Homo sapiens
MDARWWAVVVLAAFPSLGAGGETPEAPPESWTQLWFFRFVVNAAGYASFMVPGYLLVQYFRRKNYLETGRGLCFPLVKACVFGNEPKASDEVPLAPRTEAAETTPMWQALKLLFCATGLQVSYLTWGVLQERVMTRSYGATATSPGERFTDSQFLVLMNRVLALIVAGLSCVLCKQPRHGAPMYRYSFASLSNVLSSWCQYEALKFVSFPTQVLAKASKVIPVMLMGKLVSRRSYEHWEYLTATLISIGVSMFLLSSGPEPRSSPATTLSGLFTVGSLLEQGALLEGTRFMGRHSEFAAHALLLSICSACGQLFIFYTIGQFGAAVFTIIMTLRQAFAILLSCLLYGHTVTVVGGLGVAVVFAALLLRVYARGRLKQRGKKAVPVESPVQKV

SEQ ID NO: 3932 - protein, 383 aa, Homo sapiens
MVPGYLLVQYFRRKNYLETGRGLCFPLVKACVFGNEPKASDEVPLAPRTEAAETTPMWQALKLLFCATGLQVSYLTWGVLQERVMTRSYGATATSPGERFTDSQFLVLMNRVLALIVAGLSCVLCKQPRHGAPMYRYSFASLSNVLSSWCQYEALKFVSFPTQVLAKASKVIPVMLMGKLVSRRSYEHWEYLTATLISIGVSMFLLSSGPEPRSSPATTLSGLILLAGYIAFDSFTSNWQDALFAYKMSSVQMMFGVNFFSCLFTVGSLLEQGALLEGTRFMGRHSEFAAHALLLSICSACGQLFIFYTIGQFGAAVFTIIMTLRQAFAILLSCLLYGHTVTVVGGLGVAVVFAALLLRVYARGRLKQRGKKAVPVESPVQKV

SEQ ID NO: 3933 - protein, 339 aa, Homo sapiens
MLLAMPALWYLATSWCSTSGGRTTWRPVSYLTWGVLQERVMTRSYGATATSPGERFTDSQFLVLMNRVLALIVAGLSCVLCKQPRHGAPMYRYSFASLSNVLSSWCQYEALKFVSFPTQVLAKASKVIPVMLMGKLVSRRSYEHWEYLTATLISIGVSMFLLSSGPEPRSSPATTLSGLILLAGYIAFDSFTSNWQDALFAYKMSSVQMMFGVNFFSCLFTVGSLLEQGALLEGTRFMGRHSEFAAHALLLSICSACGQLFIFYTIGQFGAAVFTIIMTLRQAFAILLSCLLYGHTVTVVGGLGVAVVFAALLLRVYARGRLKQRGKKAVPVESPVQKV

SEQ ID NO: 3934 - protein, 299 aa, Homo sapiens
MTRSYGATATSPGERFTDSQFLVLMNRVLALIVAGLSCVLCKQPRHGAPMYRYSFASLSNVLSSWCQYEALKFVSFPTQVLAKASKVIPVMLMGKLVSRRSYEHWEYLTATLISIGVSMFLLSSGPEPRSSPATTLSGLILLAGYIAFDSFTSNWQDALFAYKMSSVQMMFGVNFFSCLFTVGSLLEQGALLEGTRFMGRHSEFAAHALLLSICSACGQLFIFYTIGQFGAAVFTIIMTLRQAFAILLSCLLYGHTVTVVGGLGVAVVFAALLLRVYARGRLKQRGKKAVPVESPVQKV

SEQ ID NO: 3935 - protein, 280 aa, Homo sapiens
MAAVVALSLRRRLPATTLGGACLQASRGAQTAAATAPRIKKFAIYRWDPDKAGDKPHMQTYEVDLNKCGPMVLDALIKIKNEVDSTLTFRRSCREGICGSCAMNINGGNTLACTRRIDTNLNKVSKIYPLPHMYVIKDLVPDLSNFYAQYKSIEPYLKKKDESQEGKQQYLQSIEEREKLDGLYECILCACCSTSCPSYWWNGDKYLGPAVLMQAYRWMIDSRDDFTEERLAKLQDPFSLYRCHTIMNCTRTCPKGLNPGKAIAEIKKMMATYKEKKASV

SEQ ID NO: 3936 - protein, 301 aa, Homo sapiens
MAMLVLVPGRVMRPLGGQLWRFLPRGLEFWGPAEGTARVLLRQFCARQAEAWRASGRPGYCLGTRPLSTARPPPPWSQKGPGDSTRPSKPGPVSWKSLAITFAIGGALLAGMKHVKKEKAEKLEKERQRHIGKPLLGGPFSLTTHTGERKTDKDYLGQWLLIYFGFTHCPDVCPEELEKMIQVVDEIDSITTLPDLTPLFISIDPERDTKEAIANYVKEFSPKLVGLTGTREEVDQVARAYRVYYSPGPKDEDEDYIVDHTIIMYLIGPDGEFLDYFGQNKRKGEIAASIATHMRPYRKKS

SEQ ID NO: 3937 - protein, 401 aa, Homo sapiens
MDLTQQAKDIQNITVQETNKNNSESIECSKITMDLKFNNSRKYISITVPSKTQTMSPHIKSVDDVVVLGMNLSKFNKLTQFFICVAGVFVFYLIYGYLQELIFSVEGFKSCGWYLTLVQFAFYSIFGLIELQLIQDKRRRIPGKTYMIIAFLTVGTMGLSNTSLGYLNYPTQVIFKCCKLIPVMLGGVFIQGKRYNVADVSAAICMSLGLIWFTLADSTTAPNFNLTGVVLISLALCADAVIGNVQEKAMKLHNASNSEMVLYSYSIGFVYILLGLTCTSGLGPAVTFCAKNPVRTYGYAFLFSLTGYFGISFVLALIKIFGALIAVTVTTGRKAMTIVLSFIFFAKPFTFQYVWSGLLVVLGIFLNVYSKNMDKIRLPSLYDLINKSVEARKSRTLAQTV

SEQ ID NO: 3938 - protein, 153 aa, Homo sapiens
MDLTQQAKDIQNITVQETNKNNSESIECSKITMDLKFNNSRKYISITVPSKTQTMSPHIKSVDDVVVLGMNLSKFNKLTQFFICVAGVFVFYLIYGYLQELIFSVEGFKSCGWYLTLVQFAFYSIFGLIELQLIQDKRRRYVVCFYFLIFHLY

SEQ ID NO: 3939 - protein, 283 aa, Homo sapiens
MDLTQQAKDIQNITVQETNKNNSESIECSKITMDLKFNNSRKYISITVPSKTQTMSPHIKSVDDVVVLGMNLSKFNKLTQFFICVAGVFVFYLIYGYLQELIFSVEGFKSCGWYLTLVQFAFYSIFGLIELQLIQDKRRRIPGKTYMIIAFLTVGTMGLSNTSLGYLNYPTQVIFKCCKLIPVMLGGVFIQGKRYNVADVSAAICMSLGLIWFTLADSTTAPNFNLTGVVLISLALCADAVIGNVQEKAMKLHNASNSEMNITTSSYSGVFIFPNKLKIPLVL

SEQ ID NO: 3940 - protein, 331 aa, Homo sapiens
MRPALAVGLVFAGCCSNVIFLELLARKHPGCGNIVTFAQFLFIAVEGFLFEADLGRKPPAIPIRYYAIMVTMFFTVSVVNNYALNLNIAMPLHMIFRSGSLIANMILGIIILKKRYSIFKYTSIALVSVGIFICTFMSAKQVTSQSSLSENDGFQAFVWWLLGIGALTFALLMSARMGIFQETLYKRFGKHSKEALFYNHALPLPGFVFLASDIYDHAVLFNKSELYEIPVIGVTLPIMWFYLLMNIITQYVCIRGVFILTTECASLTVTLVVTLRKFVSLIFSILYFQNPFTLWHWLGTLFVFIGTLMYTEVWNNLGTTKSEPQKDSKKN

SEQ ID NO: 3941 - protein, 231 aa, Homo sapiens
MRPALAVGLVFAGCCSNVIFLELLARKHPGCGNIVTFAQFLFIAVEGFLFEADLGRKPPAIPIRYYAIMVTMFFTVSVVNNYALNLNIAMPLHMIFRSGSLIANMILGIIILKKRYSIFKYTSIALVSVGIFICTFMSAKQVTSQSSLSENDGFQAFVWWLLGIGALTFALLMSARMGIFQETLYKRFGKHSKEALFYNHALPLPGFVFLASDIYDHAVLFNKSGEFGVRQ

SEQ ID NO: 3942 - protein, 253 aa, Homo sapiens
MRPALAVGLVFAGCCSNVIFLELLARKHPGCGNIVTFAQFLFIAVEGFLFEADLGRKPPAIPIRYYAIMVTMFFTVSVVNNYALNLNIAMPLHMIFRSGSLIANMILGIIILKKRYSIFKYTSIALVSVGIFICTFMSAKQVTSQSSLSENDGFQAFVWWLLGIGALTFALLMSARMGIFQETLYKRFGKHSKEALFYNHALPLPGFVFLASDIYDHAVLFNKSELYEIPVIGVTLPIMWFYLLMNIITQTPT

SEQ ID NO: 3943 - protein, 266 aa, Homo sapiens
MLLLTRSPTAWHRLSQLKPRVLPGTLGGQALHLRSWLLSRQGPAETGGQGQPQGPGLRTRLLITGLFGAGLGGAWLALRAEKERLQQQKRTEALRQAAVGQGDFHLLDHRGRARCKADFRGQWVLMYFGFTHCPDICPDELEKLVQVVRQLEAEPGLPPVQPVFITVDPERDDVEAMARYVQDFHPRLLGLTGSTKQVAQASHSYRVYYNAGPKDEDQDYIVDHSIAIYLLNPDGLFTDYYGRSRSAEQISDSVRRHMAAFRSVLS

SEQ ID NO: 3944 - protein, 365 aa, Homo sapiens
MGRWALDVAFLWKAVLTLGLVLLYYCFSIGITFYNKWLTKSFHFPLFMTMLHLAVIFLFSALSRALVQCSSHRARVVLSWADYLRRVAPTALATALDVGLSNWSFLYVTVSLYTMTKSSAVLFILIFSLIFKLEELRAALVLVVLLIAGGLFMFTYKSTQFNVEGFALVLGASFIGGIRWTLTQMLLQKAELGLQNPIDTMFHLQPLMFLGLFPLFAVFEGLHLSTSEKIFRFQDTGLLLRVLGSLFLGGILAFGLGFSEFLLVSRTSSLTLSIAGIFKEVCTLLLAAHLLGDQISLLNWLGFALCLSGISLHVALKALHSRGDGGPKALKGLGSSPDLELLLRSSQREEGDNEEEEYFVAQGQQ

SEQ ID NO: 3945 - protein, 344 aa, Homo sapiens
MGRWALDVAFLWKAVLTLGLVLLYYCFSIGITFYNKWLTKSFHFPLFMTMLHLAVIFLFSALSRALVQCSSHRARVVLSWADYLRRVAPTALATALDVGLSNWSFLYVTVSLYTMTKSSAVLFILIFSLIFKLEELSTQFNVEGFALVLGASFIGGIRWTLTQMLLQKAELGLQNPIDTMFHLQPLMFLGLFPLFAVFEGLHLSTSEKIFRFQDTGLLLRVLGSLFLGGILAFGLGFSEFLLVSRTSSLTLSIAGIFKEVCTLLLAAHLLGDQISLLNWLGFALCLSGISLHVALKALHSRGDGGPKALKGLGSSPDLELLLRSSQREEGDNEEEEYFVAQGQQ

SEQ ID NO: 3946 - protein, 394 aa, Homo sapiens
MGRVSTSHQPLRGVPAPADSGAPVLQPPRMGRWALDVAFLWKAVLTLGLVLLYYCFSIGITFYNKWLTKSFHFPLFMTMLHLAVIFLFSALSRALVQCSSHRARVVLSWADYLRRVAPTALATALDVGLSNWSFLYVTVSLYTMTKSSAVLFILIFSLIFKLEELRAALVLVVLLIAGGLFMFTYKSTQFNVEGFALVLGASFIGGIRWTLTQMLLQKAELGLQNPIDTMFHLQPLMFLGLFPLFAVFEGLHLSTSEKIFRFQDTGLLLRVLGSLFLGGILAFGLGFSEFLLVSRTSSLTLSIAGIFKEVCTLLLAAHLLGDQISLLNWLGFALCLSGISLHVALKALHSRGDGGPKALKGLGSSPDLELLLRSSQREEGDNEEEEYFVAQGQQ

SEQ ID NO: 3947 - protein, 355 aa, Homo sapiens
MAEVHRRQHARVKGEAPAKSSTLRDEEELGMASAETLTVFLKLLAAGFYGVSSFLIVVVNKSVLTNYRFPSSLCVGLGQMVATVAVLWVGKALRVVKFPDLDRNVPRKTFPLPLLYFGNQITGLFSTKKLNLPMFTVLRRFSILFTMFAEGVLLKKTFSWGIKMTVFAMIIGAFVAASSDLAFDLEGYAFILINDVLTAANGAYVKQKLDSKELGKYGLLYYNALFMILPTLAIAYFTGDAQKAVEFEGWADTLFLLQFTLSCVMGFILMYATVLCTQYNSALTTTIVGCIKNILITYIGMVFGGDYIFTWTNFIGLNISIAGSLVYSYITFTEEQLSKQSEANNKLDIKGKGAV

SEQ ID NO: 3948 - protein, 260 aa, Homo sapiens
MVATVAVLWVGKALRVVKFPDLDRNVPRKTFPLPLLYFGNQITGLFSTKKLNLPMFTVLRRFSILFTMFAEGVLLKKTFSWGIKMTVFAMIIGAFVAASSDLAFDLEGYAFILINDVLTAANGAYVKQKLDSKELGKYGLLYYNALFMILPTLAIAYFTGDAQKAVEFEGWADTLFLLQFTLSCVMGFILMYATVLCTQYNSALTTTIVGCIKNILITYIGMVFGGDYIFTWTNFIGLNISCICHRGLCELRVGSATLGG

SEQ ID NO: 3949 - protein, 337 aa, Homo sapiens
MTAGGQAEAEGAGGEPGAARLPSRVARLLSALFYGTCSFLIVLVNKALLTTYGFPSPIFLGIGQMAATIMILYVSKLNKIIHFPDFDKKIPVKLFPLPLLYVGNHISGLSSTSKLSLPMFTVLRKFTIPLTLLLETIILGKQYSLNIILSVFAIILGAFIAAGSDLAFNLEGYIFVFLNDIFTAANGVYTKQKMDPKELGKYGVLFYNACFMIIPTLIISVSTGDLQQATEFNQWKNVVFILQFLLSCFLGFLLMYSTVLCSYYNSALTTAVVGAIKNVSVAYIGILIGGDYIFSLLNFVGLNICMAGGLRYSFLTLSSQLKPKPVGEENICLDLKS

SEQ ID NO: 3950 - protein, 249 aa, Homo sapiens
MTAGGQAEAEGAGGEPGAARLPSRVARLLSALFYGTCSFLIVLVNKALLTTYGFPSPIFLGIGQMAATIMILYVSKLNKIIHFPDFDKKIPVKLFPLPLLYVGNHISGLSSTSKLSLPMFTVLRKFTIPLTLLLETIILGKQYSLNIILSVFAIILGAFIAAGFLLMYSTVLCSYYNSALTTAVVGAIKNVSVAYIGILIGGDYIFSLLNFVGLNICMAGGLRYSFLTLSSQLKPKPVGEENICLDLKS

SEQ ID NO: 3951 - protein, 328 aa, Homo sapiens
MSAAGLLAPAPAQAGAPPAPEYYPEEDEELESAEDDERSCRGRESDEDTEDASETDLAKHDEEDYVEMKEQMYQDKLASLKRQLQQLQEGTLQEYQKRMKKLDQQYKERIRNAELFLQLETEQVERNYIKEKKAAVKEFEDKKVELKENLIAELEEKKKMIENEKLTMELTGDSMEVKPIMTRKLRRRPNDPVPIPDKRRKPAPAQLNYLLTDEQIMEDLRTLNKLKSPKRPASPSSPEHLPATPAESPAQRFEARIEDGKLYYDKRWYHKSQAIYLESKDNQKLSCVISSVGANEIWVRKTSDSTKMRIYLGQLQRGLFVIRRRSAA

SEQ ID NO: 3952 - protein, 159 aa, Homo sapiens
MRRRVFSSQDWRASGWDGMGFFSRRTFCGRSGRSCRGQLVQVSRPEVSAGSLLLPAPQAEDHSSRILYPRPKSLLPKMMNADMDAVDAENQVELEEKTRLINQVLELQHTLEDLSARVDAVKEENLKLKSENQVLGQYIENLMSASSVFQTTDTKSKRK

SEQ ID NO: 3953 - protein, 122 aa, Homo sapiens
MDGSRKEEEEDSTFTNISLADDIDHSSRILYPRPKSLLPKMMNADMDAVDAENQVELEEKTRLINQVLELQHTLEDLSARVDAVKEENLKLKSENQVLGQYIENLMSASSVFQTTDTKSKRK

SEQ ID NO: 3954 - protein, 121 aa, Homo sapiens
MDGSRKEEEEDSTFTNISLADDIDHSSRILYPRPKSLLPKMMNADMDVDAENQVELEEKTRLINQVLELQHTLEDLSARVDAVKEENLKLKSENQVLGQYIENLMSASSVFQTTDTKSKRK

SEQ ID NO: 3955 - protein, 131 aa, Homo sapiens
MRRRVFSSQDWRASGWDGMGFFSRRTFCGRSGRSCRGQLVQVSRPEVSAGSLLLPAPQAEDHSSRILYPRPKSLLPKMMNADMDDLSARVDAVKEENLKLKSENQVLGQYIENLMSASSVFQTTDTKSKRK

SEQ ID NO: 3956 - protein, 276 aa, Homo sapiens
MDSSREPTLGRLDAAGFWQVWQRFDADEKGYIEEKELDAFFLHMLMKLGTDDTVMKANLHKVKQQFMTTQDASKDGRIRMKELAGMFLSEDENFLLLFRRENPLDSSVEFMQIWRKYDADSSGFISAAELRNFLRDLFLHHKKAISEAKLEEYTGTMMKIFDRNKDGRLDLNDLARILALQENFLLQFKMDACSTEERKRDFEKIFAYYDVSKTGALEGPEVDGFVKDMMELVQPSISGVDLDKFREILLRHCDVNKDGKIQKSELALCLGLKINP

SEQ ID NO: 3957 - protein, 533 aa, Homo sapiens
MAFANLRKVLISDSLDPCCRKILQDGGLQVVEKQNLSKEELIAELQDCEGLIVRSATKVTADVINAAEKLQVVGRAGTGVDNVDLEAATRKGILVMNTPNGNSLSAAELTCGMIMCLARQIPQATASMKDGKWERKKFMGTELNGKTLGILGLGRIGREVATRMQSFGMKTIGYDPIISPEVSASFGVQQLPLEEIWPLCDFITVHTPLLPSTTGLLNDNTFAQCKKGVRVVNCARGGIVDEGALLRALQSGQCAGAALDVFTEEPPRDRALVDHENVISCPHLGASTKEAQSRCGEEIAVQFVDMVKGKSLTGVVNAQALTSAFSPHTKPWIGLAEALGTLMRAWAGSPKGTIQVITQGTSLKNAGNCLSPAVIVGLLKEASKQADVNLVNAKLLVKEAGLNVTTSHSPAAPGEQGFGECLLAVALAGAPYQAVGLVQGTTPVLQGLNGAVFRPEVPLRRDLPLLLFRTQTSDPAMLPTMIGLLAEAGVRLLSYQTSLVSDGETWHVMGISSLLPSLEAWKQHVTEAFQFHF

SEQ ID NO: 3958 - protein, 329 aa, Homo sapiens
MDGPVAEHAKQEPFHVVTPLLESWALSQVAGMPVFLKCENVQPSGSFKIRGIGHFCQEMAKKGCRHLVCSSGGNAGIAAAYAARKLGIPATIVLPESTSLQVVQRLQGEGAEVQLTGKVWDEANLRAQELAKRDGWENVPPFDHPLIWKGHASLVQELKAVLRTPPGALVLAVGGGGLLAGVVAGLLEVGWQHVPIIAMETHGAHCFNAAITAGKLVTLPDITSVAKSLGAKTVAARALECMQVCKIHSEVVEDTEAVSAVQQLLDDERMLVEPACGAALAAIYSGLLRRLQAEGCLPPSLTSVVVIVCGGNNINSRELQALKTHLGQV

SEQ ID NO: 3959 - protein, 204 aa, Homo sapiens
MAAAGWRDGSGQEKYRLVVVGGGGVGKSALTIQFIQSYFVTDYDPTIEDSYTKQCVIDDRAARLDILDTAGQEEFGAMREQYMRTGEGFLLVFSVTDRGSFEEIYKFQRQILRVKDRDEFPMILIGNKADLDHQRQVTQEEGQQLARQLKVTYMEASAKIRMNVDQAFHELVRVIRKFQEQECPPSPEPTRKEKDKKGCHCVIF

SEQ ID NO: 3960 - protein, 127 aa, Homo sapiens
MREQYMRTGEGFLLVFSVTDRGSFEEIYKFQRQILRVKDRDEFPMILIGNKADLDHQRQVTQEEGQQLARQLKVTYMEASAKIRMNVDQAFHELVRVIRKFQEQECPPSPEPTRKEKDKKGCHCVIF

SEQ ID NO: 3961 - protein, 169 aa, Homo sapiens
MSYFVTDYDPTIEDSYTKQCVIDDRAARLDILDTAGQEEFGAMREQYMRTGEGFLLVFSVTDRGSFEEIYKFQRQILRVKDRDEFPMILIGNKADLDHQRQVTQEEGQQLARQLKVTYMEASAKIRMNVDQAFHELVRVIRKFQEQECPPSPEPTRKEKDKKGCHCVIF

SEQ ID NO: 3962 - protein, 210 aa, Homo sapiens
MAAAGWRDGSGQEKYRLVVVGGGGVGKSALTIQFIQFFLFLQSYFVTDYDPTIEDSYTKQCVIDDRAARLDILDTAGQEEFGAMREQYMRTGEGFLLVFSVTDRGSFEEIYKFQRQILRVKDRDEFPMILIGNKADLDHQRQVTQEEGQQLARQLKVTYMEASAKIRMNVDQAFHELVRVIRKFQEQECPPSPEPTRKEKDKKGCHCVIF

SEQ ID NO: 3963 - protein, 1242 aa, Homo sapiens
MKNLLTEKCISSHNFHQKVIKQRMEKKVDSRYFKDGAVKKPYSAKTLSNKKSSASFGIRRELPSTSHLVQYRGTHTCTRQGRLRELRIRCVARKFLYLWIRMTFGRVFPSKARFYYEQRLLRKVFEEWKEEWWVFQHEWKLCVRADCHYRYYLYNLMFQTWKTYVRQQQEMRNKYIRAEVHDAKQKMRQAWKSWLIYVVVRRTKLQMQTTALEFRQRIILRVWWSTWRQRLGQVRVSRALHASALKHRALSLQVQAWSQWREQLLYVQKEKQKVVSAVKHHQHWQKRRFLKAWLEYLQVRRVKRQQNEMAERFHHVTVLQIYFCDWQQAWERRESLYAHHAQVEKLARKMALRRAFTHWKHYMLLCAEEAAQFEMAEEHHRHSQLYFCFRALKDNVTHAHLQQIRRNLAHQQHGVTLLHRFWNLWRSQIEQKKERELLPLLHAAWDHYRIALLCKCIELWLQYTQKRRYKQLLQARADGHFQQRALPAAFHTWNRLWRWRHQENVLSARATRFHRETLEKQVFSLWRQKMFQHRENRLAERMAILHAERQLLYRSWFMWHQQAAARHQEQEWQTVACAHHRHGRLKKAFCLWRESAQGLRTERTGRVRAAEFHMAQLLRWAWSQWRECLALRGAERQKLMRADLHHQHSVLHRALQAWVTYQGRVRSILREVAARESQHNRQLLRGALRRWKENTMARVDEAKKTFQASTHYRRTICSKVLVQWREAVSVQMYYRQQEDCAIWEAQKVLDRGCLRTWFQRWWDCSRRSAQQRLQLERAVQHHHRQLLLEGLARWKTHHLQCVRKRLLHRQSTQLLAQRLSRTCFRQWRQQLAARRQEQRATVRALWFWAFSLQAKVWATWLAFVLERRRKKARLQWALQAYQGQLLQEGATRLLRFAASMKASRQQLQAQQQVQAAHSLHRAVRRCATLWKQKVLGRGGKPQPLAAIAPSRKVTFEGPLLNRIAAGAGDGTLETKRPQASRPLGALGRLAAEEPHALELNTAHSARKQPRRPHFLLEPAQSQRPQKPQEHGLGMAQPAAPSLTRPFLAEAPTALVPHSPLPGALSSAPGPKQPPTASTGPELLLLPLSSFMPCGAAAPARVSAQRATPRDKPPVPSSLASVPDPHLLLPGDFSATRAGPGLSTAGSLDLEAELEEIQQQLLHYQTTKQNLWSCRRQASSLRRWLELNREEPGPEDQEVEQQVQKELEQVEMQIQLLAEELQAQRQPIGACVARIQALRQALC

SEQ ID NO: 3964 - protein, 1211 aa, Homo sapiens
MKNLLTEKCISSHNFHQKVIKQRMEKKVDSRYFKDGAVKKPYSAKTLSNKKSSASFGIRRELPSTSHLVQYRGTHTCTRQGRLRELRIRCVARKFLYLWIRMTFGRVFPSKARFYYEQRLLRKVFEEWKEEWWVFQHEWKLCVRADCHYRYYLYNLMFQTWKTYVRQQQEMRNKYIRAEVHDAKQKMRQAWKSWLIYVVVRRTKLQMQTTALEFRQRIILRVWWSTWRQRLGQVRVSRALHASALKHRALSLQVQAWSQWREQLLYVQKEKQKVVSAVKHHQHWQKRRFLKAWLEYLQVRRVKRQQNEMAERFHHVTVLQIYFCDWQQAWERRESLYAHHAQVEKLARKMALRRAFTHWKHYMLLCAEEAAQFEMAEEHHRHSQLLLHRFWNLWRSQIEQKKERELLPLLHAAWDHYRIALLCKCIELWLQYTQKRRYKQLLQARADGHFQQRALPAAFHTWNRLWRWRHQENVLSARATRFHRETLEKQVFSLWRQKMFQHRENRLAERMAILHAERQLLYRSWFMWHQQAAARHQEQEWQTVACAHHRHGRLKKAFCLWRESAQGLRTERTGRVRAAEFHMAQLLRWAWSQWRECLALRGAERQKLMRADLHHQHSVLHRALQAWVTYQGRVRSILREVAARESQHNRQLLRGALRRWKENTMARVDEAKKTFQASTHYRRTICSKVLVQWREAVSVQMYYRQQEDCAIWEAQKVLDRGCLRTWFQRWWDCSRRSAQQRLQLERAVQHHHRQLLLEGLARWKTHHLQCVRKRLLHRQSTQLLAQRLSRTCFRQWRQQLAARRQEQRATVRALWFWAFSLQAKVWATWLAFVLERRRKKARLQWALQAYQGQLLQEGATRLLRFAASMKASRQQLQAQQQVQAAHSLHRAVRRCATLWKQKVLGRGGKPQPLAAIAPSRKVTFEGPLLNRIAAGAGDGTLETKRPQASRPLGALGRLAAEEPHALELNTAHSARKQPRRPHFLLEPAQSQRPQKPQEHGLGMAQPAAPSLTRPFLAEAPTALVPHSPLPGALSSAPGPKQPPTASTGPELLLLPLSSFMPCGAAAPARVSAQRATPRDKPPVPSSLASVPDPHLLLPGDFSATRAGPGLSTAGSLDLEAELEEIQQQLLHYQTTKQNLWSCRRQASSLRRWLELNREEPGPEDQEVEQQVQKELEQVEMQIQLLAEELQAQRQPIGACVARIQALRQALC

SEQ ID NO: 3965 - protein, 1160 aa, Homo sapiens
MKNLLTEKCISSHNFHQKVIKQRMEKKVDSRFYYEQRLLRKVFEEWKEEWWVFQHEWKLCVRADCHYRYYLYNLMFQTWKTYVRQQQEMRNKYIRAEVHDAKQKMRQAWKSWLIYVVVRRTKLQMQTTALEFRQRIILRVWWSTWRQRLGQVRVSRALHASALKHRALSLQVQAWSQWREQLLYVQKEKQKVVSAVKHHQHWQKRRFLKAWLEYLQVRRVKRQQNEMAERFHHVTVLQIYFCDWQQAWERRESLYAHHAQVEKLARKMALRRAFTHWKHYMLLCAEEAAQFEMAEEHHRHSQLYFCFRALKDNVTHAHLQQIRRNLAHQQHGVTLLHRFWNLWRSQIEQKKERELLPLLHAAWDHYRIALLCKCIELWLQYTQKRRYKQLLQARADGHFQQRALPAAFHTWNRLWRWRHQENVLSARATRFHRETLEKQVFSLWRQKMFQHRENRLAERMAILHAERQLLYRSWFMWHQQAAARHQEQEWQTVACAHHRHGRLKKAFCLWRESAQGLRTERTGRVRAAEFHMAQLLRWAWSQWRECLALRGAERQKLMRADLHHQHSVLHRALQAWVTYQGRVRSILREVAARESQHNRQLLRGALRRWKENTMARVDEAKKTFQASTHYRRTICSKVLVQWREAVSVQMYYRQQEDCAIWEAQKVLDRGCLRTWFQRWWDCSRRSAQQRLQLERAVQHHHRQLLLEGLARWKTHHLQCVRKRLLHRQSTQLLAQRLSRTCFRQWRQQLAARRQEQRATVRALWFWAFSLQAKVWATWLAFVLERRRKKARLQWALQAYQGQLLQEGATRLLRFAASMKASRQQLQAQQQVQAAHSLHRAVRRCATLWKQKVLGRGGKPQPLAAIAPSRKVTFEGPLLNRIAAGAGDGTLETKRPQASRPLGALGRLAAEEPHALELNTAHSARKQPRRPHFLLEPAQSQRPQKPQEHGLGMAQPAAPSLTRPFLAEAPTALVPHSPLPGALSSAPGPKQPPTASTGPELLLLPLSSFMPCGAAAPARVSAQRATPRDKPPVPSSLASVPDPHLLLPGDFSATRAGPGLSTAGSLDLEAELEEIQQQLLHYQTTKQNLWSCRRQASSLRRWLELNREEPGPEDQEVEQQVQKELEQVEMQIQLLAEELQAQRQPIGACVARIQALRQALC

SEQ ID NO: 3966 - protein, 1031 aa, Homo sapiens
MKNLLTEKCISSHNFHQKVIKQRMEKKVDSRFYYEQRLLRKVFEEWKEEWWVFQHEWKLCVRADCHYRVWWSTWRQRLGQVRVSRALHASALKHRALSLQVQAWSQWREQLLYVQKEKQKVVSAVKHHQHWQKRRFLKAWLEYLQVRRVKRQQNEMAERFHHVTVLQIYFCDWQQAWERRESLYAHHAQVEKLARKMALRRAFTHWKHYMLLCAEEAAQFEMAEEHHRHSQLYFCFRALKDNVTHAHLQQIRRNLAHQQHGVTLLHRFWNLWRSQIEQKKERELLPLLHAAWDHYRIALLCKCIELWLQYTQKRRYKQLLQARADGHFQQRALPAAFHTWNRLWRWRHQENVLSARATRFHRETLEKQVFSLWRQKMFQHRENRLAERMAILHAERQLLYRSWFMWHQQAAARHQEQEWQTVACAHHRHGRLKKAFCLWRESAQGLRTERTGRVRAAEFHMAQLLRWAWSQWRECLALRGAERQKLMRADLHHQHSVLHRALQAWVTYQGRVRSILREVAARESQHNRQLLRGALRRWKENTMARVDEAKKTFQASTHYRRTICSKVLVQWREAVSVQMYYRQQEDCAIWEAQKVLDRGCLRTWFQRWWDCSRRSAQQRLQLERAVQHHHRQLLLEGLARWKTHHLQCVRKRLLHRQSTQLLAQRLSRTCFRQWRQQLAARRQEQRATVRALWFWAFSLQAKVWATWLAFVLERRRKKARLQWALQAYQGQLLQEGATRLLRFAASMKASRQQLQAQQQVQAAHSLHRAVRRCATLWKQKVLGRGGKPQPLAAIAPSRKVTFEGPLLNRIAAGAGDGTLETKRPQASRPLGALGRLAAEEPHALELNTAHSARKQPRRPHFLLEPAQSQRPQKPQEHGLGMAQPAAPSLTRPFLAEAPTALVPHSPLPGALSSAPGPKQPPTASTGPELLLLPLSSFMPCGAAAPARVSAQRATPRDKPPVPSSLASVPDPHLLLPGDFSATRAGPGLSTAAWTLRLNLRRSSSNYCTTRPPSRTSGPVGGKRAACAGGWS

SEQ ID NO: 3967 - protein, 991 aa, Homo sapiens
MKNLLTEKCISSHNFHQKVIKQRMEKKVDSRYFKDGAVKKPYSAKTLSNKKSSASFGIRRELPSTSHLVQYRGTHTCTRQGRLRELRIRFYYEQRLLRKVFEEWKEEWWVFQHEWKLCVRADCHYRYYLYNLMFQTWKTYVRQQQEMRNKYIRAEVHDAKQKMRQAWKSWLIYVVVRRTKLQMQTTALEFRQRIILRVWWSTWRQRLGQVRVSRALHASALKHRALSLQVQAWSQWREQLLYVQKEKQKVVSAVKHHQHWQKRRFLKAWLEYLQVRRVKRQQNEMAERFHHVTVLQIYFCDWQQAWERRESLYAHHAQVEKLARKMALRRAFTHWKHYMLLCAEEAAQFEMAEEHHRHSQLYFCFRALKDNVTHAHLQQIRRNLAHQQHGVTLLHRFWNLWRSQIEQKKERELLPLLHAAWDHYRIALLCKCIELWLQYTQKRRYKQLLQARADGHFQQRALPAAFHTWNRLWRWRHQENVLSARATRFHRETLEKQVFSLWRQKMFQHRENRLAERMAILHAERQLLYRSWFMWHQQAAARHQEQEWQTVACAHHRHGRLKKAFCLWRESAQGLRTERTGRVRAAEFHMAQLLRWAWSQWRECLALRGAERQKLMRADLHHQHSVLHRALQAWVTYQGRVRSILREVAARESQQLQAQQQVQAAHSLHRAVRRCATLWKQKVLGRGGKPQPLAAIAPSRKVTFEGPLLNRIAAGAGDGTLETKRPQASRPLGALGRLAAEEPHALELNTAHSARKQPRRPHFLLEPAQSQRPQKPQEHGLGMAQPAAPSLTRPFLAEAPTALVPHSPLPGALSSAPGPKQPPTASTGPELLLLPLSSFMPCGAAAPARVSAQRATPRDKPPVPSSLASVPDPHLLLPGDFSATRAGPGLSTAGSLDLEAELEEIQQQLLHYQTTKQNLWSCRRQASSLRRWLELNREEPGPEDQEVEQQVQKELEQVEMQIQLLAEELQAQRQPIGACVARIQALRQALC

SEQ ID NO: 3968 - protein, 1187 aa, Homo sapiens
MKNLLTEKCISSHNFHQKVIKQRMEKKVDSRYFKDGAVKKPYSAKTLSNKKSSASFGIRRELPSTSHLVQYRGTHTCTRQGRLRELRIRFYYEQRLLRKVFEEWKEEWWVFQHEWKLCVRADCHYRYYLYNLMFQTWKTYVRQQQEMRNKYIRAEVHDAKQKMRQAWKSWLIYVVVRRTKLQMQTTALEFRQRIILRVWWSTWRQRLGQVRVSRALHASALKHRALSLQVQAWSQWREQLLYVQKEKQKVVSAVKHHQHWQKRRFLKAWLEYLQVRRVKRQQNEMAERFHHVTVLQIYFCDWQQAWERRESLYAHHAQVEKLARKMALRRAFTHWKHYMLLCAEEAAQFEMAEEHHRHSQLLLHRFWNLWRSQIEQKKERELLPLLHAAWDHYRIALLCKCIELWLQYTQKRRYKQLLQARADGHFQQRALPAAFHTWNRLWRWRHQENVLSARATRFHRETLEKQVFSLWRQKMFQHRENRLAERMAILHAERQLLYRSWFMWHQQAAARHQEQEWQTVACAHHRHGRLKKAFCLWRESAQGLRTERTGRVRAAEFHMAQLLRWAWSQWRECLALRGAERQKLMRADLHHQHSVLHRALQAWVTYQGRVRSILREVAARESQHNRQLLRGALRRWKENTMARVDEAKKTFQASTHYRRTICSKVLVQWREAVSVQMYYRQQEDCAIWEAQKVLDRGCLRTWFQRWWDCSRRSAQQRLQLERAVQHHHRQLLLEGLARWKTHHLQCVRKRLLHRQSTQLLAQRLSRTCFRQWRQQLAARRQEQRATVRALWFWAFSLQAKVWATWLAFVLERRRKKARLQWALQAYQGQLLQEGATRLLRFAASMKASRQQLQAQQQVQAAHSLHRAVRRCATLWKQKVLGRGGKPQPLAAIAPSRKVTFEGPLLNRIAAGAGDGTLETKRPQASRPLGALGRLAAEEPHALELNTAHSARKQPRRPHFLLEPAQSQRPQKPQEHGLGMAQPAAPSLTRPFLAEAPTALVPHSPLPGALSSAPGPKQPPTASTGPELLLLPLSSFMPCGAAAPARVSAQRATPRDKPPVPSSLASVPDPHLLLPGDFSATRAGPGLSTAGSLDLEAELEEIQQQLLHYQTTKQNLWSCRRQASSLRRWLELNREEPGPEDQEVEQQVQKELEQVEMQIQLLAEELQAQRQPIGACVARIQALRQALC

SEQ ID NO: 3969 - protein, 1148 aa, Homo sapiens
MKNLLTEKCISSHNFHQKVIKQRMEKKVDSRFYYEQRLLRKVFEEWKEEWWVFQHEWKLCVRADCHYRYYLYNLMFQTWKTYVRQQQEMRNKYIRAEVHDAKQKMRQAWKSWLIYVVVRRTKLQMQTTALEFRQRIILRVWWSTWRQRLGQVRVSRALHASALKHRALSLQVQAWSQWREQLLYVQKEKQKVVSAVKHHQHWQKRRFLKAWLEYLQVRRVKRQQNEMAERFHHVTVLQIYFCDWQQAWERRESLYAHHAQVEKLARKMALRRAFTHWKHYMLLCAEEAAQFEMAEEHHRHSQLYFCFRALKDNVTHAHLQQIRRNLAHQQHGVTLLHRFWNLWRSQIEQKKERELLPLLHAAWDHYRIALLCKCIELWLQYTQKRRYKQLLQARADGHFQQRALPAAFHTWNRLWRWRHQENVLSARATRFHRETLEKQVFSLWRQKMFQHRENRLAERMAILHAERQLLYRSWFMWHQQAAARHQEQEWQTVACAHHRHGRLKKAFCLWRESAQGLRTERTGRVRAAEFHMAQLLRWAWSQWRECLALRGAERQKLMRADLHHQHSVLHRALQAWVTYQGRVRSILREVAARESQHNRQLLRGALRRWKENTMARVDEAKKTFQVLVQWREAVSVQMYYRQQEDCAIWEAQKVLDRGCLRTWFQRWWDCSRRSAQQRLQLERAVQHHHRQLLLEGLARWKTHHLQCVRKRLLHRQSTQLLAQRLSRTCFRQWRQQLAARRQEQRATVRALWFWAFSLQAKVWATWLAFVLERRRKKARLQWALQAYQGQLLQEGATRLLRFAASMKASRQQLQAQQQVQAAHSLHRAVRRCATLWKQKVLGRGGKPQPLAAIAPSRKVTFEGPLLNRIAAGAGDGTLETKRPQASRPLGALGRLAAEEPHALELNTAHSARKQPRRPHFLLEPAQSQRPQKPQEHGLGMAQPAAPSLTRPFLAEAPTALVPHSPLPGALSSAPGPKQPPTASTGPELLLLPLSSFMPCGAAAPARVSAQRATPRDKPPVPSSLASVPDPHLLLPGDFSATRAGPGLSTAGSLDLEAELEEIQQQLLHYQTTKQNLWSCRRQASSLRRWLELNREEPGPEDQEVEQQVQKELEQVEMQIQLLAEELQAQRQPIGACVARIQALRQALC

SEQ ID NO: 3970 - protein, 118 aa, Homo sapiens
MSLLNKPKSEMTPEELQKREEEEFNTGPLSVLTQSVKNNTQVLINCRNNKKLLGRVKAFDRHCNMVLENVKEMWTEVPKSGKGKKKSKPVNKDRYISKMFLRGDSVIVVLRNPLIAGK

SEQ ID NO: 3971 - protein, 108 aa, Homo sapiens
MTPEELQKREEEEFNTGPLSVLTQSVKNNTQVLINCRNNKKLLGRVKAFDRHCNMVLENVKEMWTEVPKSGKGKKKSKPVNKDRYISKMFLRGDSVIVVLRNPLIAGK

SEQ ID NO: 3972 - protein, 154 aa, Homo sapiens
MAGPVKDREAFQRLNFLYQAAHCVLAQDPENQALARFYCYTERTIAKRLVLRRDPSVKRTLCRGCSSLLVPGLTCTQRQRRCRGQRWTVQTCLTCQRSQRFLNDPGHLLWGDRPEAQLGSQADSKPLQPLPNTAHSISDRLPEEKMQTQGSSNQ

SEQ ID NO: 3973 - protein, 177 aa, Homo sapiens
MAGPVKDREAFQRLNFLYQVSLRQGPHGDGARRPRVTAPLPQAAHCVLAQDPENQALARFYCYTERTIAKRLVLRRDPSVKRTLCRGCSSLLVPGLTCTQRQRRCRGQRWTVQTCLTCQRSQRFLNDPGHLLWGDRPEAQLGSQADSKPLQPLPNTAHSISDRLPEEKMQTQGSSNQ

SEQ ID NO: 3974 - protein, 144 aa, Homo sapiens
MAGPVKDREAFQRLNFLYQAAHCVLAQDPENQALARFYCYTERTIAKRLVLRRDPSVKRTLCRGCSSLLVPGLTCTQRQRRCRGQRWTVQTCLTCQRSQRFLNDPGHLLWGDRPEAQLGSQAGERFQTTTTLAKHSPLHFRPPS

SEQ ID NO: 3975 - protein, 162 aa, Homo sapiens
MAGPVKDREAFQRLNFLYQAAHCVLAQDPENQALARFYCYTERTIAKRLVLRRPLSSSAPRDPSVKRTLCRGCSSLLVPGLTCTQRQRRCRGQRWTVQTCLTCQRSQRFLNDPGHLLWGDRPEAQLGSQADSKPLQPLPNTAHSISDRLPEEKMQTQGSSNQ

SEQ ID NO: 3976 - protein, 707 aa, Homo sapiens
MSRDRFRSRGGGGGGFHRRGGGGGRGGLHDFRSPPPGMGLNQNRGPMGPGPGQSGPKPPIPPPPPHQQQQQPPPQQPPPQQPPPHQPPPHPQPHQQQQPPPPPQDSSKPVVAQGPGPAPGVGSAPPASSSAPPATPPTSGAPPGSGPGPTPTPPPAVTSAPPGAPPPTPPSSGVPTTPPQAGGPPPPPAAVPGPGPGPKQGPGPGGPKGGKMPGGPKPGGGPGLSTPGGHPKPPHRGGGEPRGGRQHHPPYHQQHHQGPPPGGPGGRSEEKISDSEGFKANLSLLRRPGEKTYTQRCRLFVGNLPADITEDEFKRLFAKYGEPGEVFINKGKGFGFIKLESRALAEIAKAELDDTPMRGRQLRVRFATHAAALSVRNLSPYVSNELLEEAFSQFGPIERAVVIVDDRGRSTGKGIVEFASKPAARKAFERCSEGVFLLTTTPRPVIVEPLEQLDDEDGLPEKLAQKNPMYQKERETPPRFAQHGTFEYEYSQRWKSLDEMEKQQREQVEKNMKDAKDKLESEMEDAYHEHQANLLRQDLMRRQEELRRMEELHNQEMQKRKEMQLRQEEERRRREEEMMIRQREMEEQMRRQREESYSRMGYMDPRERDMRMGGGGAMNMGDPYGSGGQKFPPLGGGGGIGYEANPGVPPATMSGSMMGSDMRTERFGQGGAGPVGGQGPRGMGPGTPAGYGRGREEYEGPNKKPRF

SEQ ID NO: 3977 - protein, 669 aa, Homo sapiens
MSRDRFRSRGGGGGGFHRRGGGGGRGGLHDFRSPPPGMGLNQNRGPMGPGPGQSGPKPPIPPPPPHQQQQQPPPQQPPPQQPPPHQPPPHPQPHQQQQPPPPPQDSSKPVVAQGPGPAPGVGSAPPASSSAPPATPPTSGAPPGSGPGPTPTPPPAVTSAPPGAPPPTPPSSGVPTTPPQAGGPPPPPAAVPGPGPGPKQGPGPGGPKGGKMPGGPKPGGGPGLSTPGGHPKPPHRGGGEPRGGRQHHPPYHQQHHQGPPPGGPGGRSEEKISDSEGFKANLSLLRRPGEKTYTQRCRLFVGNLPADITEDEFKRLFAKYGEPGEVFINKGKGFGFIKLESRALAEIAKAELDDTPMRGRQLRVRFATHAAALSVRNLSPYVSNELLEEAFSQFGPIERAVVIVDDRGRSTGKGIVEFASKPAARKAFERCSEGVFLLTTTPRPVIVEPLEQLDDEDGLPEKLAQKNPMYQKERETPPRFAQHGTFEYEYSQRWKSLDEMEKQQREQVEKNMKDAKDKLESEMEDAYHEHQANLLRQDLMRRQEELRRMEELHNQEMQKRKEMQLRQEEERRRREEEMMIRQREMEEQMRRQREESYSRMGYMDPRERDMRMGGGGAMNMGDPYGSGGQKFPPLGGGGGIGYEANPGVPPATMSGSMMGSDMVRMIDVG

SEQ ID NO: 3978 - protein, 551 aa, Homo sapiens
MLPLLLLPLLWGGSLQEKPVYELQVQKSVTVQEGLCVLVPCSFSYPWRSWYSSPPLYVYWFRDGEIPYYAEVVATNNPDRRVKPETQGRFRLLGDVQKKNCSLSIGDARMEDTGSYFFRVERGRDVKYSYQQNKLNLEVTALIEKPDIHFLEPLESGRPTRLSCSLPGSCEAGPPLTFSWTGNALSPLDPETTRSSELTLTPRPEDHGTNLTCQMKRQGAQVTTERTVQLNVSYAPQTITIFRNGIALEILQNTSYLPVLEGQALRLLCDAPSNPPAHLSWFQGSPALNATPISNTGILELRRVRSAEEGGFTCRAQHPLGFLQIFLNLSVYSLPQLLGPSCSWEAEGLHCRCSFRARPAPSLCWRLEEKPLEGNSSQGSFKVNSSSAGPWANSSLILHGGLSSDLKVSCKAWNIYGSQSGSVLLLQGRSNLGTGVVPAALGGAGVMALLCICLCLIFFLIVKARRKQAAGRPEKMDDEDPIMGTITSGSRKKPWPDSPGDQASPPGDAPPLEEQKELHYASLSFSEMKSREPKDQEAPSTTEYSEIKTSK

SEQ ID NO: 3979 - protein, 441 aa, Homo sapiens
MSLRQRLAQLVGRLQDPQKVARFQRLCGVEAPPRRSADRREDEKAEAPLAGDPRLRGRQPGAPGGPQPPGSDRNQCPAKPDGGGAPNGVRNGLAAELGPASPRRAGALRRNSLTGEEGQLARVSNWPLYCLFCFGTELGNELFYILFFPFWIWNLDPLVGRRLVVIWVLVMYLGQCTKDIIRWPRPASPPVVKLEVFYNSEYSMPSTHAMSGTAIPISMVLLTYGRWQYPLIYGLILIPCWCSLVCLSRIYMGMHSILDIIAGFLYTILILAVFYPFVDLIDNFNQTHKYAPFIIIGLHLALGIFSFTLDTWSTSRGDTAEILGSGAGIACGSHVTYNMGLVLDPSLDTLPLAGPPITVTLFGKAILRILIGMVFVLIIRDVMKKITIPLACKIFNIPCDDIRKARQHMEVELPYRYITYGMVGFSITFFVPYIFFFIGIS

SEQ ID NO: 3980 - protein, 453 aa, Homo sapiens
MQGAQEASASEMLPLLLPLLWAGALAQERRFQLEGPESLTVQEGLCVLVPCRLPTTLPASYYGYGYWFLEGADVPVATNDPDEEVQEETRGRFHLLWDPRRKNCSLSIRDARRRDNAAYFFRLKSKWMKYGYTSSKLSVRVMALTHRPNISIPGTLESGHPSNLTCSVPWVCEQGTPPIFSWMSAAPTSLGPRTTQSSVLTITPRPQDHSTNLTCQVTFPGAGVTMERTIQLNVSYAPQKVAISIFQGNSAAFKILQNTSSLPVLEGQALRLLCDADGNPPAHLSWFQGFPALNATPISNTGVLELPQVGSAEEGDFTCRAQHPLGSLQISLSLFVHWKPEGRAGGVLGAVWGASITTLVFLCVCFIFRVKTRRKKAAQPVQNTDDVNPVMVSGSRGHQHQFQTGIVSDHPAEAGPISEDEQELHYAVLHFHKVQPQEPKVTDTEYSEIKIHK

SEQ ID NO: 3981 - protein, 353 aa, Homo sapiens
MQGAQEASASEMLPLLLPLLWAGALAQERRFQLEGPESLTVQEGLCVLVPCRLPTTLPASYYGYGYWFLEGADVPVATNDPDEEVQEETRGRFHLLWDPRRKNCSLSIRDARRRDNAAYFFRLKSKWMKYGYTSSKLSVRVMALTHRPNISIPGTLESGHPSNLTCSVPWVCEQGTPPIFSWMSAAPTSLGPRTTQSSVLTITPRPQDHSTNLTCQVTFPGAGVTMERTIQLNVSYAPQKVAISIFQGNSAAFKILQNTSSLPVLEGQALRLLCDADGNPPAHLSWFQGFPALNATPISNTGVLELPQVGSAEEGDFTCRAQHPLGSLQISLSLFVHWSSAPVPDRHSFRPPC

SEQ ID NO: 3982 - protein, 437 aa, Homo sapiens
MQGAQEASASEMLPLLLPLLWAGALAQERRFQLEGPESLTVQEGLCVLVPCRLPTTLPASYYGYGYWFLEGADVPVATNDPDEEVQEETRGRFHLLWDPRRKNCSLSIRDARRRDNAAYFFRLKSKWMKYGYTSSKLSVRVMALTHRPNISIPGTLESGHPSNLTCSVPWVCEQGTPPIFSWMSAAPTSLGPRTTQSSVLTITPRPQDHSTNLTCQVTFPGAGVTMERTIQLNVSSFKILQNTSSLPVLEGQALRLLCDADGNPPAHLSWFQGFPALNATPISNTGVLELPQVGSAEEGDFTCRAQHPLGSLQISLSLFVHWKPEGRAGGVLGAVWGASITTLVFLCVCFIFRVKTRRKKAAQPVQNTDDVNPVMVSGSRGHQHQFQTGIVSDHPAEAGPISEDEQELHYAVLHFHKVQPQEPKVTDTEYSEIKIHK

SEQ ID NO: 3983 - protein, 342 aa, Homo sapiens
MQGAQEASASEMLPLLLPLLWAGALAQERRFQLEGPESLTVQEGLCVLVPCRLPTTLPASYYGYGYWFLEGADVPVATNDPDEEVQEETRGRFHLLWDPRRKNCSLSIRDARRRDNAAYFFRLKSKWMKYGYTSSKLSVRVMGTLESGHPSNLTCSVPWVCEQGTPPIFSWMSAAPTSLGPRTTQSSVLTITPRPQDHSTNLTCQVTFPGAGVTMERTIQLNVSYAPQKVAISIFQGNSAAFKILQNTSSLPVLEGQALRLLCDADGNPPAHLSWFQGFPALNATPISNTGVLELPQVGSAEEGDFTCRAQHPLGSLQISLSLFVHWSSAPVPDRHSFRPPC

SEQ ID NO: 3984 - protein, 389 aa, Homo sapiens
MQGAQEASASEMLPLLLPLLWAGALAQERRFQLEGPESLTVQEGLCVLVPCRLPTTLPASYYGYGYWFLEGADVPVATNDPDEEVQEETRGRFHLLWDPRRKNCSLSIRDARRRDNAAYFFRLKSKWMKYGYTSSKLSVRVMALTHRPNISIPGTLESGHPSNLTCSVPWVCEQGTPPIFSWMSAAPTSLGPRTTQSSVLTITPRPQDHSTNLTCQVTFPGAGVTMERTIQLNVSWMLRRPPLSTPDAPQKVAISIFQGNSAAFKILQNTSSLPVLEGQALRLLCDADGNPPAHLSWFQGFPALNATPISNTGVLELPQVGSAEEGDFTCRAQHPLGSLQISLSLFVHWKPEGRAGGVLGAVWGASITTLVFLCVCFIFRVISTSSRQA

SEQ ID NO: 3985 - protein, 401 aa, Homo sapiens
MQGAQEASASEMLPLLLPLLWAASYYGYGYWFLEGADVPVATNDPDEEVQEETRGRFHLLWDPRRKNCSLSIRDARRRDNAAYFFRLKSKWMKYGYTSSKLSVRVMALTHRPNISIPGTLESGHPSNLTCSVPWVCEQGTPPIFSWMSAAPTSLGPRTTQSSVLTITPRPQDHSTNLTCQVTFPGAGVTMERTIQLNVSSFKILQNTSSLPVLEGQALRLLCDADGNPPAHLSWFQGFPALNATPISNTGVLELPQVGSAEEGDFTCRAQHPLGSLQISLSLFVHWKPEGRAGGVLGAVWGASITTLVFLCVCFIFRVKTRRKKAAQPVQNTDDVNPVMVSGSRGHQHQFQTGIVSDHPAEAGPISEDEQELHYAVLHFHKVQPQEPKVTDTEYSEIKIHK

SEQ ID NO: 3986 - protein, 346 aa, Homo sapiens
MFLSILVALCLWLHLALGVRGAPCEAVRIPMCRHMPWNITRMPNHLHHSTQENAILAIEQYEELVDVNCSAVLRFFLCAMYAPICTLEFLHDPIKPCKSVCQRARDDCEPLMKMYNHSWPESLACDELPVYDRGVCISPEAIVTDLPEDVKWIDITPDMMVQERPLDVDCKRLSPDRCKCKKVKPTLATYLSKNYSYVIHAKIKAVQRSGCNEVTTVVDVKEIFKSSSPIPRTQVPLITNSSCQCPHILPHQDVLIMCYEWRSRMMLLENCLVEKWRDQLSKRSIQWEERLQEQRRTVQDKKKTAGRTSRSNPPKPKGKPPAPKPASPKKNIKTRSAQKRTNPKRV

SEQ ID NO: 3987 - protein, 467 aa, Homo sapiens
MLLLLLLPLLWGRERVEGQKSNRKDYSLTMQSSVTVQEGMCVHVRCSFSYPVDSQTDSDPVHGYWFRAGNDISWKAPVATNNPAWAVQEETRDRFHLLGDPQTKNCTLSIRDARMSDAGRYFFRMEKGNIKWNYKYDQLSVNVTALTHRPNILIPGTLESGCFQNLTCSVPWACEQGTPPMISWMGTSVSPLHPSTTRSSVLTLIPQPQHHGTSLTCQVTLPGAGVTTNRTIQLNVSYPPQNLTVTVFQGEGTASTALGNSSSLSVLEGQSLRLVCAVDSNPPARLSWTWRSLTLYPSQPSNPLVLELQVHLGDEGEFTCRAQNSLGSQHVSLNLSLQQEYTGKMRPVSGVLLGAVGGAGATALVFLSFCVIFIVVRSCRKKSARPAADVGDIGMKDANTIRGSASQGNLTESWADDNPRHHGLAAHSSGEEREIQYAPLSFHKGEPQDLSGQEATNNEYSEIKIPK

SEQ ID NO: 3988 - protein, 374 aa, Homo sapiens
MLLLLLLPLLWGRERVEGQKSNRKDYSLTMQSSVTVQEGMCVHVRCSFSYPVDSQTDSDPVHGYWFRAGNDISWKAPVATNNPAWAVQEETRDRFHLLGDPQTKNCTLSIRDARMSDAGRYFFRMEKGNIKWNYKYDQLSVNVTDPPQNLTVTVFQGEGTASTALGNSSSLSVLEGQSLRLVCAVDSNPPARLSWTWRSLTLYPSQPSNPLVLELQVHLGDEGEFTCRAQNSLGSQHVSLNLSLQQEYTGKMRPVSGVLLGAVGGAGATALVFLSFCVIFIVVRSCRKKSARPAADVGDIGMKDANTIRGSASQGNLTESWADDNPRHHGLAAHSSGEEREIQYAPLSFHKGEPQDLSGQEATNNEYSEIKIPK

SEQ ID NO: 3989 - protein, 145 aa, Homo sapiens
MLLLLLLPLLWGRERVEGQKSNRKDYSLTMQSSVTVQEGMCVHVRCSFSYPVDSQTDSDPVHGYWFRAGNDISWKAPVATNNPAWAVQEETRDRFHLLGDPQTKNCTLSIRDARMSDAGRYFFRMEKGNIKWNYKYDQLSVNVTE

SEQ ID NO: 3990 - protein, 145 aa, Homo sapiens
MLLLLLLPLLWGRERVEGQKSNRKDYSLTMQSSVTVQEGMCVHVRCSFSYPVDSQTDSDPVHGYWFRAGNDISWKAPVATNNPAWAVQEETRDRFHLLGDPQTKNCTLSIRDARMSDAGRYFFRMEKGNIKWNYKYDQLSVNVTG

SEQ ID NO: 3991 - protein, 282 aa, Homo sapiens
MSRQTATALPTGTSKCPPSQRVPALTGTTASNNDLASLFECPVCFDYVLPPILQCQSGHLVCSNCRPKLTCCPTCRGPLGSIRNLAMEKVANSVLFPCKYASSGCEITLPHTEKADHEELCEFRPYSCPCPGASCKWQGSLDAVMPHLMHQHKSITTLQGEDIVFLATDINLPGAVDWVMMQSCFGFHFMLVLEKQEKYDGHQQFFAIVQLIGTRKQAENFAYRLELNGHRRRLTWEATPRSIHEGIATAIMNSDCLVFDTSIAQLFAENGNLGINVTISMC

SEQ ID NO: 3992 - protein, 313 aa, Homo sapiens
MTGKATPPSLYSWRGVLFTCLPAARTRKRKEMSRQTATALPTGTSKCPPSQRVPALTGTTASNNDLASLFECPVCFDYVLPPILQCQSGHLVCSNCRPKLTCCPTCRGPLGSIRNLAMEKVANSVLFPCKYASSGCEITLPHTEKADHEELCEFRPYSCPCPGASCKWQGSLDAVMPHLMHQHKSITTLQGEDIVFLATDINLPGAVDWVMMQSCFGFHFMLVLEKQEKYDGHQQFFAIVQLIGTRKQAENFAYRLELNGHRRRLTWEATPRSIHEGIATAIMNSDCLVFDTSIAQLFAENGNLGINVTISMC

SEQ ID NO: 3993 - protein, 195 aa, Homo sapiens
MSRQTATALPTGTSKCPPSQRVPALTGTTASNNDLASLFECPVCFDYVLPPILQCQSGHLVCSNCRPKLTCCPTCRGPLGSIRNLAMEKVANSVLFPCKYASSGCEITLPHTEKADHEELCEFRPYSCPCPGASCKWQGSLDAVMPHLMHQHKSITTLQGEDIVFLATDINLPGAVDWVMMQSCFGFHFMLVDLS

SEQ ID NO: 3994 - protein, 399 aa, Homo sapiens
MAELLRSLQDSQLVARFQRRCGLFPAPDEGPRENGADPTERAARVPGVEHLPAANGKGGEAPANGLRRAAAPEAYVQKYVVKNYFYYYLFQFSAALGQEVFYITFLPFTHWNIDPYLSRRLIIIWVLVMYIGQVAKDVLKWPRPSSPPVVKLEKRLIAEYGMPSTHAMAATAIAFTLLISTMDRYQYPFVLGLVMAVVFSTLVCLSRLYTGMHTVLDVLGGVLITALLIVLTYPAWTFIDCLDSASPLFPVCVIVVPFFLCYNYPVSDYYSPTRADTTTILAAGAGVTIGFWINHFFQLVSKPAESLPVIQNIPPLTTYMLVLGLTKFAVGIVLILLVRQLVQNLSLQVLYSWFKVVTRNKEARRRLEIEVPYKFVTYTSVGICATTFVPMLHRFLGLP

SEQ ID NO: 3995 - protein, 271 aa, Homo sapiens
MYIGQVAKDVLKWPRPSSPPVVKLEKRLIAEYGMPSTHAMAATAIAFTLLISTMDRYQYPFVLGLVMAVVFSTLVCLSRLYTGMHTVLDVLGGVLITALLIVLTYPAWTFIDCLDSASPLFPVCVIVVPFFLCYNYPVSDYYSPTRADTTTILAAGAGVTIGFWINHFFQLVSKPAESLPVIQNIPPLTTYMLVLGLTKFAVGIVLILLVRQLVQNLSLQVLYSWFKVVTRNKEARRRLEIEVPYKFVTYTSVGICATTFVPMLHRFLGLP

SEQ ID NO: 3996 - protein, 499 aa, Homo sapiens
MLLLLLLLPLLWGTKGMEGDRQYGDGYLLQVQELVTVQEGLCVHVPCSFSYPQDGWTDSDPVHGYWFRAGDRPYQDAPVATNNPDREVQAETQGRFQLLGDIWSNDCSLSIRDARKRDKGSYFFRLERGSMKWSYKSQLNYKTKQLSVFVTALTHRPDILILGTLESGHSRNLTCSVPWACKQGTPPMISWIGASVSSPGPTTARSSVLTLTPKPQDHGTSLTCQVTLPGTGVTTTSTVRLDVSYPPWNLTMTVFQGDATASTALGNGSSLSVLEGQSLRLVCAVNSNPPARLSWTRGSLTLCPSRSSNPGLLELPRVHVRDEGEFTCRAQNAQGSQHISLSLSLQNEGTGTSRPVSQVTLAAVGGAGATALAFLSFCIIFIIVRSCRKKSARPAAGVGDTGMEDAKAIRGSASQGPLTESWKDGNPLKKPPPAVAPSSGEEGELHYATLSFHKVKPQDPQGQEATDSEYSEIKIHKRETAETQACLRNHNPSSKEVRG

SEQ ID NO: 3997 - protein, 406 aa, Homo sapiens
MLLLLLLLPLLWGTKGMEGDRQYGDGYLLQVQELVTVQEGLCVHVPCSFSYPQDGWTDSDPVHGYWFRAGDRPYQDAPVATNNPDREVQAETQGRFQLLGDIWSNDCSLSIRDARKRDKGSYFFRLERGSMKWSYKSQLNYKTKQLSVFVTDPPWNLTMTVFQGDATASTALGNGSSLSVLEGQSLRLVCAVNSNPPARLSWTRGSLTLCPSRSSNPGLLELPRVHVRDEGEFTCRAQNAQGSQHISLSLSLQNEGTGTSRPVSQVTLAAVGGAGATALAFLSFCIIFIIVRSCRKKSARPAAGVGDTGMEDAKAIRGSASQGPLTESWKDGNPLKKPPPAVAPSSGEEGELHYATLSFHKVKPQDPQGQEATDSEYSEIKIHKRETAETQACLRNHNPSSKEVRG

SEQ ID NO: 3998 - protein, 431 aa, Homo sapiens
MLLLLLLLPLLWGTKGMEGDRQYGDGYLLQVQELVTVQEGLCVHVPCSFSYPQDGWTDSDPVHGYWFRAGDRPYQDAPVATNNPDREVQAETQGRFQLLGDIWSNDCSLSIRDARKRDKGSYFFRLERGSMKWSYKSQLNYKTKQLSVFVTALTHRPDILILGTLESGHSRNLTCSVPWACKQGTPPMISWIGASVSSPGPTTARSSVLTLTPKPQDHGTSLTCQVTLPGTGVTTTSTVRLDVSYPPWNLTMTVFQGDATASTALGNGSSLSVLEGQSLRLVCAVNSNPPARLSWTRGSLTLCPSRSSNPGLLELPRVHVRDEGEFTCRAQNAQGSQHISLSLSLQNEGTGTSRPVSQVTLAAVGGAGATALAFLSFCIIFIIVRSCRKKSARPAAGVGDTGMEDAKAIRGSASQVSDVGFSTPSIQPGHL

SEQ ID NO: 3999 - protein, 465 aa, Homo sapiens
MTSMASLFSFTSPAVKRLLGWKQGDEEEKWAEKAVDALVKKLKKKKGAMEELEKALSSPGQPSKCVTIPRSLDGRLQVSHRKGLPHVIYCRVWRWPDLQSHHELKPLDICEFPFGSKQKEVCINPYHYKRVESPVLPPVLVPRHNEFNPQHSLLVQFRNLSHNEPHMPQNATFPDSFHQPNNTPFPLSPNSPYPPSPASSTYPNSPASSGPGSPFQLPADTPPPAYMPPDDQMGQDNSQPMDTSNNMIPQIMPSISSRDVQPVAYEEPKHWCSIVYYELNNRVGEAFHASSTSVLVDGFTDPSNNKSRFCLGLLSNVNRNSTIENTRRHIGKGVHLYYVGGEVYAECLSDSSIFVQSRNCNFHHGFHPTTVCKIPSSCSLKIFNNQEFAQLLAQSVNHGFEAVYELTKMCTIRMSFVKGWGAEYHRQDVTSTPCWIEIHLHGPLQWLDKVLTQMGSPLNPISSVS

SEQ ID NO: 4000 - protein, 463 aa, Homo sapiens
MLLLLLPLLWGRERAEGQTSKLLTMQSSVTVQEGLCVHVPCSFSYPSHGWIYPGPVVHGYWFREGANTDQDAPVATNNPARAVWEETRDRFHLLGDPHTKNCTLSIRDARRSDAGRYFFRMEKGSIKWNYKHHRLSVNVTALTHRPNILIPGTLESGCPQNLTCSVPWACEQGTPPMISWIGTSVSPLDPSTTRSSVLTLIPQPQDHGTSLTCQVTFPGASVTTNKTVHLNVSYPPQNLTMTVFQGDGTVSTVLGNGSSLSLPEGQSLRLVCAVDAVDSNPPARLSLSWRGLTLCPSQPSNPGVLELPWVHLRDAAEFTCRAQNPLGSQQVYLNVSLQSKATSGVTQGVVGGAGATALVFLSFCVIFVVVRSCRKKSARPAAGVGDTGIEDANAVRGSASQGPLTEPWAEDSPPDQPPPASARSSVGEGELQYASLSFQMVKPWDSRGQEATDTEYSEIKIHR

SEQ ID NO: 4001 - protein, 479 aa, Homo sapiens
MLLLLLPLLWGRERAEGQTSKLLTMQSSVTVQEGLCVHVPCSFSYPSHGWIYPGPVVHGYWFREGANTDQDAPVATNNPARAVWEETRDRFHLLGDPHTKNCTLSIRDARRSDAGRYFFRMEKGSIKWNYKHHRLSVNVTALTHRPNILIPGTLESGCPQNLTCSVPWACEQGTPPMISWIGTSVSPLDPSTTRSSVLTLIPQPQDHGTSLTCQVTFPGASVTTNKTVHLNVSYPPQNLTMTVFQGDGTVSTVLGNGSSLSLPEGQSLRLVCAVDAVDSNPPARLSLSWRGLTLCPSQPSNPGVLELPWVHLRDAAEFTCRAQNPLGSQQVYLNVSLQSKATSGVTQGVVGGAGATALVFLSFCVIFVVVRSCRKKSARPAAGVGDTGIEDANAVRGSASQILNHFIGFPTFLGLGFEFLLNLRDLCCHPDSEFYVYHFSHFRLIKNIAGEIVWSLEGKILWLLDVSDFFHWFFLICVG

SEQ ID NO: 4002 - protein, 324 aa, Homo sapiens
MSRPSSTGPSANKPCSKQPPPQPQHTPSPAAPPAAATISAAGPGSSAVPAAAAVISGPGGGGGAGPVSPQHHELTSLFECPVCFDYVLPPILQCQAGHLVCNQCRQKLSCCPTCRGALTPSIRNLAMEKVASAVLFPCKYATTGCSLTLHHTEKPEHEDICEYRPYSCPCPGASCKWQGSLEAVMSHLMHAHKSITTLQGEDIVFLATDINLPGAVDWVMMQSCFGHHFMLVLEKQEKYEGHQQFFAIVLLIGTRKQAENFAYRLELNGNRRRLTWEATPRSIHDGVAAAIMNSDCLVFDTAIAHLFADNGNLGINVTISTCCP

SEQ ID NO: 4003 - protein, 317 aa, Homo sapiens
MRAAAAGGGVRTAALALLLGALHWAPARCEEYDYYGWQAEPLHGRSYSKPPQCLDIPADLPLCHTVGYKRMRLPNLLEHESLAEVKQQASSWLPLLAKRCHSDTQVFLCSLFAPVCLDRPIYPCRSLCEAVRAGCAPLMEAYGFPWPEMLHCHKFPLDNDLCIAVQFGHLPATAPPVTKICAQCEMEHSADGLMEQMCSSDFVVKMRIKEIKIENGDRKLIGAQKKKKLLKPGPLKRKDTKRLVLHMKNGAGCPCPQLDSLAGSFLVMGRKVDGQLLLMAVYRWDKKNKEMKFAVKFMFSYPCSLYYPFFYGAAEPH

SEQ ID NO: 4004 - protein, 901 aa, Homo sapiens
MEANQCPLVVEPSYPDLVINVGEVTLGEENRKKLQKIQRDQEKERVMRAACALLNSGGGVIRMAKKVEHPVEMGLDLEQSLRELIQSSDLQAFFETKQQGRCFYIFVKSWSSGPFPEDRSVKPRLCSLSSSLYRRSETSVRSMDSREAFCFLKTKRKPKILEEGPFHKIHKGVYQELPNSDPADPNSDPADLIFQKDYLEYGEILPFPESQLVEFKQFSTKHFQEYVKRTIPEYVPAFANTGGGYLFIGVDDKSREVLGCAKENVDPDSLRRKIEQAIYKLPCVHFCQPQRPITFTLKIVNVLKRGELYGYACMIRVNPFCCAVFSEAPNSWIVEDKYVCSLTTEKWVGMMTDTDPDLLQLSEDFECQLSLSSGPPLSRPVYSKKGLEHKKELQQLLFSVPPGYLRYTPESLWRDLISEHRGLEELINKQMQPFFRGILIFSRSWAVDLNLQEKPGVICDALLIAQNSTPILYTILREQDAEGQDYCTRTAFTLKQKLVNMGGYTGKVCVRAKVLCLSPESSAEALEAAVSPMDYPASYSLAGTQHMEALLQSLVIVLLGFRSLLSDQLGCEVLNLLTAQQYEIFSRSLRKNRELFVHGLPGSGKTIMAMKIMEKIRNVFHCEAHRILYVCENQPLRNFISDRNICRAETRKTFLRENFEHIQHIVIDEAQNFRTEDGDWYGKAKSITRRAKGGPGILWIFLDYFQTSHLDCSGLPPLSDQYPREELTRIVRNADPIAKYLQKEMQVIRSNPSFNIPTGCLEVFPEAEWSQGVQGTLRIKKYLTVEQIMTCVADTCRRFFDRGYSPKDVAVLVSTAKEVEHYKYELLKAMRKKRVVQLSDACDMLGDHIVLDSVRRFSGLERSIVFGIHPRTADPAILPNVLICLASRAKQHLYIFPWGGH

SEQ ID NO: 4005 - protein, 578 aa, Homo sapiens
MNISVDLETNYAELVLDVGRVTLGENSRKKMKDCKLRKKQNESVSRAMCALLNSGGGVIKAEIENEDYSYTKDGIGLDLENSFSNILLFVPEYLDFMQNGNYFLIFVKSWSLNTSGLRITTLSSNLYKRDITSAKVMNATAALEFLKDMKKTRGRLYLRPELLAKRPCVDIQEENNMKALAGVFFDRTELDRKEKLTFTESTHVEIKNFSTEKLLQRIKEILPQYVSAFANTDGGYLFIGLNEDKEIIGFKAEMSDLDDLEREIEKSIRKMPVHHFCMEKKKINYSCKFLGVYDKGSLCGYVCALRVERFCCAVFAKEPDSWHVKDNRVMQLTRKEWIQFMVEAEPKFSSSYEEVISQINTSLPAPHSWPLLEWQRQRHHCPGLSGRITYTPENLCRKLFLQHEGLKQLICEEMDSVRKGSLIFSRSWSVDLGLQENHKVLCDALLISQDSPPVLYTFHMVQDEEFKGYSTQTALTLKQKLAKIGGYTKKVCVMTKIFYLSPEGMTSCQYDLRSQVIYPESYYFTRRKYLLKALFKALKRLKSLRDQFSFAENLYQIIGIDCFQKNDKKMFKSCRRLT

SEQ ID NO: 4006 - protein, 269 aa, Homo sapiens
MLFFTQCFGAVLDLIHLRFQHYKAKRVFSAAGQLVCVVNPTHNLKYVSSRRAVTQSAPEQGSFHPHHLSHHHCHHRHHHHLRHHAHPHHLHHQEAGLHANPVTPCLCMCPLFSCQWEGRLEVVVPHLRQIHRVDILQGAEIVFLATDMHLPAPADWIIMHSCLGHHFLLVLRKQERHEGHPQFFATMMLIGTPTQADCFTYRLELNRNHRRLKWEATPRSVLECVDSVITDGDCLVLNTSLAQLFSDNGSLAIGIAITATEVLPSEAEM

SEQ ID NO: 4007 - protein, 897 aa, Homo sapiens
MEANHCSLGVYPSYPDLVIDVGEVTLGEENRKKLQKTQRDQERARVIRAACALLNSGGGVIQMEMANRDERPTEMGLDLEESLRKLIQYPYLQAFFETKQHGRCFYIFVKSWSGDPFLKDGSFNSRICSLSSSLYCRSGTSVLHMNSRQAFDFLKTKERQSKYNLINEGSPPSKIMKAVYQNISESNPAYEVFQTDTIEYGEILSFPESPSIEFKQFSTKHIQQYVENIIPEYISAFANTEGGYLFIGVDDKSRKVLGCAKEQVDPDSLKNVIARAISKLPIVHFCSSKPRVEYSTKIVEVFCGKELYGYLCVIKVKAFCCVVFSEAPKSWMVREKYIRPLTTEEWVEKMMDADPEFPPDFAEAFESQLSLSDSPSLCRPVYSKKGLEHKADLQQHLFPVPPGHLECTPESLWKELSLQHEGLKELIHKQMRPFSQGIVILSRSWAVDLNLQEKPGVICDALLIAQNSTPILYTILREQDAEGQDYCTRTAFTLKQKLVNMGGYTGKVCVRAKVLCLSPESSAEALEAAVSPMDYPASYSLAGTQHMEALLQSLVIVLLGFRSLLSDQLGCEVLNLLTAQQYEIFSRSLRKNRELFVHGLPGSGKTIMAMKIMEKIRNVFHCEAHRILYVCENQPLRNFISDRNICRAETRETFLREKFEHIQHIVIDEAQNFRTEDGDWYRKAKTITQREKDCPGVLWIFLDYFQTSHLGHSGLPPLSAQYPREELTRVVRNADEIAEYIQQEMQLIIENPPINIPHGYLAILSEAKWVPGVPGNTKIIKNFTLEQIVTYVADTCRCFFERGYSPKDVAVLVSTVTEVEQYQSKLLKAMRKKMVVQLSDACDMLGVHIVLDSVRRFSGLERSIVFGIHPRTADPAILPNILICLASRAKQHLYIFL

SEQ ID NO: 4008 - protein, 579 aa, Homo sapiens
MEANHCSLAPKSWMVREKYIRPLTTEEWVEKMMDADPEFPPDFAEAFESQLSLSDSPSLCRPVYSKKGLEHKADLQQHLFPVPPGHLECTPESLWKELSLQHEGLKELIHKQMRPFSQGIVILSRSWAVDLNLQEKPGVICDALLIAQNSTPILYTILREQDAEGQDYCTRTAFTLKQKLVNMGGYTGKVCVRAKVLCLSPESSAEALEAAVSPMDYPASYSLAGTQHMEALLQSLVIVLLGFRSLLSDQLGCEVLNLLTAQQYEIFSRSLRKNRELFVHGLPGSGKTIMAMKIMEKIRNVFHCEAHRILYVCENQPLRNFISDRNICRAETRETFLREKFEHIQHIVIDEAQNFRTEDGDWYRKAKTITQREKDCPGVLWIFLDYFQTSHLGHSGLPPLSAQYPREELTRVVRNADEIAEYIQQEMQLIIENPPINIPHGYLAILSEAKWVPGVPGNTKIIKNFTLEQIVTYVADTCRCFFERGYSPKDVAVLVSTVTEVEQYQSKLLKAMRKKMVVQLSDACDMLGVHIVLDSVRRFSGLERSIVFGIHPRTADPAILPNILICLASRAKQHLYIFL

SEQ ID NO: 4009 - protein, 496 aa, Homo sapiens
MFRSKRSGLVRRLWRSRVVPDREEGGSGGGGGGDEDGSLGSRAEPAPRAREGGGCGRSEVRPVAPRRPRDAVGQRGAQGAGRRRRAGGPPRPMSEPGAGAGSSLLDVAEPGGPGWLPESDCETVTCCLFSERDAAGAPRDASDPLAGAALEPAGGGRSREARSRLLLLEQELKTVTYSLLKRLKERSLDTLLEAVESRGGVPGGCVLVPRADLRLGGQPAPPQLLLGRLFRWPDLQHAVELKPLCGCHSFAAAADGPTVCCNPYHFSRLCGPESPPPPYSRLSPRDEYKPLDLSDSTLSYTETEATNSLITAPGEFSDASMSPDATKPSHWCSVAYWEHRTRVGRLYAVYDQAVSIFYDLPQGSGFCLGQLNLEQRSESVRRTRSKIGFGILLSKEPDGVWAYNRGEHPIFVNSPTLDAPGGRALVVRKVPPGYSIKVFDFERSGLQHAPEPDAADGPYDPNSVRISFAKGWGPCYSRQFITSCPCWLEILLNNPR

SEQ ID NO: 4010 - protein, 235 aa, Homo sapiens
MSRMGKPIETQKSPPPPYSRLSPRDEYKPLDLSDSTLSYTETEATNSLITAPGEFSDASMSPDATKPSHWCSVAYWEHRTRVGRLYAVYDQAVSIFYDLPQGSGFCLGQLNLEQRSESVRRTRSKIGFGILLSKEPDGVWAYNRGEHPIFVNSPTLDAPGGRALVVRKVPPGYSIKVFDFERSGLQHAPEPDAADGPYDPNSVRISFAKGWGPCYSRQFITSCPCWLEILLNNPR

SEQ ID NO: 4011 - protein, 338 aa, Homo sapiens
MFRSKRSGLVRRLWRSRVVPDREEGGSGGGGGGDEDGSLGSRAEPAPRAREGGGCGRSEVRPVAPRRPRDAVGQRGAQGAGRRRRAGGPPRPMSEPGAGAGSSLLDVAEPGGPGWLPESDCETVTCCLFSERDAAGAPRDASDPLAGAALEPAGGGRSREARSRLLLLEQELKTVTYSLLKRLKERSLDTLLEAVESRGGVPGGCVLVPRADLRLGGQPAPPQLLLGRLFRWPDLQHAVELKPLCGCHSFAAAADGPTVCCNPYHFSRLCGPESPPPPYSRLSPRDEYKPLDLSDSTLSYTETEATNSLITAPGEFSAADAGIGSRGNRGLESSVPCS

SEQ ID NO: 4012 - protein, 317 aa, Homo sapiens
MKTALILLSILGMACAFSMKNLHRRVKIEDSEENGVFKYRPRYYLYKHAYFYPHLKRFPVQGSSDSSEENGDDSSEEEEEEEETSNEGENNEESNEDEDSEAENTTLSATTLGYGEDATPGTGYTGLAAIQLPKKAGDITNKATKEKESDEEEEEEEEGNENEESEAEVDENEQGINGTSTNSTEAENGNGSSGGDNGEEGEEESVTGANAEDTTETGRQGKGTSKTTTSPNGGFEPTTPPQVYRTTSPPFGKTTTVEYEGEYEYTGANEYDNGYEIYESENGEPRGDNYRAYEDEYSYFKGQGYDGYDGQNYYHHQ

SEQ ID NO: 4013 - protein, 912 aa, Homo sapiens
MESLKTDTEMPYPEVIVDVGRVIFGEENRKKMTNSCLKRSENSRIIRAICALLNSGGGVIKAEIDDKTYSYQCHGLGQDLETSFQKLLPSGSQKYLDYMQQGHNLLIFVKSWSPDVFSLPLRICSLRSNLYRRDVTSAINLSASSALELLREKGFRAQRGRPRVKKLHPQQVLNRCIQEEEDMRILASEFFKKDKLMYKEKLNFTESTHVEFKRFTTKKVIPRIKEMLPHYVSAFANTQGGYVLIGVDDKSKEVVGCKWEKVNPDLLKKEIENCIEKLPTFHFCCEKPKVNFTTKILNVYQKDVLDGYVCVIQVEPFCCVVFAEAPDSWIMKDNSVTRLTAEQWVVMMLDTQSAPPSLVTDYNSCLISSASSARKSPGYPIKVHKFKEALQRHLFPVTQEEVQFKPESLCKKLFSDHKELEGLMKTLIHPCSQGIVIFSRSWAGDVGFRKEQNVLCDALLIAVNSPVVLYTILIDPNWPGGLEYARNTAHQLKQKLQTVGGYTGKVCIIPRLIHLSSTQSRPGEIPLRYPRSYRLADEEEMEDLLQALVVVSLSSRSLLSDQMGCEFFNLLIMEQSQLLSESLQKTRELFIYCFPGVRKTALAIKIMEKIKDLFHCKPKEILYVCESDSLKDFVTQQTTCQAVTRKTFMQGEFLKIKHIVMDETENFCSKYGNWYMKAKNITHPKAKGTGSENLHHGILWLFLDPFQIHHADVNGLPPPSAQFPRKTITSGIHCALEIAKVMKEEMKRIKENPPSNMSPDTLALFSETAYEEATCAQALPGVCETKTNLTTEQIANYVARKCHSLFQCGYLPKDIAILCRRGEDRGRYRLALLKAMELIETHRPSEVVFSPATGVWGSHIVLDSIQQFSGLERTVVFGLSPECDQSEEFHKLCFASRAIKHLYLLYEKRAAY

SEQ ID NO: 4014 - protein, 896 aa, Homo sapiens
MESLKTDTEMPYPEVIVDVGRVIFGEENRKKMTNSCLKRSENSRIIRAICALLNSGGGVIKAEIDDKTYSYQCHGLGQDLETSFQKLLPSGSQKYLDYMQQGHNLLIFVKSWSPDVFSLPLRICSLRSNLYRRDVTSAINLSASSALELLREKGFRAQRGRPRVKKLHPQQVLNRCIQEEEDMRILASEFFKKDKLMYKEKLNFTESTHVEFKRFTTKKVIPRIKEMLPHYVSAFANTQGGYVLIGVDDKSKEVVGCKWEKVNPDLLKKEIENCIEKLPTFHFCCEKPKVNFTTKILNVYQKDVLDGYVCVIQVEPFCCVVFAEAPDSWIMKDNSVTRLTAEQWVVMMLDTQSASSARKSPGYPIKVHKFKEALQRHLFPVTQEEVQFKPESLCKKLFSDHKELEGLMKTLIHPCSQGIVIFSRSWAGDVGFRKEQNVLCDALLIAVNSPVVLYTILIDPNWPGGLEYARNTAHQLKQKLQTVGGYTGKVCIIPRLIHLSSTQSRPGEIPLRYPRSYRLADEEEMEDLLQALVVVSLSSRSLLSDQMGCEFFNLLIMEQSQLLSESLQKTRELFIYCFPGVRKTALAIKIMEKIKDLFHCKPKEILYVCESDSLKDFVTQQTTCQAVTRKTFMQGEFLKIKHIVMDETENFCSKYGNWYMKAKNITHPKAKGTGSENLHHGILWLFLDPFQIHHADVNGLPPPSAQFPRKTITSGIHCALEIAKVMKEEMKRIKENPPSNMSPDTLALFSETAYEEATCAQALPGVCETKTNLTTEQIANYVARKCHSLFQCGYLPKDIAILCRRGEDRGRYRLALLKAMELIETHRPSEVVFSPATGVWGSHIVLDSIQQFSGLERTVVFGLSPECDQSEEFHKLCFASRAIKHLYLLYEKRAAY

SEQ ID NO: 4015 - protein, 1333 aa, Homo sapiens [sequence omitted]

SEQ ID NO: 4016 - protein, 314 aa, Homo sapiens
MLCQAQPRSASDVEERVQKSFPHPIDKWAIADAQSAIEKRKRRNPLSLPVEKIHPLLKEVLGYKIDHQVSVYIVAVLEYISADILKLVGNYVRNIRHYEITKQDIKVAMCADKVLMDMFHQDVEDINILSLTDEEPSTSGEQTYYDLVKAFMAEIRQYIRELNLIIKVFREPFVSNSKLFSANDVENIFSRIVDIHELSVKLLGHIEDTVEMTDEGSPHPLVGSCFEDLAEELAFDPYESYARDILRPGFHDRFLSQLSKPGAALYLQSIGEGFKEAVQYVLPRLLLAPVYHCLHYFELLKFPFGDLSRLRDSV

SEQ ID NO: 4017 - protein, 426 aa, Homo sapiens
MFRTKRSALVRRLWRSRAPGGEDEEEGAGGGGGGGELRGEGATDSRAHGAGGGGPGRAGCCLGKAVRGAKGHHHPHPPAAGAGAAGGAEADLKALTHSVLKKLKERQLELLLQAVESRGGTRTACLLLPGRLDCRLGPGAPAGAQPAQPPSSYSLPLLLCKVFRWPDLRHSSEVKRLCCCESYGKINPELVCCNPHHLSRLCELESPPPPYSRYPMDFLKPTADCPDAVPSSAETGGTNYLAPGGLSDSQLLLEPGDRSHWCVVAYWEEKTRVGRLYCVQEPSLDIFYDLPQGNGFCLGQLNSDNKSQLVQKVRSKIGCGIQLTREVDGVWVYNRSSYPIFIKSATLDNPDSRTLLVHKVFPGFSIKAFDYEKAYSLQRPNDHEFMQQPWTGFTVQISFVKGWGQCYTRQFISSCPCWLEVIFNSR

SEQ ID NO: 4018 - protein, 211 aa, Homo sapiens
MDFLKPTADCPDAVPSSAETGGTNYLAPGGLSDSQLLLEPGDRSHWCVVAYWEEKTRVGRLYCVQEPSLDIFYDLPQGNGFCLGQLNSDNKSQLVQKVRSKIGCGIQLTREVDGVWVYNRSSYPIFIKSATLDNPDSRTLLVHKVFPGFSIKAFDYEKAYSLQRPNDHEFMQQPWTGFTVQISFVKGWGQCYTRQFISSCPCWLEVIFNSR

SEQ ID NO: 4019 - protein, 425 aa, Homo sapiens
MFRTKRSALVRRLWRSRAPGGEDEEEGAGGGGGGGELRGEGATDSRAHGAGGGGPGRAGCCLGKAVRGAKGHHHPHPPAAGAGAAGGAEADLKALTHSVLKKLKERQLELLLQAVESRGGTRTACLLLPGRLDCRLGPGAPAGAQPAQPPSSYSLPLLLCKVFRWPDLRHSSEVKRLCCCESYGKINPELVCCNPHHLSRLCELESPPPPYSRYPMDFLKPTDCPDAVPSSAETGGTNYLAPGGLSDSQLLLEPGDRSHWCVVAYWEEKTRVGRLYCVQEPSLDIFYDLPQGNGFCLGQLNSDNKSQLVQKVRSKIGCGIQLTREVDGVWVYNRSSYPIFIKSATLDNPDSRTLLVHKVFPGFSIKAFDYEKAYSLQRPNDHEFMQQPWTGFTVQISFVKGWGQCYTRQFISSCPCWLEVIFNSR

SEQ ID NO: 4020 - protein, 1332 aa, Homo sapiens [sequence omitted]

SEQ ID NO: 4021 - protein, 1299 aa, Homo sapiens
MQQAPQPYEFFSEENSPKWRGLLVSALRKVQEQVHPTLSANEESLYYIEELIFQLLNKLCMAQPRTVQDVEERVQKTFPHPIDKWAIADAQSAIEKRKRRNPLLLPVDKIHPSLKEVLGYKVDYHVSLYIVAVLEYISADILKLAGNYVFNIRHYEISQQDIKVSMCADKVLMDMFDQDDIGLVSLCEDEPSSSGELNYYDLVRTEIAEERQYLRELNMIIKVFREAFLSDRKLFKPSDIEKIFSNISDIHELTVKLLGLIEDTVEMTDESSPHPLAGSCFEDLAEEQAFDPYETLSQDILSPEFHEHFNKLMARPAVALHFQQLKACSEEQEDRECLNQAITALMNLQGSMDRIYKQYSPRRRPGDPVCPFYSHQLRSKHLAIKKMNEIQKNIDGWEGKDIGQCCNEFIMEGPLTRIGAKHERHIFLFDGLMISCKPNHGQTRLPGYSSAEYRLKEKFVMRKIQICDKEDTCEHKHAFELVSKDENSIIFAAKSAEEKNNWMAALISLHYRSTLDRMLDSVLLKEENEQPLRLPSPEVYRFVVKDSEENIVFEDNLQSRSGIPIIKGGTVVKLIERLTYHMYADPNFVRTFLTTYRSFCKPQELLSLLIERFEIPEPEPTDADKLAIEKGEQPISADLKRFRKEYVQPVQLRILNVFRHWVEHHFYDFERDLELLERLESFISSVRGKAMKKWVESIAKIIRRKKQAQANGVSHNITFESPPPPIEWHISKPGQFETFDLMTLHPIEIARQLTLLESDLYRKVQPSELVGSVWTKEDKEINSPNLLKMIRHTTNLTLWFEKCIVEAENFEERVAVLSRIIEILQVFQDLNNFNGVLEIVSAVNSVSVYRLDHTFEALQERKRKILDEAVELSQDHFKKYLVKLKSINPPCVPFFGIYLTNILKTEEGNNDFLKKKGKDLINFSKRRKVAEITGEIQQYQNQPYCLRIEPDMRRFFENLNPMGSASEKEFTDYLFNKSLEIEPRNCKQPPRFPRKSTFSLKSPGIRPNTGRHGSTSGTLRGHPTPLEREPCKISFSRIAETELESTVSAPTSPNTPSTPPVSASSDLSVFLDVDLNSSCGSNSIFAPVLLPHSKSFFSSCGSLHKLSEEPLIPPPLPPRKKFDHDASNSKGNMKSDDDPPAIPPRQPPPPKVKPRVPVPTGAFDGPLHSPPPPPPRDPLPDTPPPVPLRPPEHFINCPFNLQPPPLGHLHRDSDWLRDISTCPNSPSTPPSTPSPRVPRRCYVLSSSQNNLAHPPAPPVPPRQNSSPHLPKLPPKTYKRELSHPPLYRLPLLENAETPQ

SEQ ID NO: 4022 - protein, 407 aa, Homo sapiens
MTPMKRSVQTQVSEPFMESWGEESLPELPAEQSLTEYSDLEEAPSAHTLYVGHLNPQFSVPVLACLLRDTLERLEMPVAREHIEVVRRPRKAYALVQVTVHRDTLASLPWRLQTALEEHLILKELAARGKDLLLSEAQGPFSHREEKEEEEEDSGLSPGPSPGSGVPLPTWPTHTLPDRPQAQQLQSCQGRPSGVCSDSAIVHQQIVGKDQLFQGAFLGSETRNMEFKRGSGEYLSLAFKHHVRRYVCAFLNSEGGSLLVGVEDSGLVQGIRCSHRDEDRARLLVDSILQGFKPQIFPDAYTLTFIPVISTSETSVPLKVIRLTVHTPKAQSQPQLYQTDQGEVFLRRDGSIQGPLSASAIQEWCRQRWLVELGKLEEKMKALMMEKEQLQQQLQQHGPVSCTCCVL

SEQ ID NO: 4023 - protein, 348 aa, Homo sapiens
MTPMKRSVQTQVSEPFMESWGEESLPELPAEQSLTEYSDLEEAPSAHTLYVGHLNPQFSVPVLACLLRDTLERLEMPVAREHIEVVRRPRKAYALVQVTVHRDTLASLPWRLQTALEEHLILKELAARGKDLLLSEAQGPFSHREQIVGKDQLFQGAFLGSETRNMEFKRGSGEYLSLAFKHHVRRYVCAFLNSEGGSLLVGVEDSGLVQGIRCSHRDEDRARLLVDSILQGFKPQIFPDAYTLTFIPVISTSETSVPLKVIRLTVHTPKAQSQPQLYQTDQGEVFLRRDGSIQGPLSASAIQEWCRQRWLVELGKLEEKMKALMMEKEQLQQQLQQHGPVSCTCCVL

SEQ ID NO: 4024 - protein, 359 aa, Homo sapiens
MTPMKRSVQTQVSEPFMESWGEESLPELPAEQSLTEYSDLEEAPSAHTLYVGHLNPQFSVPVLACLLRDTLERLEMPVAREHIEVVRRPRKAYALVQVTVHRDTLASLPWRLQTALEEHLILKELAARGKDLLLSEAQGPFSHREEKEEEEEDSGLSPGPSPGSGVPLPTWPTHTLPDRPQAQQLQSCQGRPSGVCSDSAIVHQQIVGKDQLFQGAFLGSETRNMEFKRGSGEYLSLAFKHHVRRYVCAFLNSEGGSLLVGVEDSGLVQGIRCSHRDEDRARLLVDSILQGFKPQIFPDAYTLTFIPVISTSETSVPLKRWLVELGKLEEKMKALMMEKEQLQQQLQQHGPVSCTCCVL

SEQ ID NO: 4025 - protein, 260 aa, Homo sapiens
MTPMKRSVQTQVSEPFMESWGEESLPELPAEQSLTEYSDLEEAPSAHTLYVGHLNPQFSVPVLACLLRDTLERLEMPVAREHIEVVRRPRKAYALVQVTVHRDTLASLPWRLQTALEEHLILKELAARGKDLLLSEAQGPFSHREVSGTFPKQAPKPHPKGEPLSGSGLQSGDGGVSLGKQGQICKLGGCHSNDHGLRLVLPAFSGKNSLPQAQARRLCEERPRGDLLSLGPFTFQPLGLGDPRRHRGPDFLLGPTHLFN

SEQ ID NO: 4026 - protein, 211 aa, Homo sapiens
MTTETFVKDIKPGLKNLNLIFIVLETGRVTKTKDGHEVRTCKVADKTGSINISVWDDVGNLIQPGDIIRLTKGYASVFKGCLTLYTGRGGDLQKIGEFCMVYSEVPNFSEPNPEYSTQQAPNKAVQNDSNPSASQPTTGPSAASPASENQNGNGLSAPPGPGGGPHPPHTPSHPPSTRITRSQPNHTPAGPPGPSSNPVSNGKETRRSSKR

SEQ ID NO: 4027 - protein, 112 aa, Homo sapiens
MVYSEVPNFSEPNPEYSTQQAPNKAVQNDSNPSASQPTTGPSAASPASENQNGNGLSAPPGPGGGPHPPHTPSHPPSTRITRSQPNHTPAGPPGPSSNPVSNGKETRRSSKR

SEQ ID NO: 4028 - protein, 467 aa, Homo sapiens
MHSTTPISSLFSFTSPAVKRLLGWKQGDEEEKWAEKAVDSLVKKLKKKKGAMDELERALSCPGQPSKCVTIPRSLDGRLQVSHRKGLPHVIYCRVWRWPDLQSHHELKPLECCEFPFGSKQKEVCINPYHYRRVETPVLPPVLVPRHSEYNPQLSLLAKFRSASLHSEPLMPHNATYPDSFQQPPCSALPPSPSHAFSQSPCTASYPHSPGSPSEPESPYQHSVDTPPLPYHATEASETQSGQPVDATADRHVVLSIPNGDFRPVCYEEPQHWCSVAYYELNNRVGETFQASSRSVLIDGFTDPSNNRNRFCLGLLSNVNRNSTIENTRRHIGKGVHLYYVGGEVYAECVSDSSIFVQSRNCNYQHGFHPATVCKIPSGCSLKVFNNQLFAQLLAQSVHHGFEVVYELTKMCTIRMSFVKGWGAEYHRQDVTSTPCWIEIHLHGPLQWLDKVLTQMGSPHNPISSVS

SEQ ID NO: 4029 - protein, 430 aa, Homo sapiens
MHSTTPISSLFSFTSPAVKRLLGWKQGDEEEKWAEKAVDSLVKKLKKKKGAMDELERALSCPGQPSKCVTIPRSLDGRLQVSHRKGLPHVIYCRVWRWPDLQSHHELKPLECCEFPFGSKQKEVCINPYHYRRVETPVLPPVLVPRHSEYNPQLSLLAKFRSASLHSEPLMPHNATYPDSFQQPPCSALPPSPSHAFSQSPCTASYPHSPGSPSEPESPYQHSDFRPVCYEEPQHWCSVAYYELNNRVGETFQASSRSVLIDGFTDPSNNRNRFCLGLLSNVNRNSTIENTRRHIGKGVHLYYVGGEVYAECVSDSSIFVQSRNCNYQHGFHPATVCKIPSGCSLKVFNNQLFAQLLAQSVHHGFEVVYELTKMCTIRMSFVKGWGAEYHRQDVTSTPCWIEIHLHGPLQWLDKVLTQMGSPHNPISSVS

SEQ ID NO: 4030 - protein, 631 aa, Homo sapiens
MNSSDEEKQLQLITSLKEQAIGEYEDLRAENQKTKEKCDKIRQERDEAVKKLEEFQKISHMVIEEVNFMQNHLEIEKTCRESAEALATKLNKENKTLKRISMLYMAKLGPDVITEEINIDDEDSTTDTDGAAETCVSVQCQKQIKELRDQIVSVQEEKKILAIELENLKSKLVEVIEEVNKVKQEKTVLNSEVLEQRKVLEKCNRVSMLAVEEYEEMQVNLELEKDLRKKAESFAQEMFIEQNKLKRQSHLLLQSSIPDQQLLKALDENAKLTQQLEEERIQHQQKVKELEEQLENETLHKEIHNLKQQLELLEEDKKELELKYQNSEEKARNLKHSVDELQKRVNQSENSVPPPPPPPPPLPPPPPNPIRSLMSMIRKRSHPSGSGAKKEKATQPETTEEVTDLKRQAVEEMMDRIKKGVHLRPVNQTARPKTKPESSKGCESAVDELKGILGTLNKSTSSRSLKSLDPENSETELERILRRRKVTAEADSSSPTGILATSESKSMPVLGSVSSVTKTALNKKTLEAEFNSPSPPTPEPGEGPRKLEGCTSSKVTFQPPSSIGCRKKYIDGEKQAEPVVVLDPVSTHEPQTKDQVAEKDPTQHKEDEGEIQPENKEDSIENVRETDSSNC

SEQ ID NO: 4031 - protein, 456 aa, Homo sapiens
MNSSDEEKQLQLITSLKEQAIGEYEDLRAENQKTKEKCDKIRQERDEAVKKLEEFQKISHMVIEEVNFMQNHLEIEKTCRESAEALATKLNKENKTLKRISMLYMAKLGPDVITEEINIDDEDSTTDTDGAAETCVSVQCQKQIKELRDQIVSVQEEKKILAIELENLKSKLVEVIEEVNKVKQEKTVLNSEVLEQRKVLEKCNRVSMLAVEEYEEMQVNLELEKDLRKKAESFAQEMFIEQNKLKRQSHLLLQSSIPDQQLLKALDENAKLTQQLEEERIQHQQKVKELEEQLENETLHKEIHNLKQQLELLEEDKKELELKYQNSEEKARNLKHSVDELQKRVNQSENSVPPPPPPPPPLPPPPPNPIRSLMSMIRKRSHPSGSGAKKEKATQPETTEEVTDLKRQAVEEMMDRIKKGVHLRPVNQTARPKTKPESSKGCESAVDELKGILASQ

SEQ ID NO: 4032 - protein, 649 aa, Homo sapiens
MNSSDEEKQLQLITSLKEQAIGEYEDLRAENQKTKEKCDKIRQERDEAVKKLEEFQKISHMVIEEVNFMQNHLEIEKTCRESAEALATKLNKENKTLKRISMLYMAKLGPDVITEEINIDDEDSTTDTDGAAETCVSVQCQKQIKELRDQIVSVQEEKKILAIELENLKSKLVEVIEEVNKVKQEKTVLNSEVLEQRKVLEKCNRVSMLAVEEYEEMQVNLELEKDLRKKAESFAQEMFIEQNKLKRQSHLLLQSSIPDQQLLKALDENAKLTQQLEEERIQHQQKVKELEEQLENETLHKEIHNLKQQLELLEEDKKELELKYQNSEEKARNLKHSVDELQKRVNQSENSVPPPPPPPPPLPPPPPNPIRSLMSMIRKRSHPSGSGAKKEKATQPETTEEVTDLKRQAVEEMMDRIKKGVHLRPVNQTARPKTKPESSKGCESAVDELKGILGTLNKSTSSRSLKSLDPENSETELERILRRRKVTAEADSSSPTGILATSESKSMPVLGSVSSVTKTALNKKTLEAEFNSPSPPTPEPGEGPRKLEGCTSSKVTFQPPSSIGCRKKYIDGEKQAEPVVVLDPVSTHEPQTKDQVAEKDPTQHKEDEGEIQPENKEDSIENFFPFHFGFEGVLPLAGVTLSTKARDPK

SEQ ID NO: 4033 - protein, 558 aa, Homo sapiens
MNSSDEEKQLQLITSLKEQAIGEYEDLRAENQKTKEKCDKIRQERDEAVKKLEEFQKISHMVIEEVNFMQNHLEIEKTCRESAEALATKLNKENKTLKRISMLYMAKLGPDVITEEINIDDEDSTTDTDGAAETCVSVQCQKQIKELRDQIVSVQEEKKILAIELENLKSKLVEVIEEVNKVKQEKTVLNSEVLEQRKVLEKCNRVSMLAVEEYEEMQVNLELEKDLRKKAESFAQEMFIEQNKLKRQSHLLLQSSIPDQQLLKALDENAKLTQQLEEERIQHQQKVKELEEQLENETLHKEIHNLKQQLELLEEDKKELELKYQNSEEKARNLKHSVDELQKRVNQSENSVPPPPPPPPPLPPPPPNPIRSLMSMIRKRSHPSGSGAKKEKATQPETTEEVTDLKRQAVEEMMDRIKKGVHLRPVNQTARPKTKPESSKGCESAVDELKGILGTLNKSTSSRSLKSLDPENSETELERILRRRKVTAEADSSSPTGILATSESKSMPVLGSVSSVTKTALNKKTLEAEFNSPSPPTPEPGEGPRKLEGCTSSKVTFQ

SEQ ID NO: 4034 - protein, 571 aa, Homo sapiens
MVIEEVNFMQNHLEIEKTCRESAEALATKLNKENKTLKRISMLYMAKLGPDVITEEINIDDEDSTTDTDGAAETCVSVQCQKQIKELRDQIVSVQEEKKILAIELENLKSKLVEVIEEVNKVKQEKTVLNSEVLEQRKVLEKCNRVSMLAVEEYEEMQVNLELEKDLRKKAESFAQEMFIEQNKLKRQSHLLLQSSIPDQQLLKALDENAKLTQQLEEERIQHQQKVKELEEQLENETLHKEIHNLKQQLELLEEDKKELELKYQNSEEKARNLKHSVDELQKRVNQSENSVPPPPPPPPPLPPPPPNPIRSLMSMIRKRSHPSGSGAKKEKATQPETTEEVTDLKRQAVEEMMDRIKKGVHLRPVNQTARPKTKPESSKGCESAVDELKGILGTLNKSTSSRSLKSLDPENSETELERILRRRKVTAEADSSSPTGILATSESKSMPVLGSVSSVTKTALNKKTLEAEFNSPSPPTPEPGEGPRKLEGCTSSKVTFQPPSSIGCRKKYIDGEKQAEPVVVLDPVSTHEPQTKDQVAEKDPTQHKEDEGEIQPENKEDSIENVRETDSSNC

SEQ ID NO: 4035 - protein, 601 aa, Homo sapiens
MPRILKQCDKIRQERDEAVKKLEEFQKISHMVIEEVNFMQNHLEIEKTCRESAEALATKLNKENKTLKRISMLYMAKLGPDVITEEINIDDEDSTTDTDGAAETCVSVQCQKQIKELRDQIVSVQEEKKILAIELENLKSKLVEVIEEVNKVKQEKTVLNSEVLEQRKVLEKCNRVSMLAVEEYEEMQVNLELEKDLRKKAESFAQEMFIEQNKLKRQSHLLLQSSIPDQQLLKALDENAKLTQQLEEERIQHQQKVKELEEQLENETLHKEIHNLKQQLELLEEDKKELELKYQNSEEKARNLKHSVDELQKRVNQSENSVPPPPPPPPPLPPPPPNPIRSLMSMIRKRSHPSGSGAKKEKATQPETTEEVTDLKRQAVEEMMDRIKKGVHLRPVNQTARPKTKPESSKGCESAVDELKGILGTLNKSTSSRSLKSLDPENSETELERILRRRKVTAEADSSSPTGILATSESKSMPVLGSVSSVTKTALNKKTLEAEFNSPSPPTPEPGEGPRKLEGCTSSKVTFQPPSSIGCRKKYIDGEKQAEPVVVLDPVSTHEPQTKDQVAEKDPTQHKEDEGEIQPENKEDSIENVRETDSSNC

SEQ ID NO: 4036 - protein, 219 aa, Homo sapiens
MMDRIKKGVHLRPVNQTARPKTKPESSKGCESAVDELKGILGTLNKSTSSRSLKSLDPENSETELERILRRRKVTAEADSSSPTGILATSESKSMPVLGSVSSVTKTALNKKTLEAEFNSPSPPTPEPGEGPRKLEGCTSSKVTFQPPSSIGCRKKYIDGEKQAEPVVVLDPVSTHEPQTKDQVAEKDPTQHKEDEGEIQPENKEDSIENVRETDSSNC

SEQ ID NO: 4037 - protein, 498 aa, Homo sapiens
MVIEEVNFMQNHLEIEKTCRESAEALATKLNKENKTLKRISMLYMAKLGPDVITEEINIDDEDSTTDTDGAAETCVSVQCQKQIKELRDQIVSVQEEKKILAIELENLKSKLVEVIEEVNKVKQEKTVLNSEVLEQRKVLEKCNRVSMLAVEEYEEMQVNLELEKDLRKKAESFAQEMFIEQNKLKRQSHLLLQSSIPDQQLLKALDENAKLTQQLEEERIQHQQKVKELEEQLENETLHKEIHNLKQQLELLEEDKKELELKYQNSEEKARNLKHSVDELQKRVNQSENSVPPPPPPPPPLPPPPPNPIRSLMSMIRKRSHPSGSGAKKEKATQPETTEEVTDLKRQAVEEMMDRIKKGVHLRPVNQTARPKTKPESSKGCESAVDELKGILGTLNKSTSSRSLKSLDPENSETELERILRRRKVTAEADSSSPTGILATSESKSMPVLGSVSSVTKTALNKKTLEAEFNSPSPPTPEPGEGPRKLEGCTSSKVTFQ

SEQ ID NO: 4038 - protein, 359 aa, Homo sapiens
MPLELELCPGRWVGGQHPCFIIAEIGQNHQGDLDVAKRMIRMAKECGADCAKFQKSELEFKFNRKALERPYTSKHSWGKTYGEHKRHLEFSHDQYRELQRYAEEVGIFFTASGMDEMAVEFLHELNVPFFKVGSGDTNNFPYLEKTAKKGRPMVISSGMQSMDTMKQVYQIVKPLNPNFCFLQCTSAYPLQPEDVNLRVISEYQKLFPDIPIGYSGHETGIAISVAAVALGAKVLERHITLDKTWKGSDHSASLEPGELAELVRSVRLVERALGSPTKQLLPCEMACNEKLGKSVVAKVKIPEGTILTMDMLTVKVGEPKGYPPEDIFNLVGKKVLVTVEEDDTIMEELVDNHGKKIKS

SEQ ID NO: 4039 - protein, 718 aa, Homo sapiens
MMFRDQVGVLAGWFKGWNECEQTVALLSLLKRVSQTQARFLQLCLEHSLADCAELHVLEREANSPGIINQWQQESKDKVISLLLTHLPLLKPGNLDAKVEYMKLLPKILAHSIEHNQHIEESRQLLSYALIHPATSLEDRSALAMWLNHLEDRTSTSFGGQNRGRSDSVDYGQTHYYHQRQNSDDKLNGWQNSRDSGICINASNWQDKSMGCENGHVPLYSSSSVPTTINTIGTSTSTILSGQAHHSPLKRSVSLTPPMNVPNQPLGHGWMSHEDLRARGPQCLPSDHAPLSPQSSVASSGSGGSEHLEDQTTARNTFQEEGSGMKDVPAWLKSLRLHKYAALFSQMTYEEMMALTECQLEAQNVTKGARHKIVISIQKLKERQNLLKSLERDIIEGGSLRIPLQELHQMILTPIKAYSSPSTTPEARRREPQAPRQPSLMGPESQSPDCKDGAAATGATATPSAGASGGLQPHQLSSCDGELAVAPLPEGDLPGQFTRVMGKVCTQLLVSRPDEENISSYLQLIDKCLIHEAFTETQKKRLLSWKQQVQKLFRSFPRKTLLDISGYRQQRNRGFGQSNSLPTAGSVGGGMGRRNPRQYQIPSRNVPSARLGLLGTSGFVSSNQRNTTATPTIMKQGRQNLWFANPGGSNSMPSRTHSSVQRTRSLPVHTSPQNMLMFQQPEFQLPVTEPDINNRLESLCLSMTEHALGDGVDRTSTI

SEQ ID NO: 4040 - protein, 617 aa, Homo sapiens
MKLLPKILAHSIEHNQHIEESRQLLSYALIHPATSLEDRSALAMWLNHLEDRTSTSFGGQNRGRSDSVDYGQTHYYHQRQNSDDKLNGWQNSRDSGICINASNWQDKSMGCENGHVPLYSSSSVPTTINTIGTSTSTILSGQAHHSPLKRSVSLTPPMNVPNQPLGHGWMSHEDLRARGPQCLPSDHAPLSPQSSVASSGSGGSEHLEDQTTARNTFQEEGSGMKDVPAWLKSLRLHKYAALFSQMTYEEMMALTECQLEAQNVTKGARHKIVISIQKLKERQNLLKSLERDIIEGGSLRIPLQELHQMILTPIKAYSSPSTTPEARRREPQAPRQPSLMGPESQSPDCKDGAAATGATATPSAGASGGLQPHQLSSCDGELAVAPLPEGDLPGQFTRVMGKVCTQLLVSRPDEENISSYLQLIDKCLIHEAFTETQKKRLLSWKQQVQKLFRSFPRKTLLDISGYRQQRNRGFGQSNSLPTAGSVGGGMGRRNPRQYQIPSRNVPSARLGLLGTSGFVSSNQRNTTATPTIMKQGRQNLWFANPGGSNSMPSRTHSSVQRTRSLPVHTSPQNMLMFQQPEFQLPVTEPDINNRLESLCLSMTEHALGDGVDRTSTI

SEQ ID NO: 4041 - protein, 630 aa, Homo sapiens
MMFRDQVGVLAGWFKGWNECEQTVALLSLLKRVSQTQARFLQLCLEHSLADCAELHVLEREANSPGIINQWQQESKDKVISLLLTHLPLLKPGNLDAKVEYMKLLPKILAHSIEHNQHIEESRQLLSYALIHPATSLEDRSALAMWLNHLEDRTSTSFGGQNRGRSDSVDYGQTHYYHQRQNSDDKLNGWQNSRDSGICINASNWQDKSMGCENGHVPLYSSSSVPTTINTIGTSTSTNVPAWLKSLRLHKYAALFSQMTYEEMMALTECQLEAQNVTKGARHKIVISIQKLKERQNLLKSLERDIIEGGSLRIPLQELHQMILTPIKAYSSPSTTPEARRREPQAPRQPSLMGPESQSPDCKDGAAATGATATPSAGASGGLQPHQLSSCDGELAVAPLPEGDLPGQFTRVMGKVCTQLLVSRPDEENISSYLQLIDKCLIHEAFTETQKKRLLSWKQQVQKLFRSFPRKTLLDISGYRQQRNRGFGQSNSLPTAGSVGGGMGRRNPRQYQIPSRNVPSARLGLLGTSGFVSSNQRNTTATPTIMKQGRQNLWFANPGGSNSMPSRTHSSVQRTRSLPVHTSPQNMLMFQQPEFQLPVTEPDINNRLESLCLSMTEHALGDGVDRTSTI

SEQ ID NO: 4042 - protein, 204 aa, Homo sapiens
MNRVNDPLIFIRDIKPGLKNLNVVFIVLEIGRVTKTKDGHEVRSCKVADKTGSITISVWDEIGGLIQPGDIIRLTRGYASMWKGCLTLYTGRGGELQKIGEFCMVYSEVPNFSEPNPDYRGQQNKGAQSEQKNNSMNSNMGTGTFGPVGNGVHTGPESREHQFSHAGRSNGRGLINPQLQGTASNQTVMTTISNGRDPRRAFKR

SEQ ID NO: 4043 - protein, 124 aa, Homo sapiens
MWKGCLTLYTGRGGELQKIGEFCMVYSEVPNFSEPNPDYRGQQNKGAQSEQKNNSMNSNMGTGTFGPVGNGVHTGPESREHQFSHAGRSNGRGLINPQLQGTASNQTVMTTISNGRDPRRAFKR

SEQ ID NO: 4044 - protein, 134 aa, Homo sapiens
MNRVNDPLIFIRDIKPGLKNLNVVFIVLEIGRVTKTKDGHEVRSCKVADKTGSITISVWDEIGGLIQPGDIIRLTRGYASMWKGCLTLYTGRGGELQKIGDLGAVQAAAMRDSIHYYPGNDLHPDLEEPSSLGV

SEQ ID NO: 4045 - protein, 406 aa, Homo sapiens
MIHTNLKKKFSCCVLVFLLFAVICVWKEKKKGSYYDSFKLQTKEFQVLKSLGKLAMGSDSQSVSSSSTQDPHRGRQTLGSLRGLAKAKPEASFQVWNKDSSSKNLIPRLQKIWKNYLSMNKYKVSYKGPGPGIKFSAEALRCHLRDHVNVSMVEVTDFPFNTSEWEGYLPKESIRTKAGPWGRCAVVSSAGSLKSSQLGREIDDHDAVLRFNGAPTANFQQDVGTKTTIRLMNSQLVTTEKRFLKDSLYNEGILIVWDPSVYHSDIPKWYQNPDYNFFNNYKTYRKLHPNQPFYILKPQMPWELWDILQEISPEEIQPNPPSSGMLGIIIMMTLCDQVDIYEFLPSKRKTDVCYYYQKFFDSACTMGAYHPLLYEKNLVKHLNQGTDEDIYLLGKATLPGFRTIHC

SEQ ID NO: 4046 - protein, 175 aa, Homo sapiens
MNSQLVTTEKRFLKDSLYNEGILIVWDPSVYHSDIPKWYQNPDYNFFNNYKTYRKLHPNQPFYILKPQMPWELWDILQEISPEEIQPNPPSSGMLGIIIMMTLCDQVDIYEFLPSKRKTDVCYYYQKFFDSACTMGAYHPLLYEKNLVKHLNQGTDEDIYLLGKATLPGFRTIHC

SEQ ID NO: 4047 - protein, 331 aa, Homo sapiens
MEELTAFVSKSFDQKVKEKKEAITYREVLESGPLRGAKEPTGCTEAGRDDRSSPAVRAAGGGGGGGGGGGGGGGGGGVGGGGAGGGAGGGRSPVRELDMGAAERSREPGSPRLTEVSPELKDRKEDAKGMEDEGQTKIKQRRSRTNFTLEQLNELERLFDETHYPDAFMREELSQRLGLSEARVQVWFQNRRAKCRKQENQLHKGVLIGAASQFEACRVAPYVNVGALRMPFQQDSHCNVTPLSFQVQAQLQLDSAVAHAHHHLHPHLAAHAPYMMFPAPPFGLPLATLAADSASAASVVAAAAAAKTTSKNSSIADLRLKAKKHAAALGL

SEQ ID NO: 4048 - protein, 319 aa, Homo sapiens
MEELTAFVSKSFDQKVKEKKEAITYREVLESGPLRGAKEPTGCTEAGRDDRSSPAVRAAGGGGGGGGGGGGGGGGGGVGGGGAGGGAGGGRSPVRELDMGAAERSREPGSPRLTEVSPELKDRKEDAKGMEDEGQTKIKQRRSRTNFTLEQLNELERLFDETHYPDAFMREELSQRLGLSEARVQVWFQNRRAKCRKQENQLHKGVLIGAASQFEACRVAPYVNVGALRMPFQQVQAQLQLDSAVAHAHHHLHPHLAAHAPYMMFPAPPFGLPLATLAADSASAASVVAAAAAAKTTSKNSSIADLRLKAKKHAAALGL

SEQ ID NO: 4049 - protein, 355 aa, Homo sapiens
MEELTAFVSKSFDQKVKEKKEAITYREVLESGPLRGAKEPTGCTEAGRDDRSSPAVRAAGGGGGGGGGGGGGGGGGGVGGGGAGGGAGGGRSPVRELDMGAAERSREPGSPRLTEGRRKPTKAEVQATLLLPGEAFRFLVSPELKDRKEDAKGMEDEGQTKIKQRRSRTNFTLEQLNELERLFDETHYPDAFMREELSQRLGLSEARVQVWFQNRRAKCRKQENQLHKGVLIGAASQFEACRVAPYVNVGALRMPFQQDSHCNVTPLSFQVQAQLQLDSAVAHAHHHLHPHLAAHAPYMMFPAPPFGLPLATLAADSASAASVVAAAAAAKTTSKNSSIADLRLKAKKHAAALGL

SEQ ID NO: 4050 - protein, 206 aa, Homo sapiens
MLPPAIHFYLLPLACILMKSCLAFKNDATEILYSHVVKPVPAHPSSNSTLNQARNGGRHFSNTGLDRNTRVQVGCRELRSTKYISDGQCTSISPLKELVCAGECLPLPVLPNWIGGGYGTKYWSRRSSQEWRCVNDKTRTQRIQLQCQDGSTRTYKITVVTACKCKRYTRQHNESSHNFESMSPAKPVQHHRERKRASKSSKHSMS

SEQ ID NO: 4051 - protein, 230 aa, Homo sapiens
MLPPAIHFYLLPLACILMKSCLAFKNDATEILYSHVVKPVPAHPSSNSTLNQARNGGRHFSNTGLDRNRTESLTRQNYFWLFPGAFLRQLQEARVQVGCRELRSTKYISDGQCTSISPLKELVCAGECLPLPVLPNWIGGGYGTKYWSRRSSQEWRCVNDKTRTQRIQLQCQDGSTRTYKITVVTACKCKRYTRQHNESSHNFESMSPAKPVQHHRERKRASKSSKHSMS

SEQ ID NO: 4052 - protein, 694 aa, Homo sapiens
MMFRDQVGILAGWFKGWNECEQTVALLSLLKRVTRTQARFLQLCLEHSLADCNDIHLLESEANSAAIVSQWQQESKEKVVSLLLSHLPLLQPGNTEAKSEYMRLLQKVLAYSIESNAFIEESRQLLSYALIHPATTLEDRNALALWLSHLEERLASGFRSRPEPSYHSRQGSDEWGGPAELGPGEAGPGWQDKPPRENGHVPFHPSSSVPPAINSIGSNANTGLPCQIHPSPLKRSMSLIPTSPQVPGEWPSPEELGARAAFTTPDHAPLSPQSSVASSGSEQTEEQGSSRNTFQEDGSGMKDVPSWLKSLRLHKYAALFSQMSYEEMMTLTEQHLESQNVTKGARHKIALSIQKLRERQSVLKSLEKDVLEGGNLRNALQELQQIIITPIKAYSVLQATVAAATTTPTAKDGAPGEPPLPGAEPPLAHPGTDKGTEAKDPPAVENYPPPPAPAPTDGSEPAPAPVADGDIPSQFTRVMGKVCTQLLVSRPDEENITSYLQLIEKCLTHEAFTETQKKRLLSWKQQVLKLLRTFPRKAALEMQNYRQQKGWAFGSNSLPIAGSVGMGVARRTQRQFPMPPRALPPGRMGLLSPSGIGGVSPRHALTSPSLGGQGRQNLWFANPGGSNSMPSQSRSSVQRTHSLPVHSSPQAILMFPPDCPVPGPDLEINPTLESLCLSMTEHALGDGTDKTSTI

SEQ ID NO: 4053 - protein, 292 aa, Homo sapiens
MEELTAFVSKSFDQKSKDGNGGGGGGGGKKDSITYREVLESGLARSRELGTSDSSLQDITEGGGHCPVHLFKDHVDNDKEKLKEFGTARVAEGIYECKEKREDVKSEDEDGQTKLKQRRSRTNFTLEQLNELERLFDETHYPDAFMREELSQRLGLSEARVQVWFQNRRAKCRKQENQMHKGVILGTANHLDACRVAPYVNMGALRMPFQQVQAQLQLEGVAHAHPHLHPHLAAHAPYLMFPPPPFGLPIASLAESASAAAVVAAAAKSNSKNSSIADLRLKARKHAEALGL

SEQ ID NO: 4054 - protein, 225 aa, Homo sapiens
MEELTAFVSKSFDQKSKDGNGGGGGGGGKKDSITYREVLESGLARSRELGTSDSSLQDITEGGGHCPVHLFKDHVDNDKEKLKEFGTARVAEGIYECKEKREDVKSEDEDGQTKLKQRRSRTNFTLEQLNELERLFDETHYPDAFMREELSQRLGLSEARVQVWFQNRRAKCRKQENQMHKGVILGTANHLDACRVAPYVNMGALRMPFQQMEFCSCRPGWSIMA

SEQ ID NO: 4055 - protein, 653 aa, Homo sapiens
MASGSKASVPADSFRTISPDRRGEKSASAVSGDTAAATTLKGTAIPVRSVVASPRPVKGKAGRETARLRLQRLPAAQAEDTGEAAAAAAEEPLLPVPEDEEEAQPLPPVCVSRMRGMWRDEKVSLYCDEVLQDCKAEDADEVMGKYLSEKLKLKDKWLGVWKTNPSVFFVKYEEASIPFVGILVEVTCEPYQDSSSRFKVTVSVAEPFSSNIANIPRDLVDEILEELEHSVPLLEVYPVEGQDTDIHVIALALEVVRFFYDFLWRDWDDEESCENYTALIEERINLWCDIQDGTIPGPIAQRFKKTLEKYKNKRVELIEYQSNIKEDPSAAEAVECWKKYYEIVMLCGLLKMWEDLRLRVHGPFFPRILRRRKGKREFGKTITHIVAKMMTTEMIKDLSSDTLLQQHGDLDLALDNCYSGDTVIIFPGEYQAANLALLTDDIIIKGVGKREEIMITSEPSRDSFVVSKADNVKLMHLSLIQQGTVDGIVVVESGHMTLENCILKCEGTGVCVLTGAALTITDSEITGAQGAGVELYPGSIAILERNEIHHCNNLRTSNSSKSTLGGVNMKVLPAPKLKMTNNHIYSNKGYGVSILQPMEQFFIVAEEALNKRASSGDKKDDKMLFKVMQNLNLEMNNNKIEANVKGDIRIVTS

SEQ ID NO: 4056 - protein, 534 aa, Homo sapiens
MGFLQLVRLDSNSRPQAEDADEVMGKYLSEKLKLKDKWLGVWKTNPSVFFVKYEEASIPFVGILVEVTCEPYQDSSSRFKVTVSVAEPFSSNIANIPRDLVDEILEELEHSVPLLEVYPVEGQDTDIHVIALALEVVRFFYDFLWRDWDDEESCENYTALIEERINLWCDIQDGTIPGPIAQRFKKTLEKYKNKRVELIEYQSNIKEDPSAAEAVECWKKYYEIVMLCGLLKMWEDLRLRVHGPFFPRILRRRKGKREFGKTITHIVAKMMTTEMIKDLSSDTLLQQHGDLDLALDNCYSGDTVIIFPGEYQAANLALLTDDIIIKGVGKREEIMITSEPSRDSFVVSKADNVKLMHLSLIQQGTVDGIVVVESGHMTLENCILKCEGTGVCVLTGAALTITDSEITGAQGAGVELYPGSIAILERNEIHHCNNLRTSNSSKSTLGGVNMKVLPAPKLKMTNNHIYSNKGYGVSILQPMEQFFIVAEEALNKRASSGDKKDDKMLFKVMQNLNLEMNNNKIEANVKGDIRIVTS

SEQ ID NO: 4057 - protein, 149 aa, Homo sapiens
MASGSKASVPADSFRTISPDRRGEKSASAVSGDTAAATTLKGTAIPVRSVVASPRPVKGKAGRETARLRLQRLPAAQAEDTGEAAAAAAEEPLLPVPEDEEEAQPLPPVCVSRMRGMWRDEKVSLYCDEVLQDCKKMLMKLWVNTYQKN

SEQ ID NO: 4058 - protein, 97 aa, Homo sapiens
MTSLLTTPSPREELMTTPILQPTEALSPEDGASTALIAVVITVVFLTLLSVVILIFFYLYKNKGSYVTYEPTEGEPSAIVQMESDLAKGSEKEEYFI

SEQ ID NO: 4059 - protein, 783 aa, Homo sapiens
MVIMSEFSADPAGQGQGQQKPLRVGFYDIERTLGKGNFAVVKLARHRVTKTQVAIKIIDKTRLDSSNLEKIYREVQLMKLLNHPHIIKLYQVMETKDMLYIVTEFAKNGEMFDYLTSNGHLSENEARKKFWQILSAVEYCHDHHIVHRDLKTENLLLDGNMDIKLADFGFGNFYKSGEPLSTWCGSPPYAAPEVFEGKEYEGPQLDIWSLGVVLYVLVCGSLPFDGPNLPTLRQRVLEGRFRIPFFMSQDCESLIRRMLVVDPARRITIAQIRQHRWMRAEPCLPGPACPAFSAHSYTSNLGDYDEQALGIMQTLGVDRQRTVESLQNSSYNHFAAIYYLLLERLKEYRNAQCARPGPARQPRPRSSDLSGLEVPQEGLSTDPFRPALLCPQPQTLVQSVLQAEMDCELQSSLQWPLFFPVDASCSGVFRPRPVSPSSLLDTAISEEARQGPGLEEEQDTQESLPSSTGRRHTLAEVSTRLSPLTAPCIVVSPSTTASPAEGTSSDSCLTFSASKSPAGLSGTPATQGLLGACSPVRLASPFLGSQSATPVLQAQGGLGGAVLLPVSFQEGRRASDTSLTQGLKAFRQQLRKTTRTKGFLGLNKIKGLARQVCQVPASRASRGGLSPFHAPAQSPGLHGGAAGSREGWSLLEEVLEQQRLLQLQHHPAAAPGCSQAPQPAPAPFVIAPCDGPGAAPLPSTLLTSGLPLLPPPLLQTGASPVASAAQLLDTHLHIGTGPTALPAVPPPRLARLAPGCEPLGLLQGDCEMEDLMPCSLGTFVLVQ

SEQ ID NO: 4060 - protein, 529 aa, Homo sapiens
MKPHLKQWRQRMLFGIFAWGLLFLLIFIYFTDSNPAEPVPSSLSFLETRRLLPVQGKQRAIMGAAHEPSPPGGLDARQALPRAHPAGSFHAGPGDLQKWAQSQDGFEHKEFFSSQVGRKSQSAFYPEDDDYFFAAGQPGWHSHTQGTLGFPSPGEPGPREGAFPAAQVQRRRVKKRHRRQRRSHVLEEGDDGDRLYSSMSRAFLYRLWKGNVSSKMLNPRLQKAMKDYLTANKHGVRFRGKREAGLSRAQLLCQLRSRARVRTLDGTEAPFSALGWRRLVPAVPLSQLHPRGLRSCAVVMSAGAILNSSLGEEIDSHDAVLRFNSAPTRGYEKDVGNKTTIRIINSQILTNPSHHFIDSSLYKDVILVAWDPAPYSANLNLWYKKPDYNLFTPYIQHRQRNPNQPFYILHPKFIWQLWDIIQENTKEKIQPNPPSSGFIGILIMMSMCREVHVYEYIPSVRQTELCHYHELYYDAACTLGAYHPLLYEKLLVQRLNMGTQGDLHRKGKVVLPGFQAVHCPAPSPVIPHS

SEQ ID NO: 4061 - protein, 466 aa, Homo sapiens
MKPHLKQWRQRMLFGIFAWGLLFLLIFIYFTDSNPAEPVPSSLSFLETRRLLPVQGKQRAIMGAAHEPSPPGGLDARQALPRAHPAGSFHAGPGDLQKWAQSQDGFEHKEFFSSQVGRKSQSAFYPEDDDYFFAAGQPGWHSHTQGTLGFPSPGEPGPREGAFPAAQVQRRRVKKRHRRQRRSHVLEEGDDGDRLYSSMSRAFLYRLWKGNVSSKMLNPRLQKAMKDYLTANKHGVRFRGKREAGLSRAQLLCQLRSRARVRTLDGTEAPFSALGWRRLVPAVPLSQLHPRGLRSCAVVMSAGAILNSSLGEEIDSHDAVLRFNSAPTRGYEKDVGNKTTIRIINSQILTNPSHHFIDSSLYKDVILVAWDPAPYSANLNLWYKKPDYNLFTPYIQHRQRNPNQPFYILHPKFIWQLWDIIQENTKEKIQPNPPSSGFIGSFVKIGHIRACSEPRSRDCTPAWTTE

SEQ ID NO: 4062 - protein, 783 aa, Homo sapiens
MVIMSEFSADPAGQGQGQQKPLRVGFYDIERTLGKGNFAVVKLARHRVTKTQVAIKIIDKTRLDSSNLEKIYREVQLMKLLNHPHIIKLYQVMETKDMLYIVTEFAKNGEMFDYLTSNGHLSENEARKKFWQILSAVEYCHDHHIVHRDLKTENLLLDGNMDIKLADFGFGNFYKSGEPLSTWCGSPPYAAPEVFEGKEYEGPQLDIWSLGVVLYVLVCGSLPFDGPNLPTLRQRVLEGRFRIPFFMSQDCESLIRRMLVVDPARRITIAQIRQHRWMRAEPCLPGPACPAFSAHSYTSNLGDYDEQALGIMQTLGVDRQRTVESLQNSSYNHFAAIYYLLLERLKEYRNAQCARPGPARQPRPRSSDLSGLEVPQEGLSTDPFRPALLCPQPQTLVQSVLQAEMDCELQSSLQWPLFFPVDASCSGVFRPRPVSPSSLLDTAISEEARQGPGLEEEQDTQESLPSSTGRRHTLAEVSTRLSPLTAPCIVVSPSTTASPAEGTSSDSCLTFSASKSPAGLSGTPATQGLLGACSPVRLASPFLGSQSATPVLQAQGGLGGAVLLPVSFQEGRRASDTSLTQGLKAFRQQLRKTTRTKGFLGLNKIKGLARQVCQAPASRASRGGLSPFHAPAQSPGLHGGAAGSREGWSLLEEVLEQQRLLQLQHHPAAAPGCSQAPQPAPAPFVIAPCDGPGAAPLPSTLLTSGLPLLPPPLLQTGASPVASAAQLLDTHLHIGTGPTALPAVPPPRLARLAPGCEPLGLLQGDCEMEDLMPCSLGTFVLVQ

SEQ ID NO: 4063 - protein, 95 aa, Homo sapiens
MGCMKSKQTFPFPTIYEGEKQHESEEPFMPEERCLPRMASPVNVKEEVKEPPGTNTVILEYAHRLSQDILCDALQQWACNNIKYHDIPYIESEGP

SEQ ID NO: 4064 - protein, 478 aa, Homo sapiens
MAARPITLGIDLGTTSVKAALLRAAPDDPSGFAVLASCARAARAEAAVESAVAGPQGREQDVSRILQALHECLAALPRPQLRSVVGIGVSGQMHGVVFWKTGQGCEWTEGGITPVFEPRAVSHLVTWQDGRCSSEFLASLPQPKSHLSVATGFGCATIFWLLKYRPEFLKSYDAAGTIHDYVVAMLCGLPRPLMSDQNAASWGYFNTQSQSWNVETLRSSGFPVHLLPDIAEPGSVAGRTSHMWFEIPKGTQVGVALGDLQASVYSCMAQRTDAVLNISTSVQLAASMPSGFQPAQTPDPTAPVAYFPYFNRTYLGVAASLNGGNVLATFVHMLVQWMADLGLEVEESTVYSRMIQAAVQQRDTHLTITPTVLGERHLPDQLASVTRISSSDLSLGHVTRALCRGIVQNLHSMLPIQQLQDWGVERVMGSGSALSRNDVLKQEVQRAFPLPMSFGQDVDAAVGAALVMLRRHLNQKES

SEQ ID NO: 4065 - protein, 104 aa, Homo sapiens
MAANSSGQGFQNKNRVAILAELDKEKRKLLMQNQSSTNHPGASIALSRPSLNKDFRDHAEQQHIAAQQKAALQHAHAHSSGYFITQDSAFGNLILPVLPRLDPE

SEQ ID NO: 4066 - protein, 44 aa, Homo sapiens
MAANSSGQGFQNKNRVAILAELDKEKRKLLMQNQSSTNHPGARY

SEQ ID NO: 4067 - protein, 375 aa, Homo sapiens
MGLLVFVRNLLLALCLFLVLGFLYYSAWKLHLLQWEEDSNSVVLSFDSAGQTLGSEYDRLGFLLNLDSKLPAELATKYANFSEGACKPGYASALMTAIFPRFSKPAPMFLDDSFRKWARIREFVPPFGIKGQDNLIKAILSVTKEYRLTPALDSLRCRRCIIVGNGGVLANKSLGSRIDDYDIVVRLNSAPVKGFEKDVGSKTTLRITYPEGAMQRPEQYERDSLFVLAGFKWQDFKWLKYIVYKERVSASDGFWKSVATRVPKEPPEIRILNPYFIQEAAFTLIGLPFNNGLMGRGNIPTLGSVAVTMALHGCDEVAVAGFGYDMSTPNAPLHYYETVRMAAIKESWTHNIQREKEFLRKLVKARVITDLSSGI

SEQ ID NO: 4068 - protein, 390 aa, Homo sapiens
MGLLVFVRNLLLALCLFLVLGFLYYSAWKLHLLQWEEDSSKYSHSSSPQEKPVADSVVLSFDSAGQTLGSEYDRLGFLLNLDSKLPAELATKYANFSEGACKPGYASALMTAIFPRFSKPAPMFLDDSFRKWARIREFVPPFGIKGQDNLIKAILSVTKEYRLTPALDSLRCRRCIIVGNGGVLANKSLGSRIDDYDIVVRLNSAPVKGFEKDVGSKTTLRITYPEGAMQRPEQYERDSLFVLAGFKWQDFKWLKYIVYKERVSASDGFWKSVATRVPKEPPEIRILNPYFIQEAAFTLIGLPFNNGLMGRGNIPTLGSVAVTMALHGCDEVAVAGFGYDMSTPNAPLHYYETVRMAAIKESWTHNIQREKEFLRKLVKARVITDLSSGI

SEQ ID NO: 4069 - protein, 170 aa, Homo sapiens
MGLLVFVRNLLLALCLFLVLGFLYYSAWKLHLLQWEEDSSKYSHSSSPQEKPVADSVVLSFDSAGQTLGSEYDRLGFLLNLDSKLPAELATKYANFSEGACKPGYASALMTAIFPRFSKPAPMFLDDSFRKWARIREFVPPFGIKGQVLDAQYPARERVSAEAGESSRHH

SEQ ID NO: 4070 - protein, 444 aa, Homo sapiens
MGLLVFVRNLLLALCLFLVLGFLYYSAWKLHLLQWEEDSSKYSHSSSPQEKPVADSVVLSFDSAGQTLGSEYDRLGFLLNLDSKLSPRTLCTVVFGLDCILESPGEPKKLLMPASHPLEILKSLSEDTAFALGFLKLPRPAELATKYANFSEGACKPGYASALMTAIFPRFSKPAPMFLDDSFRKWARIREFVPPFGIKGQDNLIKAILSVTKEYRLTPALDSLRCRRCIIVGNGGVLANKSLGSRIDDYDIVVRLNSAPVKGFEKDVGSKTTLRITYPEGAMQRPEQYERDSLFVLAGFKWQDFKWLKYIVYKERVSASDGFWKSVATRVPKEPPEIRILNPYFIQEAAFTLIGLPFNNGLMGRGNIPTLGSVAVTMALHGCDEVAVAGFGYDMSTPNAPLHYYETVRMAAIKESWTHNIQREKEFLRKLVKARVITDLSSGI

SEQ ID NO: 4071 - protein, 345 aa, Homo sapiens
MGLLVFVRNLLLALCLFLVLGFLYYSAWKLHLLQWEEDSNSVVLSFDSAGQTLGSEYDRLGFLLNLDSKLPAELATKYANFSEGACKPGYASALMTAIFPRFSKPAPMFLDDSFRKWARIREFVPPFGIKGQDNLIKAILSVTKEYRLTPALDSLRCRRCIIVGNGGVLANKSLGSRIDDYDIVVRLNSAPVKGFEKDVGSKTTLRITYPEGAMQRPEQYERDSLFVLAGFKWQDFKWLKYIVYKERVEAAFTLIGLPFNNGLMGRGNIPTLGSVAVTMALHGCDEVAVAGFGYDMSTPNAPLHYYETVRMAAIKESWTHNIQREKEFLRKLVKARVITDLSSGI

SEQ ID NO: 4072 - protein, 189 aa, Homo sapiens
MGLLVFVRNLLLALCLFLVLGFLYYSAWKLHLLQWEEDSNSVVLSFDSAGQTLGSEYDRLGFLLNLDSKLPAELATKYANFSEGACKPGYASALMTAIFPRFSKPAPMFLDDSFRKWARIREFVPPFGIKGQDNLIKAILSVTKEYRLTPALDSLRCRRCIIVGNGGVLANKSLGSRIDDYDIVVRPRL

SEQ ID NO: 4073 - protein, 344 aa, Homo sapiens
MGLLVFVRNLLLALCLFLVLGFLYYSAWKLHLLQWEEDSNSVVLSFDSAGQTLGSEYDRLGFLLNLDSKLFSKPAPMFLDDSFRKWARIREFVPPFGIKGQDNLIKAILSVTKEYRLTPALDSLRCRRCIIVGNGGVLANKSLGSRIDDYDIVVRLNSAPVKGFEKDVGSKTTLRITYPEGAMQRPEQYERDSLFVLAGFKWQDFKWLKYIVYKERVSASDGFWKSVATRVPKEPPEIRILNPYFIQEAAFTLIGLPFNNGLMGRGNIPTLGSVAVTMALHGCDEVAVAGFGYDMSTPNAPLHYYETVRMAAIKESWTHNIQREKEFLRKLVKARVITDLSSGI

SEQ ID NO: 4074 - protein, 277 aa, Homo sapiens
MGLLVFVRNLLLALCLFLVLGFLYYSAWKLHLLQWEEDSNSVVLSFDSAGQTLGSEYDRLGFLLNLDSKLPAELATKYANFSEGACKPGYASALMTAIFPRFSKPAPMFLDDSFRKWARIREFVPPFGIKGQDNLIKAILSVTKEYRLTPALDSLRCRRCIIVGNGGVLANKSLGSRIDDYDIVVRLNSAPVKGFEKDVGSKTTLRITYPEGAMQRPEQYERDSLFVLAGFKWQDFKWLKYIVYKERVSWTHNIQREKEFLRKLVKARVITDLSSGI

SEQ ID NO: 4075 - protein, 115 aa, Homo sapiens
MGLLVFVRNLLLALCLFLVLGFLYYSAWKLHLLQWEEDSNSVVLSFDSAGQTLGSEYDRLGFLLNLDSKLPAELATKYANFSEGACKPGYASALMTAIFPREKVRTFMAWLAWYG

SEQ ID NO: 4076 - protein, 186 aa, Homo sapiens
MGLLVFVRNLLLALCLFLVLGFLYYSAWKLHLLQWEEDSNSVVLSFDSAGQTLGSEYDRLGFLLNLDSKLPAELATKYANFSEGACKPGYASALMTAIFPRFSKPAPMFLDDSFRKWARIREFVPPFGIKGQDNLIKAILSVTKEYRLTPALDSLRCRRCIIVGNGGVLANKSLGSRIDDYDIVVR

SEQ ID NO: 4077 - protein, 121 aa, Homo sapiens
MGLLVFVRNLLLALCLFLVLGFLYYSAWKLHLLQWEEDSNSVVLSFDSAGQTLGSEYDRLGFLLNLDSKLPAELATKYANFSEGACKPGYASALMTAIFPRAKRNGAWRQKHIQAYVLRQR

SEQ ID NO: 4078 - protein, 155 aa, Homo sapiens
MGLLVFVRNLLLALCLFLVLGFLYYSAWKLHLLQWEEDSNSVVLSFDSAGQTLGSEYDRLGFLLNLDSKLPAELATKYANFSEGACKPGYASALMTAIFPRFSKPAPMFLDDSFRKWARIREFVPPFGIKGQVLDAQYPARERVSAEAGESSRHH

SEQ ID NO: 4079 - protein, 429 aa, Homo sapiens
MGLLVFVRNLLLALCLFLVLGFLYYSAWKLHLLQWEEDSNSVVLSFDSAGQTLGSEYDRLGFLLNLDSKLSPRTLCTVVFGLDCILESPGEPKKLLMPASHPLEILKSLSEDTAFALGFLKLPRPAELATKYANFSEGACKPGYASALMTAIFPRFSKPAPMFLDDSFRKWARIREFVPPFGIKGQDNLIKAILSVTKEYRLTPALDSLRCRRCIIVGNGGVLANKSLGSRIDDYDIVVRLNSAPVKGFEKDVGSKTTLRITYPEGAMQRPEQYERDSLFVLAGFKWQDFKWLKYIVYKERVSASDGFWKSVATRVPKEPPEIRILNPYFIQEAAFTLIGLPFNNGLMGRGNIPTLGSVAVTMALHGCDEVAVAGFGYDMSTPNAPLHYYETVRMAAIKESWTHNIQREKEFLRKLVKARVITDLSSGI

SEQ ID NO: 4080 - protein, 151 aa, Homo sapiens
MGLLVFVRNLLLALCLFLVLGFLYYSAWKLHLLQWEEDSNSVVLSFDSAGQTLGSEYDRLGFLLNLDSKLPAELATKYANFSEGACKPGYASALMTAIFPRFSKPAPMFLDDSFRKWARIREFVPPFGIKGQECIGWLLEICGHSSAQGAP

SEQ ID NO: 4081 - protein, 359 aa, Homo sapiens
MGLLVFVRNLLLALCLFLVLGFLYYSAWKLHLLQWEEDSKYDRLGFLLNLDSKLPAELATKYANFSEGACKPGYASALMTAIFPRFSKPAPMFLDDSFRKWARIREFVPPFGIKGQDNLIKAILSVTKEYRLTPALDSLRCRRCIIVGNGGVLANKSLGSRIDDYDIVVRLNSAPVKGFEKDVGSKTTLRITYPEGAMQRPEQYERDSLFVLAGFKWQDFKWLKYIVYKERVSASDGFWKSVATRVPKEPPEIRILNPYFIQEAAFTLIGLPFNNGLMGRGNIPTLGSVAVTMALHGCDEVAVAGFGYDMSTPNAPLHYYETVRMAAIKESWTHNIQREKEFLRKLVKARVITDLSSGI

SEQ ID NO: 4082 - protein, 261 aa, Homo sapiens
MGLLVFVRNLLLALCLFLVLGFLYYSAWKLHLLQWEEDSKYDRLGFLLNLDSKLPAELATKYANFSEGACKPGYASALMTAIFPRFSKPAPMFLDDSFRKWARIREFVPPFGIKGQDNLIKAILSVTKEYRLTPALDSLRCRRCIIVGNGGVLANKSLGSRIDDYDIVVRLNSAPVKGFEKDVGSKTTLRITYPEGAMQRPEQYERDSLFVLAGFKWQDFKWLKYIVYKERVSWTHNIQREKEFLRKLVKARVITDLSSGI

SEQ ID NO: 4083 - protein, 186 aa, Homo sapiens
MGLLVFVRNLLLALCLFLVLGFLYYSAWKLHLLQWEEDSKYDRLGFLLNLDSKLPAELATKYANFSEGACKPGYASALMTAIFPRFSKPAPMFLDDSFRKWARIREFVPPFGIKGQDNLIKAILSVTKEYRLTPALDSLRCRRCIIVGNGGVLANKSLGSRIDDYDIVVSPGRTISSERKSFCGSW

SEQ ID NO: 4084 - protein, 139 aa, Homo sapiens
MGLLVFVRNLLLALCLFLVLGFLYYSAWKLHLLQWEEDSKYDRLGFLLNLDSKLPAELATKYANFSEGACKPGYASALMTAIFPRFSKPAPMFLDDSFRKWARIREFVPPFGIKGQVLDAQYPARERVSAEAGESSRHH

SEQ ID NO: 4085 - protein, 413 aa, Homo sapiens
MGLLVFVRNLLLALCLFLVLGFLYYSAWKLHLLQWEEDSKYDRLGFLLNLDSKLSPRTLCTVVFGLDCILESPGEPKKLLMPASHPLEILKSLSEDTAFALGFLKLPRPAELATKYANFSEGACKPGYASALMTAIFPRFSKPAPMFLDDSFRKWARIREFVPPFGIKGQDNLIKAILSVTKEYRLTPALDSLRCRRCIIVGNGGVLANKSLGSRIDDYDIVVRLNSAPVKGFEKDVGSKTTLRITYPEGAMQRPEQYERDSLFVLAGFKWQDFKWLKYIVYKERVSASDGFWKSVATRVPKEPPEIRILNPYFIQEAAFTLIGLPFNNGLMGRGNIPTLGSVAVTMALHGCDEVAVAGFGYDMSTPNAPLHYYETVRMAAIKESWTHNIQREKEFLRKLVKARVITDLSSGI

SEQ ID NO: 4086 - protein, 228 aa, Homo sapiens
MGLLVFVRNLLLALCLFLVLGFLYYSAWKLHLLQWEEDSKYDRLGFLLNLDSKLPAELATKYANFSEGACKPGYASALMTAIFPRFSKPAPMFLDDSFRKWARIREFVPPFGIKGQDNLIKAILSVTKEYRLTPALDSLRCRRCIIVGNGGVLANKSLGSRIDDYDIVVRVHRMASGNLWPLECPRSPLRFESSTHISSRRPPSPSLACPSTMASWAGGTSLPLAVWQ

SEQ ID NO: 4087 - protein, 230 aa, Homo sapiens
MGLLVFVRNLLLALCLFLVLGFLYYSAWKLHLLQWEEDSKYDRLGFLLNLDSKLFSKPAPMFLDDSFRKWARIREFVPPFGIKGQDNLIKAILSVTKEYRLTPALDSLRCRRCIIVGNGGVLANKSLGSRIDDYDIVVRLNSAPVKGFEKDVGSKTTLRITYPEGAMQRPEQYERDSLFVLAGFKWQDFKWLKYIVYKERVSWTHNIQREKEFLRKLVKARVITDLSSGI

SEQ ID NO: 4088 - protein, 101 aa, Homo sapiens
MGLLVFVRNLLLALCLFLVLGFLYYSAWKLHLLQWEEDSKYDRLGFLLNLDSKLPAELATKYANFSEGACKPGYASALMTAIFPRPGRTISSERKSFCGSW

SEQ ID NO: 4089 - protein, 185 aa, Homo sapiens
MGLLVFVRNLLLALCLFLVLGFLYYSAWKLHLLQWEEDSSKYSHSSSPQEKPVAEYDRLGFLLNLDSKLPAELATKYANFSEGACKPGYASALMTAIFPRFSKPAPMFLDDSFRKWARIREFVPPFGIKGQDNLIKAILSVTKEYRLTPALDSLRCRRCIIVGNGGVLANKSLGSRIDDYDIVVR

SEQ ID NO: 4090 - protein, 201 aa, Homo sapiens
MGLLVFVRNLLLALCLFLVLGFLYYSAWKLHLLQWEEDSSKYSHSSSPQEKPVAEYDRLGFLLNLDSKLPAELATKYANFSEGACKPGYASALMTAIFPRFSKPAPMFLDDSFRKWARIREFVPPFGIKGQDNLIKAILSVTKEYRLTPALDSLRCRRCIIVGNGGVLANKSLGSRIDDYDIVVSPGRTISSERKSFCGSW

SEQ ID NO: 4091 - protein, 43 aa, Homo sapiens
MGLLVFVRNLLLALCLFLVLGFLYYSAWKLHLLQWEEDSSLLN

SEQ ID NO: 4092 - protein, 73 aa, Homo sapiens
MGLLVFVRNLLLALCLFLVLGFLYYSAWKLHLLQWEEDSSSPSQHPCSWMTPFASGLESGSSCRLLGSKVKTI

SEQ ID NO: 4093 - protein, 581 aa, Homo sapiens [sequence omitted]

SEQ ID NO: 4094 - protein, 1683 aa, Homo sapiens
MSSRRKRAPPVRVDEEKRQQLHWNMHEDRRNEPIIISDDDEQPCPGSDTSSAHYIILSDSLKEEVAHRDKKRCSKVVSFSKPIEKEETVGIFSPLSVKLNIVISPYHFDNSWKAFLGELTLQLLPAQSLIENFSERSITLMSSESSNQFLIYVHSKGEDVEKQKKEPMSICDKGILVESSFSGEMLEDLGWLQKKRRIKLYQKPEGNHIIKVGIYLLEAGLAKLDFLSDANSRMKKFNQLMKKVMEKLHNSIIPDVLEEDEDDPESEPEGQDIDELYHFVKQTHQQETQSIQVDVQHPALIPVLRPYQREAVNWMLQQECFRSSPATESALHFLWREIVTSEGLKLYYNPYTGCIIREYPNSGPQLLGGILADEMGLGKTVEVLALILTHTRQDVKQDALTLPEGKVVNYFIPSHYFGGKLKKTEIQNIEFEPKEKVQCPPTRVMILTAVKEMNGKKGVSILSIYKYVSSIYRYDVQRNRSLLKRMLKCLIFEGLVKQIKGHGFSGTFTLGKNYKEEDICDKTKKQAVGSPRKIQKETRKSGNKDTDSEYLPSDTSDDDDDPYYYYYKSRRNRSKLRKKLVPSTKKGKSQPFINPDSQGHCPATSDSGITDVAMSKSTCISEFNQEHETEDCAESLNHADSDVPPSNTMSPFNTSDYRFECICGELDQIDRKPRVQCLKCHLWQHAKCVNYDEKNLKIKPFYCPHCLVAMEPVSTRATLIISPSSICHQWVDEINRHVRSSSLRVLVYQGVKKDGFLQPHFLAEQDIVIITYDVLRSELNYVDIPHSNSEDGRRLRNQKRYMAIPSPLVAVEWWRICLDEAQMVECPTVKAAEMAQRLSGINRWCISGTPVQRGLEDLFGLVVFLGIEPYCVKHWWVRLLYRPYCKKNPQHLYSFIAKILWRSAKKDVIDQIQIPPQTEEIHWLHFSPVERHFYHRQHEVCCQDVVVKLRKISDWALKLSSLDRRTVTSILYPLLRLRQACCHPQAVRGEFLPLQKSTMTMEELLTSLQKKCGTECEEAHRQLVCALNGLAGIHIIKGEYALAAELYREVLRSSEEHKGKLKTDSLQRLHATHNLMELLIARHPGIPPTLRDGRLEEEAKQLREHYMSKCNTEVAEAQQALYPVQQTIHELQRKIHSNSPWWLNVIHRAIEFTIDEELVQRVRNEITSNYKQQTGKLSMSEKFRDCRGLQFLLTTQMEELNKCQKLVREAVKNLEGPPSRNVIESATVCHLRPARLPLNCCVFCKADELFTEYESKLFSNTVKGQTAIFEEMIEDEEGLVDDRAPTTTRGLWAISETERSMKAILSFAKSHRFDVEFVDEGSTSMDLFEAWKKEYKLLHEYWMALRNRVSAVDELAMATERLRVRDPREPKPNPPVLHIIEPHEVEQNRIKLLNDKAVATSQLQKKLGQLLYLTNLEKSQDKTSGGVNPEPCPICARQLGKQWAVLTCGHCFCNECISIIIEQYSVGSHRSSIKCAICRQTTSHKEISYVFTSEKANQEEDIPVKGSHSTKVEAVVRTLMKIQLRDPGAKALVFSTWQDVLDIISKALTDNNMEFAQISRVKTFQENLSAFKRDPQINILLLPLHTGSNGLTIIEATHVLLVEPILNPAHELQAIGRVHRIGQTKPTIVHRFLIKATIEERMQAMLKTAERSHTNSSAKHSEASVLTVADLADLFTKETEELE

SEQ ID NO: 4095 - protein, 929 aa, Homo sapiens
MSSRRKRAPPVRVDEEKRQQLHWNMHEDRRNEPIIISDDDEQPCPGEDVEKQKKEPMSICDKGILVESSFSGEMLEDLGWLQKKRRIKLYQKPEGNHIIKVGIYLLEAGLAKLDFLSDANSRMKKFNQLMKKVMEKLHNSIIPDVLEEDEDDPESEPEGQDIDELYHFVKQTHQQETQSIQVDVQHPALIPVLRPYQREAVNWMLQQECFRSSPATESALHFLWREIVTSEGLKLYYNPYTGCIIREYPNSGPQLLGGILADEMGLGKTVEVLALILTHTRQDVKQDALTLPEGKVVNYFIPSHYFGGKLKKTEIQNIEFEPKEKVQCPPTRVMILTAVKEMNGKKGVSILSIYKYVSSIYRYDVQRNRSLLKRMLKCLIFEGLVKQIKGHGFSGTFTLGKNYKEEDICDKTKKQAVGSPRKIQKETRKSGNKDTDSEYLPSDTSDDDDDPYYYYYKSRRNRSKLRKKLVPSTKKGKSQPFINPDSQGHCPATSDSGITDVAMSKSTCISEFNQEHETEDCAESLNHADSDVPPSNTMSPFNTSDYRFECICGELDQIDRKPRVQCLKCHLWQHAKCVNYDEKNLKIKPFYCPHCLVAMEPVSTRATLIISPSSICHQWVDEINRHVRSSSLRVLVYQGVKKDGFLQPHFLAEQDIVIITYDVLRSELNYVDIPHSNSEDGRRLRNQKRYMAIPSPLVAVEWWRICLDEAQMVECPTVKAAEMAQRLSGINRWCISGTPVQRGLEDLFGLVVFLGIEPYCVKHWWVRLLYRPYCKKNPQHLYSFIAKILWRSAKKDVIDQIQIPPQTEEIHWLHFSPVERHFYHRQHEVCCQDVVVKLRKISDWALKLSSLDRRTVTSILYPLLRLRQACCHPQAVRGEFLPLQKSTMTMEELLTSLQKKCGTECEEAHRQLVCALNGLAGIHIIKGRR

SEQ ID NO: 4096 - protein, 1659 aa, Homo sapiens
MSSRRKRAPPVRVDEEKRQQLHWNMHEDRRNEPIIISDDDEQPCPGSDTSSAHYIILSDSLKEEVAHRDKKRCSKVVSFSKPIEKEETVGIFSPLSVKLNIVISPYHFDNSWKAFLGELTLQLLPAQSLIENFSERSITLMSSESSNQFLIYVHSKGEDVEKQKKEPMSICDKGILVESSFSGEMLEDLGWLQKKRRIKLYQKPEGNHIIKVGIYLLEAGLAKLDFLSDANSRMKKFNQLMKKVMEKLHNSIIPDVLEEDEDDPESEPEGQDIDELYHFVKQTHQQETQSIQVDVQHPALIPVLRPYQREAVNWMLQQECFRSSPATESALHFLWREIVTSEGLKLYYNPYTGCIIREYPNSGPQLLGGILADEMGLGKTVEVLALILTHTRQDVKQDALTLPEGKVVNYFIPSHYFGGKLKKTEIQNIEFEPKEKVQCPPTRVMILTAVKEMNGKKGVSILSIYKYVSSIYRYDVQRNRSLLKRMLKCLIFEGLVKQIKGHGFSGTFTLGKNYKEEDICDKTKKQAVGSPRKIQKETRKSGNKDTDSEYLPSDTSDDDDDPYYYYYKSRRNRSKLRKKLVPSTKKGKSQPFINPDSQGHCPATSDSGITDVAMSKSTCISEFNQEHETEDCAESLNHADSDVPPSNTMSPFNTSDYRFECICGELDQIDRKPRVQCLKCHLWQHAKCVNYDEKNLKIKPFYCPHCLVAMEPVSTRATLIISPSSICHQWVDEINRHVRSSSLRVLVYQGVKKDGFLQPHFLAEQDIVIITYDVLRSELNYVDIPHSNSEDGRRLRNQKRYMAIPSPLVAVEWWRICLDEAQMVECPTVKAAEMAQRLSGINRWCISGTPVQRGLEDLFGLVVFLGIEPYCVKHWWVRLLYRPYCKKNPQHLYSFIAKILWRSAKKDVIDQIQIPPQTEEIHWLHFSPVERHFYHRQHEVCCQDVVVKLRKISDWALKLSSLDRRTVTSILYPLLRLRQACCHPQAVRGEFLPLQKSFEQSTFSFSTMTMEELLTSLQKKCGTECEEAHRQLVCALNGLAGIHIIKGEYALAAELYREVLRSSEEHKGKLKTDSLQRLHATHNLMELLIARHPGIPPTLRDGRLEEEAKQLREHYMSKCNTEVAEAQQALYPVQQTIHELQRKIHSNSPWWLNVIHRAIEFTIDEELVQRVRNEITSNYKQQTGKLSMSEKGLQFLLTTQMEELNKCQKLVREAVKNLEGPPSRNVIESATVCHLRPARLPLNCCVFCKADELFTEYESKLFSNTVKGQTAIFEEMIEDEEGLVDDRAPTTTRGLWAISETERSMKAILSFAKSHRFDVEFVDEGSTSMDLFEAWKKEYKLLHEYWMALRNRVSAVDELAMATERLRVRDPREPKPNPPVLHIIEPHEVEQNRIKLLNDKAVATSQLQKKLGQLLYLTNLEKSQDKTSGGVNPEPCPICARQLGKQWAVLTCGHCFCNECISIIIEQYSVGSHRSSIKCAICRQTTSHKEISYVFTSEKANQEEDIPVKGSHSTKVEAVVRTLMKIQLRDPGAKALVFSTWQDVLDIISKALTDNNMEFAQISRVKTFQENLSAFKRDPQINILLLPLHTGSNGLTIIEATHVLLVEPILNPAHELQAIGRVHRIGQTKPTIVHRFLIKATIEERMQAMLKTAERSIYI

SEQ ID NO: 4097 - protein, 471 aa, Homo sapiens
MSSRRKRAPPVRVDEEKRQQLHWNMHEDRRNEPIIISDDDEQPCPGSDTSSAHYIILSDSLKEEVAHRDKKRCSKVVSFSKPIEKEETVGIFSPLSVKLNIVISPYHFDNSWKAFLGELTLQLLPAQSLIENFSERSITLMSSESSNQFLIYVHSKGEDVEKQKKEPMSICDKGILVESSFSGEMLEDLGWLQKKRRIKLYQKPEGNHIIKVGIYLLEAGLAKLDFLSDANSRMKKFNQLMKKVMEKLHNSIIPDVLEEDEDDPESEPEGQDIDELYHFVKQTHQQETQSIQVDVQHPALIPVLRPYQREAVNWMLQQECFRSSPATESALHFLWREIVTSEGLKLYYNPYTGCIIREYPNSGPQLLGGILADEMGLGKTVEVLALILTHTRQDVKQDALTLPEGKVVNYFIPSHYFGGKLKKTEIQNIEFEPKEKVQCPPYPFTFSYTCDDTDSCERNEWKKRSVHPFHL

SEQ ID NO: 4098 - protein, 132 aa, Homo sapiens
MKSSGLFPFLVLLALGTLAPWAVEGSGKSFKAGVCPPKKSAQCLRYKKPECQSDWQCPGKKRCCPDTCGIKCLDPVDTPNPTRRKPGKCPVTYGQCLMLNPPNFCEMDGQCKRDLKCCMGMCGKSCVSPVKA

SEQ ID NO: 4099 - protein, 926 aa, Homo sapiens
MVMADGPRHLQRGPVRVGFYDIEGTLGKGNFAVVKLGRHRITKTEVAIKIIDKSQLDAVNLEKIYREVQIMKMLDHPHIIKLYQVMETKSMLYLVTEYAKNGEIFDYLANHGRLNESEARRKFWQILSAVDYCHGRKIVHRDLKAENLLLDNNMNIKIADFGFGNFFKSGELLATWCGSPPYAAPEVFEGQQYEGPQLDIWSMGVVLYVLVCGALPFDGPTLPILRQRVLEGRFRIPYFMSEDCEHLIRRMLVLDPSKRLTIAQIKEHKWMLIEVPVQRPVLYPQEQENEPSIGEFNEQVLRLMHSLGIDQQKTIESLQNKSYNHFAAIYFLLVERLKSHRSSFPVEQRLDGRQRRPSTIAEQTVAKAQTVGLPVTMHSPNMRLLRSALLPQASNVEAFSFPASGCQAEAAFMEEECVDTPKVNGCLLDPVPPVLVRKGCQSLPSNMMETSIDEGLETEGEAEEDPAHAFEAFQSTRSGQRRHTLSEVTNQLVVMPGAGKIFSMNDSPSLDSVDSEYDMGSVQRDLNFLEDNPSLKDIMLANQPSPRMTSPFISLRPTNPAMQALSSQKREVHNRSPVSFREGRRASDTSLTQGIVAFRQHLQNLARTKGILELNKVQLLYEQIGPEADPNLAPAAPQLQDLASSCPQEEVSQQQESVSTLPASVHPQLSPRQSLETQYLQHRLQKPSLLSKAQNTCQLYCKEPPRSLEQQLQEHRLQQKRLFLQKQSQLQAYFNQMQIAESSYPQPSQQLPLPRQETPPPSQQAPPFSLTQPLSPVLEPSSEQMQYSPFLSQYQEMQLQPLPSTSGPRAAPPLPTQLQQQQPPPPPPPPPPRQPGAAPAPLQFSYQTCELPSAASPAPDYPTPCQYPVDGAQQSDLTGPDCPRSPGLQEAPSSYDPLALSELPGLFDCEMLDAVDPQHNGYVLVN

SEQ ID NO: 4100 - protein, 213 aa, Homo sapiens
MQLPLALCLVCLLVHTAFRVVEGQGWQAFKNDATEIIPELGEYPEPPPELENNKTMNRAENGGRPPHHPFETKDVSEYSCRELHFTRYVTDGPCRSAKPVTELVCSGQCGPARLLPNAIGRGKWWRPSGPDFRCIPDRYRAQRVQLLCPGGEAPRARKVRLVASCKCKRLTRFHNQSELKDFGTEAARPQKGRKPRPRARSAKANQAELENAY

SEQ ID NO: 4101 - protein, 217 aa, Homo sapiens
MQLPLALCLVCLLVHTAFRVVEGQGWQAFKNDATEIIPELGEYPEPPPELENNKTMNRAENGGWPGGRPPSRAPLSTDVSEYSCRELHFTRYVTDGPCRSAKPVTELVCSGQCGPARLLPNAIGRGKWWRPSGPDFRCIPDRYRAQRVQLLCPGGEAPRARKVRLVASCKCKRLTRFHNQSELKDFGTEAARPQKGRKPRPRARSAKANQAELENAY

SEQ ID NO: 4102 - protein, 418 aa, Homo sapiens
MRTKAAGCAERRPLQPRTEAAAAPAGRAMPSEYTYVKLRSDCSRPSLQWYTRAQSKMRRPSLLLKDILKCTLLVFGVWILYILKLNYTTEECDMKKMHYVDPDHVKRAQKYAQQVLQKECRPKFAKTSMALLFEHRYSVDLLPFVQKAPKDSEAESKYDPPFGFRKFSSKVQTLLELLPEHDLPEHLKAKTCRRCVVIGSGGILHGLELGHTLNQFDVVIRLNSAPVEGYSEHVGNKTTIRMTYPEGAPLSDLEYYSNDLFVAVLFKSVDFNWLQAMVKKETLPFWVRLFFWKQVAEKIPLQPKHFRILNPVIIKETAFDILQYSEPQSRFWGRDKNVPTIGVIAVVLATHLCDEVSLAGFGYDLNQPRTPLHYFDSQCMAAMNFQTMHNVTTETKFLLKLVKEGVVKDLSGGIDREF

SEQ ID NO: 4103 - protein, 390 aa, Homo sapiens
MPSEYTYVKLRSDCSRPSLQWYTRAQSKMRRPSLLLKDILKCTLLVFGVWILYILKLNYTTEECDMKKMHYVDPDHVKRAQKYAQQVLQKECRPKFAKTSMALLFEHRYSVDLLPFVQKAPKDSEAESKYDPPFGFRKFSSKVQTLLELLPEHDLPEHLKAKTCRRCVVIGSGGILHGLELGHTLNQFDVVIRLNSAPVEGYSEHVGNKTTIRMTYPEGAPLSDLEYYSNDLFVAVLFKSVDFNWLQAMVKKETLPFWVRLFFWKQVAEKIPLQPKHFRILNPVIIKETAFDILQYSEPQSRFWGRDKNVPTIGVIAVVLATHLCDEVSLAGFGYDLNQPRTPLHYFDSQCMAAMNFQTMHNVTTETKFLLKLVKEGVVKDLSGGIDREF

SEQ ID NO: 4104 - protein, 395 aa, Homo sapiens
MASVPMPSEYTYVKLRSDCSRPSLQWYTRAQSKMRRPSLLLKDILKCTLLVFGVWILYILKLNYTTEECDMKKMHYVDPDHVKRAQKYAQQVLQKECRPKFAKTSMALLFEHRYSVDLLPFVQKAPKDSEAESKYDPPFGFRKFSSKVQTLLELLPEHDLPEHLKAKTCRRCVVIGSGGILHGLELGHTLNQFDVVIRLNSAPVEGYSEHVGNKTTIRMTYPEGAPLSDLEYYSNDLFVAVLFKSVDFNWLQAMVKKETLPFWVRLFFWKQVAEKIPLQPKHFRILNPVIIKETAFDILQYSEPQSRFWGRDKNVPTIGVIAVVLATHLCDEVSLAGFGYDLNQPRTPLHYFDSQCMAAMNFQTMHNVTTETKFLLKLVKEGVVKDLSGGIDREF

SEQ ID NO: 4105 - protein, 504 aa, Homo sapiens
MEPAGPAPGRLGPLLCLLLAASCAWSGVAGEEELQVIQPDKSVLVAAGETATLRCTATSLIPVGPIQWFRGAGPGRELIYNQKEGHFPRVTTVSDLTKRNNMDFSIRIGNITPADAGTYYCVKFRKGSPDDVEFKSGAGTELSVRAKPSAPVVSGPAARATPQHTVSFTCESHGFSPRDITLKWFKNGNELSDFQTNVDPVGESVSYSIHSTAKVVLTREDVHSQVICEVAHVTLQGDPLRGTANLSETIRVPPTLEVTQQPVRAENQVNVTCQVRKFYPQRLQLTWLENGNVSRTETASTVTENKDGTYNWMSWLLVNVSAHRDDVKLTCQVEHDGQPAVSKSHDLKVSAHPKEQGSNTAAENTGSNERNIYIVVGVVCTLLVALLMAALYLVRIRQKKAQGSTSSTRLHEPEKNAREITQDTNDITYADLNLPKGKKPAPQAAEPNNHTEYASIQTSPQPASEDTLTYADLDMVHLNRTPKQPAPKPEPSFSEYASVQVPRK

SEQ ID NO: 4106 - protein, 508 aa, Homo sapiens
MEPAGPAPGRLGPLLCLLLAASCAWSGVAGEEELQVIQPDKSVLVAAGETATLRCTATSLIPVGPIQWFRGAGPGRELIYNQKEGHFPRVTTVSDLTKRNNMDFSIRIGNITPADAGTYYCVKFRKGSPDDVEFKSGAGTELSVRAKPSAPVVSGPAARATPQHTVSFTCESHGFSPRDITLKWFKNGNELSDFQTNVDPVGESVSYSIHSTAKVVLTREDVHSQVICEVAHVTLQGDPLRGTANLSETIRVPPTLEVTQQPVRAENQVNVTCQVRKFYPQRLQLTWLENGNVSRTETASTVTENKDGTYNWMSWLLVNVSAHRDDVKLTCQVEHDGQPAVSKSHDLKVSAHPKEQGSNTAAENTGSNERNIYIVVGVVCTLLVALLMAALYLVRIRQKKAQGSTSSTRLHEPEKNAREITQVQSLDTNDITYADLNLPKGKKPAPQAAEPNNHTEYASIQTSPQPASEDTLTYADLDMVHLNRTPKQPAPKPEPSFSEYASVQVPRK

SEQ ID NO: 4107 - protein, 503 aa, Homo sapiens
MEPAGPAPGRLGPLLCLLLAASCAWSGVAGEEELQVIQPDKSVLVAAGETATLRCTATSLIPVGPIQWFRGAGPGRELIYNQKEGHFPRVTTVSDLTKRNNMDFSIRIGNITPADAGTYYCVKFRKGSPDVEFKSGAGTELSVRAKPSAPVVSGPAARATPQHTVSFTCESHGFSPRDITLKWFKNGNELSDFQTNVDPVGESVSYSIHSTAKVVLTREDVHSQVICEVAHVTLQGDPLRGTANLSETIRVPPTLEVTQQPVRAENQVNVTCQVRKFYPQRLQLTWLENGNVSRTETASTVTENKDGTYNWMSWLLVNVSAHRDDVKLTCQVEHDGQPAVSKSHDLKVSAHPKEQGSNTAAENTGSNERNIYIVVGVVCTLLVALLMAALYLVRIRQKKAQGSTSSTRLHEPEKNAREITQDTNDITYADLNLPKGKKPAPQAAEPNNHTEYASIQTSPQPASEDTLTYADLDMVHLNRTPKQPAPKPEPSFSEYASVQVPRK

SEQ ID NO: 4108 - protein, 1321 aa, Homo sapiens
MAAAAASGAGGAAGAGTGGAGPAGRLLPPPAPGSPAAPAAVSPAAGQPRPPAPASRGPMPARIGYYEIDRTIGKGNFAVVKRATHLVTKAKVAIKIIDKTQLDEENLKKIFREVQIMKMLCHPHIIRLYQVMETERMIYLVTEYASGGEIFDHLVAHGRMAEKEARRKFKQIVTAVYFCHCRNIVHRDLKAENLLLDANLNIKIADFGFSNLFTPGQLLKTWCGSPPYAAPELFEGKEYDGPKVDIWSLGVVLYVLVCGALPFDGSTLQNLRARVLSGKFRIPFFMSTECEHLIRHMLVLDPNKRLSMEQICKHKWMKLGDADPNFDRLIAECQQLKEERQVDPLNEDVLLAMEDMGLDKEQTLQSLRSDAYDHYSAIYSLLCDRHKRHKTLRLGALPSMPRALAFQAPVNIQAEQAGTAMNISVPQVQLINPENQIVEPDGTLNLDSDEGEEPSPEALVRYLSMRRHTVGVADPRTEVMEDLQKLLPGFPGVNPQAPFLQVAPNVNFMHNLLPMQNLQPTGQLEYKEQSLLQPPTLQLLNGMGPLGRRASDGGANIQLHAQQLLKRPRGPSPLVTMTPAVPAVTPVDEESSDGEPDQEAVQSSTYKDSNTLHLPTERFSPVRRFSDGAASIQAFKAHLEKMGNNSSIKQLQQECEQLQKMYGGQIDERTLEKTQQQHMLYQQEQHHQILQQQIQDSICPPQPSPPLQAACENQPALLTHQLQRLRIQPSSPPPNHPNNHLFRQPSNSPPPMSSAMIQPHGAASSSQFQGLPSRSAIFQQQPENCSSPPNVALTCLGMQQPAQSQQVTIQVQEPVDMLSNMPGTAAGSSGRGISISPSAGQMQMQHRTNLMATLSYGHRPLSKQLSADSAEAHSLNVNRFSPANYDQAHLHPHLFSDQSRGSPSSYSPSTGVGFSPTQALKVPPLDQFPTFPPSAHQQPPHYTTSALQQALLSPTPPDYTRHQQVPHILQGLLSPRHSLTGHSDIRLPPTEFAQLIKRQQQQRQQQQQQQQQQEYQELFRHMNQGDAGSLAPSLGGQSMTERQALSYQNADSYHHHTSPQHLLQIRAQECVSQASSPTPPHGYAHQPALMHSESMEEDCSCEGAKDGFQDSKSSSTLTKGCHDSPLLLSTGGPGDPESLLGTVSHAQELGIHPYGHQPTAAFSKNKVPSREPVIGNCMDRSSPGQAVELPDHNGLGYPARPSVHEHHRPRALQRHHTIQNSDDAYVQLDNLPGMSLVAGKALSSARMSDAVLSQSSLMGSQQFQDGENEECGASLGGHEHPDLSDGSQHLNSSCYPSTCITDILLSYKHPEVSFSMEQAGV

SEQ ID NO: 4109 - protein, 641 aa, Homo sapiens
MACSTPHGSNRRLPRKCHFSLPTRTPTLCTSLRSVSPLCAGSQMGLRASRPSKLTWKKWATTAASNSCSRSVSSCRRCTGGRLMKEPWRRPSSSICYTSRSSTIKFSSNKFKTLSVLLSHLHLFRLHVKISQPSLPISSRGAASSSQFQGLPSRSAIFQQQPENCSSPPNVALTCLGMQQPAQSQQVTIQVQEPVDMLSNMPGTAAGSSGRGISISPSAGQMQMQHRTNLMATLSYGHRPLSKQLSADSAEAHSAHQQPPHYTTSALQQALLSPTPPDYTRHQQVPHILQGLLSPRHSLTGHSDIRLPPTEFAQLIKRQQQQRQQQQQQQQQQEYQELFRHMNQGDAGSLAPSLGGQSMTERQALSYQNADSYHHHTSPQHLLQIRAQECVSQASSPTPPHGYAHQPALMHSESMEEDCSCEGAKDGFQDSKSSSTLTKGCHDSPLLLSTGGPGDPESLLGTVSHAQELGIHPYGHQPTAAFSKNKVPSREPVIGNCMDRSSPGQAVELPDHNGLGYPARPSVHEHHRPRALQRHHTIQNSDDAYVQLDNLPGMSLVAGKALSSARMSDAVLSQSSLMGSQQFQDGENEECGASLGGHEHPDLSDGSQHLNSSCYPSTCITDILLSYKHPEVSFSMEQAGV

SEQ ID NO: 4110 - protein, 1187 aa, Homo sapiens
MAAAAASGAGGAAGAGTGGAGPAGRLLPPPAPGSPAAPAAVSPAAGQPRPPAPASRGPMPARIGYYEIDRTIGKGNFAVVKRATHLVTKAKVAIKIIDKTQLDEENLKKIFREVQIMKMLCHPHIIRLYQVMETERMIYLVTEYASGGEIFDHLVAHGRMAEKEARRKFKQIVTAVYFCHCRNIVHRDLKAENLLLDANLNIKIADFGFSNLFTPGQLLKTWCGSPPYAAPELFEGKEYDGPKVDIWSLGVVLYVLVCGALPFDGSTLQNLRARVLSGKFRIPFFMSTECEHLIRHMLVLDPNKRLSMEQICKHKWMKLGDADPNFDRLIAECQQLKEERQVDPLNEDVLLAMEDMGLDKEQTLQSLRSDAYDHYSAIYSLLCDRHKRHKTLRLGALPSMPRALAFQAPVNIQAEQAGTAMNISVPQVQLINPENQIVEPDGTLNLDSDEGEEPSPEALVRYLSMRRHTVGVADPRTEVMEDLQKLLPGFPGVNPQAPFLQVAPNVNFMHNLLPMQNLQPTGQLEYKEQSLLQPPTLQLLNGMGPLGRRASDGGANIQLHAQQLLKRPRGPSPLVTMTPAVPAVTPVDEESSDGEPDQEAVQSSTYKDSNTLHLPTERFSPVRRFSDGAASIQAFKAHLEKMGNNSSIKQLQQECEQLQKMYGGQIDERTLEKTQQQHMLYQQEQHHQILQQQIQDSICPPQPSPPLQAACENQPALLTHQLQRLRIQPSSPPPNHPNNHLFRQPSNSPPPMSSAMIQPHGAASSSQFQGLPSRSAIFQQQPENCSSPPNVALTCLGMQQPAQSQQVTIQVQEPVDMLSNMPGTAAGSSGRGISISPSAGQMQMQHRTNLMATLSYGHRPLSKQLSADSAEAHSLNVNRFSPANYDQAHLHPHLFSDQSRGSPSSYSPSTGVGFSPTQALKVPPLDQFPTFPPSAHQQPPHYTTSALQQALLSPTPPDYTRHQQVPHILQGLLSPRHSLTGHSDIRLPPTEFAQLIKRQQQQRQQQQQQQQQQEYQELFRHMNQGDAGSLAPSLGGQSMTERQALSYQNADSYHHHTSPQHLLQIRAQECVSQASSPTPPHGYAHQPALMHSESMEEDCSCEGAKDGFQDSKSSSTLTKGCHDSPLLLSTGGPGDPESLLGTVSHAQELGIHPYGHQPTAAFSKNKVPSRGKCLLTVEVLGQSALIN

SEQ ID NO: 4111 - protein, 1261 aa, Homo sapiens
MAAAAASGAGGAAGAGTGGAGPAGRLLPPPAPGSPAAPAAVSPAAGQPRPPAPASRGPMPARIGYYEIDRTIGKGNFAVVKRATHLVTKAKVAIKIIDKTQLDEENLKKIFREVQIMKMLCHPHIIRLYQVMETERMIYLVTEYASGGEIFDHLVAHGRMAEKEARRKFKQIVTAVYFCHCRNIVHRDLKAENLLLDANLNIKIADFGFSNLFTPGQLLKTWCGSPPYAAPELFEGKEYDGPKVDIWSLGVVLYVLVCGALPFDGSTLQNLRARVLSGKFRIPFFMSTECEHLIRHMLVLDPNKRLSMEQICKHKWMKLGDADPNFDRLIAECQQLKEERQVDPLNEDVLLAMEDMGLDKEQTLQAEQAGTAMNISVPQVQLINPENQIVEPDGTLNLDSDEGEEPSPEALVRYLSMRRHTVGVADPRTEVMEDLQKLLPGFPGVNPQAPFLQVAPNVNFMHNLLPMQNLQPTGQLEYKEQSLLQPPTLQLLNGMGPLGRRASDGGANIQLHAQQLLKRPRGPSPLVTMTPAVPAVTPVDEESSDGEPDQEAVQRYLANRSKRHTLAMTNPTAEIPPDLQRQLGQQPFRSRVWPPHLVPDQHRSTYKDSNTLHLPTERFSPVRRFSDGAASIQAFKAHLEKMGNNSSIKQLQQECEQLQKMYGGQIDERTLEKTQQQHMLYQQEQHHQILQQQIQDSICPPQPSPPLQAACENQPALLTHQLQRLRIQPSSPPPNHPNNHLFRQPSNSPPPMSSAMIQPHGAASSSQFQGLPSRSAIFQQQPENCSSPPNVALTCLGMQQPAQSQQVTIQVQEPVDMLSNMPGTAAGSSGRGISISPSAGQMQMQHRTNLMATLSYGHRPLSKQLSADSAEAHSAHQQPPHYTTSALQQALLSPTPPDYTRHQQVPHILQGLLSPRHSLTGHSDIRLPPTEFAQLIKRQQQQRQQQQQQQQQQEYQELFRHMNQGDAGSLAPSLGGQSMTERQALSYQNADSYHHHTSPQHLLQIRAQECVSQASSPTPPHGYAHQPALMHSESMEEDCSCEGAKDGFQDSKSSSTLTKGCHDSPLLLSTGGPGDPESLLGTVSHAQELGIHPYGHQPTAAFSKNKVPSREPVIGNCMDRSSPGQAVELPDHNGLGYPARPSVHEHHRPRALQRHHTIQNSDDAYVQLDNLPGMSLVAGKALSSARMSDAVLSQSSLMGSQQFQDGENEECGASLGGHEHPDLSDGSQHLNSSCYPSTCITDILLSYKHPEVSFSMEQAGV

SEQ ID NO: 4112 - protein, 594 aa, Homo sapiens
MGKKSRVKTQKSGTGATATVSPKEILNLTSELLQKCSSPAPGPGKEWEEYVQIRTLVEKIRKKQKGLSVTFDGKREDYFPDLMKWASENGASVEGFEMVNFKEEGFGLRATRDIKAEELFLWVPRKLLMTVESAKNSVLGPLYSQDRILQAMGNIALAFHLLCERASPNSFWQPYIQTLPSEYDTPLYFEEDEVRYLQSTQAIHDVFSQYKNTARQYAYFYKVIQTHPHANKLPLKDSFTYEDYRWAVSSVMTRQNQIPTEDGSRVTLALIPLWDMCNHTNGLITTGYNLEDDRCECVALQDFRAGEQIYIFYGTRSNAEFVIHSGFFFDNNSHDRVKIKLGVSKSDRLYAMKAEVLARAGIPTSSVFALHFTEPPISAQLLAFLRVFCMTEEELKEHLLGDSAIDRIFTLGNSEFPVSWDNEVKLWTFLEDRASLLLKTYKTTIEEDKSVLKNHDLSVRAKMAIKLRLGEKEILEKAVKSAAVNREYYRQQMEEKAPLPKYEESNLGLLESSVGDSRLPLVLRNLEEEAGVQDALNIREAISKAKATENGLVNGENSIPNGTRSENESLNQESKRAVEDAKGSSSDSTAGVKE

SEQ ID NO: 4113 - protein, 296 aa, Homo sapiens
MGKKSRVKTQKSGTGATATVSPKEILNLTSELLQKCSSPAPGPGKEWEEYVQIRTLVEKIRKKQKGLSVTFDGKREDYFPDLMKWASENGASVEGFEMVNFKEEGFGLRATRDIKAEELFLWVPRKLLMTVESAKNSVLGPLYSQDRILQAMGNIALAFHLLCERASPNSFWQPYIQTLPSEYDTPLYFEEDEVRYLQSTQAIHDVFSQYKNTARQYAYFYKVIQTHPHANKLPLKDSFTYEDYRWAVSSVMTRQNQIPTEDGSRVTLALIPLWDMCNHTNGLTPEDSFALAVASA

SEQ ID NO: 4114 - protein, 284 aa, Homo sapiens
MGKKSRVKTQKSGTGATATVSPKEILNLTSELLQKCSSPAPGPGKEWEEYVQIRTLVEKIRKKQKGLSVTFDGKREDYFPDLMKWASENGASVEGFEMVNFKEEGFGLRATRDIKAEELFLWVPRKLLMTVESAKNSVLGPLYSQDRILQAMGNIALAFHLLCERASPNSFWQPYIQTLPSEYDTPLYFEEDEVRYLQSTQAIHDVFSQYKNTARQYAYFYKVIQTHPHANKLPLKDSFTYEDYRWAVSSVMTRQNQIPTEDGSRVTLALIPLWDMCNHTNGLV

SEQ ID NO: 4115 - protein, 135 aa, Homo sapiens [sequence omitted]

SEQ ID NO: 4116 - protein, 4579 aa, Homo sapiens
METKENRWVPVTVLPGCVGCRTVAALASWTVRDVKERIFAETGFPVSEQRLWRGGRELSDWIKIGDLTSKNCHLFVNLQSKGLKGGGRFGQTTPPLVDFLKDILRRYPEGGQILKELIQNAEDAGATEVKFLYDETQYGTETLWSKDMAPYQGPALYVYNNAVFTPEDWHGIQEIARSRKKDDPLKVGRFGIGFNSVYHITDVPCIFSGDQIGMLDPHQTLFGPHESGQCWNLKDDSKEISELSDQFAPFVGIFGSTKETFINGNFPGTFFRFPLRLQPSQLSSNLYNKQKVLELFESFRADADTVLLFLKSVQDVSLYVREADGTEKLVFRVTSSESKALKHERPNSIKILGTAISNYCKKTPSNNITCVTYHVNIVLEEESTKDAQKTSWLVCNSVGGRGISSKLDSLADELKFVPIIGIAMPLSSRDDEAKGATSDFSGKAFCFLPLPPGEESSTGLPVHISGFFGLTDNRRSIKWRELDQWRDPAALWNEFLVMNVVPKAYATLILDSIKRLEMEKSSDFPLSVDVIYKLWPEASKVKVHWQPVLEPLFSELLQNAVIYSISCDWVRLEQVYFSELDENLEYTKTVLNYLQSSGKQIAKVPGNVDAAVQLTAASGTTPVRKVTPAWVRQVLRKCAHLGCAEEKLHLLEFVLSDQAYSELLGLELLPLQNGNFVPFSSSVSDQDVIYITSAEYPRSLFPSLEGRFILDNLKPHLVAALKEAAQTRGRPCTQLQLLNPERFARLIKEVMNTFWPGRELIVQWYPFDENRNHPSVSWLKMVWKNLYIHFSEDLTLFDEMPLIPRTILEEGQTCVELIRLRIPSLVILDDESEAQLPEFLADIVQKLGGFVLKKLDASIQHPLIKKYIHSPLPSAVLQIMEKMPLQKLCNQITSLLPTHKDALRKFLASLTDSSEKEKRIIQELAIFKRINHSSDQGISSYTKLKGCKVLHHTAKLPADLRLSISVIDSSDEATIRLANMLKIEQLKTTSCLKLVLKDIENAFYSHEEVTQLMLWVLENLSSLKNENPNVLEWLTPLKFIQISQEQMVSAGELFDPDIEVLKDLFCNEEGTYFPPSVFTSPDILHSLRQIGLKNEASLKEKDVVQVAKKIEALQVGACPDQDVLLKKAKTLLLVLNKNHTLLQSSEGKMTLKKIKWVPACKERPPNYPGSLVWKGDLCNLCAPPDMCDVGHAILIGSSLPLVESIHVNLEKALGIFTKPSLSAVLKHFKIVVDWYSSKTFSDEDYYQFQHILLEIYGFMHDHLNEGKDSFRALKFPWVWTGKKFCPLAQAVIKPIHDLDLQPYLHNVPKTMAKFHQLFKVCGSIEELTSDHISMVIQKIYLKSDQDLSEQESKQNLHLMLNIIRWLYSNQIPASPNTPVPIHHSKNPSKLIMKPIHECCYCDIKVDDLNDLLEDSVEPIILVHEDIPMKTAEWLKVPCLSTRLINPENMGFEQSGQREPLTVRIKNILEEYPSVSDIFKELLQNADDANATECSFLIDMRRNMDIRENLLDPGMAACHGPALWSFNNSQFSDSDFVNITRLGESLKRGEVDKVGKFGLGFNSVYHITDIPIIMSREFMIMFDPNINHISKHIKDKSNPGIKINWSKQQKRLRKFPNQFKPFIDVFGCQLPLTVEAPYSYNGTLFRLSFRTQQEAKVSEVSSTCYNTADIYSLVDEFSLCGHRLIIFTQSVKSMYLKYLKIEETNPSLAQDTVIIKKKSCSSKALNTPVLSVLKEAAKLMKTCSSSNKKLPSDEPKSSCILQITVEEFHHVFRRIADLQSPLFRGPDDDPAALFEMAKSGQSKKPSDELSQKTVECTTWLLCTCMDTGEALKFSLSESGRRLGLVPCGAVGVQLSEIQDQKWTVKPHIGEVFCYLPLRIKTGLPVHINGCFAVTSNRKEIWKTDTKGRWNTTFMRHVIVKAYLQVLSVLRDLATSGELMDYTYYAVWPDPDLVHDDFSVICQGFYEDIAHGKGKELTKVFSDGSTWVSMKNVRFLDDSILKRRDVGSAAFKIFLKYLKKTGSKNLCAVELPSSVKLGFEEAGCKQILLENTFSEKQFFSEVFFPNIQEIEAELRDPLMIFVLNEKVDEFSGVLRVTPCIPCSLEGHPLVLPSRLIHPEGRVAKLFDIKDGRFPYGSTQDYLNPIILIKLVQLGMAKDDILWDDMLERAVSVAEINKSDHVAACLRSSILLSLIDEKLKIRDPRAKDFAAKYQTIRFLPFLTKPAGFSLDWKGNSFKPETMFAATDLYTAEHQDIVCLLQPILNENSHSFRGCGSVSLAVKEFLGLLKKPTVDLVINQLKEVAKSVDDGITLYQENITNACYKYLHEALMQNEITKMSIIDKLKPFSFILVENAYVDSEKVSFHLNFEAAPYLYQLPNKYKNNFRELFETVGVRQSCTVEDFALVLESIDQERGTKQITEENFQLCRRIISEGIWSLIREKKQEFCEKNYGKILLPDTNLMLLPAKSLCYNDCPWIKVKDTTVKYCHADIPREVAVKLGAVPKRHKALERYASNVCFTTLGTEFGQKEKLTSRIKSILNAYPSEKEMLKELLQNADDAKATEICFVFDPRQHPVDRIFDDKWAPLQGPALCVYNNQPFTEDDVRGIQNLGKGTKEGNPYKTGQYGIGFNSVYHITDCPSFISGNDILCIFDPHARYAPGATSISPGRMFRDLDADFRTQFSDVLDLYLGTHFKLDNCTMFRFPLRNAEMAKVSEISSVPASDRMVQNLLDKLRSDGAELLMFLNHMEKISICEIDKSTGALNVLYSVKGKITDGDRLKRKQFHASVIDSVTKKRQLKDIPVQQITYTMDTEDSEGNLTTWLICNRSGFSSMEKVSKSVISAHKNQDITLFPRGGVAACITHNYKKPHRAFCFLPLSLETGLPFHVNGHFALDSARRNLWRDDNGVGVRSDWNNSLMTALIAPAYVELLIQLKKRYFPGSDPTLSVLQNTPIHVVKDTLKKFLSFFPVNRLDLQPDLYCLVKALYNCIHEDMKRLLPVVRAPNIDGSDLHSAVIITWINMSTSNKTRPFFDNLLQDELQHLKNADYNITTRKTVAENVYRLKHLLLEIGFNLVYNCDETANLYHCLIDADIPVSYVTPADIRSFLMTFSSPDTNCHIGKLPCRLQQTNLKLFHSLKLLVDYCFKDAEENEIEVEGLPLLITLDSVLQTFDAKRPKFLTTYHELIPSRKDLFMNTLYLKYSNILLNCKVAKVFDISSFADLLSSVLPREYKTKSCTKWKDNFASESWLKNAWHFISESVSVKEDQEETKPTFDIVVDTLKDWALLPGTKFTVSANQLVVPEGDVLLPLSLMHIAVFPNAQSDKVFHALMKAGCIQLALNKICSKDSAFVPLLSCHTANIESPTSILKALHYMVQTSTFRAEKLVENDFEALLMYFNCNLNHLMSQDDIKILKSLPCYKSISGRYVSIGKFGTCYVLTKSIPSAEVEKWTQSSSSAFLEEKIHLKELYEVIGCVPVDDLEVYLKHLLPKIENLSYDAKLEHLIYLKNRLSSAEELSEIKEQLFEKLESLLIIHDANSRLKQAKHFYDRTVRVFEVMLPEKLFIPNDFFKKLEQLIKPKNHVTFMTSWVEFLRNIGLKYILSQQQLLQFAKEISVRANTENWSKETLQNTVDILLHHIFQERMDLLSGNFLKELSLIPFLCPERAPAEFIRFHPQYQEVNGTLPLIKFNGAQVNPKFKQCDVLQLLWTSCPILPEKATPLSIKEQEGSDLGPQEQLEQVLNMLNVNLDPPLDKVINNCRNICNITTLDEEMVKTRAKVLRSIYEFLSAEKREFRFQLRGVAFVMVEDGWKLLKPEEVVINLEYESDFKPYLYKLPLELGTFHQLFKHLGTEDIISTKQYVEVLSRIFKNSEGKQLDPNEMRTVKRVVSGLFRSLQNDSVKVRSDLENVRDLALYLPSQDGRLVKSSILVFDDAPHYKSRIQGNIGVQMLVDLSQCYLGKDHGFHTKLIMLFPQKLRPRLLSSILEEQLDEETPKVCQFGALCSLQGRLQLLLSSEQFITGLIRIMKHENDNAFLANEEKAIRLCKALREGLKVSCFEKLQTTLRVKGFNPIPHSRSETFAFLKRFGNAVILLYIQHSDSKDINFLLALAMTLKSATDNLISDTSYLIAMLGCNDIYRIGEKLDSLGVKYDSSEPSKLELPMPGTPIPAEIHYTLLMDPMNVFYPGEYVGYLVDAEGGDIYGSYQPTYTYAIIVQEVEREDADNSSFLGKIYQIDIGYSEYKIVSSLDLYKFSRPEESSQSRDSAPSTPTSPTEFLTPGLRSIPPLFSGRESHKTSSKHQSPKKLKVNSLPEILKEVTSVVEQAWKLPESERKKIIRRLYLKWHPDKNPENHDIANEVFKHLQNEINRLEKQAFLDQNADRASRRTFSTSASRFQSDKYSFQRFYTSWNQEATSHKSERQQQNKEKCPPSAGQTYSQRFFVPPTFKSVGNPVEARRWLRQARANFSAARNDLHKNANEWVCFKCYLSTKLALIAADYAVRGKSDKDVKPTALAQKIEEYSQQLEGLTNDVHTLEAYGVDSLKTRYPDLLPFPQIPNDRFTSEVAMRVMECTACIIIKLENFMQQKV

SEQ ID NO: 4117 - protein, 3829 aa, Homo sapiens
MNTFWPGRELIVQWYPFDENRNHPSVSWLKMVWKNLYIHFSEDLTLFDEMPLIPRTILEEGQTCVELIRLRIPSLVILDDESEAQLPEFLADIVQKLGGFVLKKLDASIQHPLIKKYIHSPLPSAVLQIMEKMPLQKLCNQITSLLPTHKDALRKFLASLTDSSEKEKRIIQELAIFKRINHSSDQGISSYTKLKGCKVLHHTAKLPADLRLSISVIDSSDEATIRLANMLKIEQLKTTSCLKLVLKDIENAFYSHEEVTQLMLWVLENLSSLKNENPNVLEWLTPLKFIQISQEQMVSAGELFDPDIEVLKDLFCNEEGTYFPPSVFTSPDILHSLRQIGLKNEASLKEKDVVQVAKKIEALQVGACPDQDVLLKKAKTLLLVLNKNHTLLQSSEGKMTLKKIKWVPACKERPPNYPGSLVWKGDLCNLCAPPDMCDVGHAILIGSSLPLVESIHVNLEKALGIFTKPSLSAVLKHFKIVVDWYSSKTFSDEDYYQFQHILLEIYGFMHDHLNEGKDSFRALKFPWVWTGKKFCPLAQAVIKPIHDLDLQPYLHNVPKTMAKFHQLFKVCGSIEELTSDHISMVIQKIYLKSDQDLSEQESKQNLHLMLNIIRWLYSNQIPASPNTPVPIHHSKNPSKLIMKPIHECCYCDIKVDDLNDLLEDSVEPIILVHEDIPMKTAEWLKVPCLSTRLINPENMGFEQSGQREPLTVRIKNILEEYPSVSDIFKELLQNADDANATECSFLIDMRRNMDIRENLLDPGMAACHGPALWSFNNSQFSDSDFVNITRLGESLKRGEVDKVGKFGLGFNSVYHITDIPIIMSREFMIMFDPNINHISKHIKDKSNPGIKINWSKQQKRLRKFPNQFKPFIDVFGCQLPLTVEAPYSYNGTLFRLSFRTQQEAKVSEVSSTCYNTADIYSLVDEFSLCGHRLIIFTQSVKSMYLKYLKIEETNPSLAQDTVIIKKKSCSSKALNTPVLSVLKEAAKLMKTCSSSNKKLPSDEPKSSCILQITVEEFHHVFRRIADLQSPLFRGPDDDPAALFEMAKSGQSKKPSDELSQKTVECTTWLLCTCMDTGEALKFSLSESGRRLGLVPCGAVGVQLSEIQDQKWTVKPHIGEVFCYLPLRIKTGLPVHINGCFAVTSNRKEIWKTDTKGRWNTTFMRHVIVKAYLQVLSVLRDLATSGELMDYTYYAVWPDPDLVHDDFSVICQGFYEDIAHGKGKELTKVFSDGSTWVSMKNVRFLDDSILKRRDVGSAAFKIFLKYLKKTGSKNLCAVELPSSVKLGFEEAGCKQILLENTFSEKQFFSEVFFPNIQEIEAELRDPLMIFVLNEKVDEFSGVLRVTPCIPCSLEGHPLVLPSRLIHPEGRVAKLFDIKDGRFPYGSTQDYLNPIILIKLVQLGMAKDDILWDDMLERAVSVAEINKSDHVAACLRSSILLSLIDEKLKIRDPRAKDFAAKYQTIRFLPFLTKPAGFSLDWKGNSFKPETMFAATDLYTAEHQDIVCLLQPILNENSHSFRGCGSVSLAVKEFLGLLKKPTVDLVINQLKEVAKSVDDGITLYQENITNACYKYLHEALMQNEITKMSIIDKLKPFSFILVENAYVDSEKVSFHLNFEAAPYLYQLPNKYKNNFRELFETVGVRQSCTVEDFALVLESIDQERGTKQITEENFQLCRRIISEGIWSLIREKKQEFCEKNYGKILLPDTNLMLLPAKSLCYNDCPWIKVKDTTVKYCHADIPREVAVKLGAVPKRHKALERYASNVCFTTLGTEFGQKEKLTSRIKSILNAYPSEKEMLKELLQNADDAKATEICFVFDPRQHPVDRIFDDKWAPLQGPALCVYNNQPFTEDDVRGIQNLGKGTKEGNPYKTGQYGIGFNSVYHITDCPSFISGNDILCIFDPHARYAPGATSISPGRMFRDLDADFRTQFSDVLDLYLGTHFKLDNCTMFRFPLRNAEMAKVSEISSVPASDRMVQNLLDKLRSDGAELLMFLNHMEKISICEIDKSTGALNVLYSVKGKITDGDRLKRKQFHASVIDSVTKKRQLKDIPVQQITYTMDTEDSEGNLTTWLICNRSGFSSMEKVSKSVISAHKNQDITLFPRGGVAACITHNYKKPHRAFCFLPLSLETGLPFHVNGHFALDSARRNLWRDDNGVGVRSDWNNSLMTALIAPAYVELLIQLKKRYFPGSDPTLSVLQNTPIHVVKDTLKKFLSFFPVNRLDLQPDLYCLVKALYNCIHEDMKRLLPVVRAPNIDGSDLHSAVIITWINMSTSNKTRPFFDNLLQDELQHLKNADYNITTRKTVAENVYRLKHLLLEIGFNLVYNCDETANLYHCLIDADIPVSYVTPADIRSFLMTFSSPDTNCHIGKLPCRLQQTNLKLFHSLKLLVDYCFKDAEENEIEVEGLPLLITLDSVLQTFDAKRPKFLTTYHELIPSRKDLFMNTLYLKYSNILLNCKVAKVFDISSFADLLSSVLPREYKTKSCTKWKDNFASESWLKNAWHFISESVSVKEDQEETKPTFDIVVDTLKDWALLPGTKFTVSANQLVVPEGDVLLPLSLMHIAVFPNAQSDKVFHALMKAGCIQLALNKICSKDSAFVPLLSCHTANIESPTSILKALHYMVQTSTFRAEKLVENDFEALLMYFNCNLNHLMSQDDIKILKSLPCYKSISGRYVSIGKFGTCYVLTKSIPSAEVEKWTQSSSSAFLEEKIHLKELYEVIGCVPVDDLEVYLKHLLPKIENLSYDAKLEHLIYLKNRLSSAEELSEIKEQLFEKLESLLIIHDANSRLKQAKHFYDRTVRVFEVMLPEKLFIPNDFFKKLEQLIKPKNHVTFMTSWVEFLRNIGLKYILSQQQLLQFAKEISVRANTENWSKETLQNTVDILLHHIFQERMDLLSGNFLKELSLIPFLCPERAPAEFIRFHPQYQEVNGTLPLIKFNGAQVNPKFKQCDVLQLLWTSCPILPEKATPLSIKEQEGSDLGPQEQLEQVLNMLNVNLDPPLDKVINNCRNICNITTLDEEMVKTRAKVLRSIYEFLSAEKREFRFQLRGVAFVMVEDGWKLLKPEEVVINLEYESDFKPYLYKLPLELGTFHQLFKHLGTEDIISTKQYVEVLSRIFKNSEGKQLDPNEMRTVKRVVSGLFRSLQNDSVKVRSDLENVRDLALYLPSQDGRLVKSSILVFDDAPHYKSRIQGNIGVQMLVDLSQCYLGKDHGFHTKLIMLFPQKLRPRLLSSILEEQLDEETPKVCQFGALCSLQGRLQLLLSSEQFITGLIRIMKHENDNAFLANEEKAIRLCKALREGLKVSCFEKLQTTLRVKGFNPIPHSRSETFAFLKRFGNAVILLYIQHSDSKDINFLLALAMTLKSATDNLISDTSYLIAMLGCNDIYRIGEKLDSLGVKYDSSEPSKLELPMPGTPIPAEIHYTLLMDPMNVFYPGEYVGYLVDAEGGDIYGSYQPTYTYAIIVQEVEREDADNSSFLGKIYQIDIGYSEYKIVSSLDLYKFSRPEESSQSRDSAPSTPTSPTEFLTPGLRSIPPLFSGRESHKTSSKHQSPKKLKVNSLPEILKEVTSVVEQAWKLPESERKKIIRRLYLKWHPDKNPENHDIANEVFKHLQNEINRLEKQAFLDQNADRASRRTFSTSASRFQSDKYSFQRFYTSWNQEATSHKSERQQQNKEKCPPSAGQTYSQRFFVPPTFKSVGNPVEARRWLRQARANFSAARNDLHKNANEWVCFKCYLSTKLALIAADYAVRGKSDKDVKPTALAQKIEEYSQQLEGLTNDVHTLEAYGVDSLKTRYPDLLPFPQIPNDRFTSEVAMRVMECTACIIIKLENFMQQKV

SEQ ID NO: 4118 - protein, 1393 aa, Homo sapiens
MLSRPKPGESEVDLLHFQSQFLAAGAAPAVQLVKKGNRGGGDANSDRPPLQDHRDVVMLDNLPDLPPALVPSPPKRARPSPGHCLPEDEDPEERLRRHDQHITAVLTKIIERDTSSVAVNLPVPSGVAFPAVFLRSRDTQGKSATSGKRSIFAQEIAARRIAEAKGPSVGEVVPNVGPPEGAVTCETPTPRNQGCQLPGSSHSFQGPNLVTGKGLRDQEAEQEAQTIHEENIARLQAMAPEEILQEQQRLLAQLDPSLVAFLRSHSHTQEQTGETASEEQRPGGPSANVTKEEPLMSAFASEPRKRDKLEPEAPALALPVTPQKEWLHMDTVELEKLHWTQDLPPVRRQQTQERMQARFSLQGELLAPDVDLPTHLGLHHHGEEAERAGYSLQELFHLTRSQVSQQRALALHVLAQVISRAQAGEFGDRLAGSVLSLLLDAGFLFLLRFSLDDRVDGVIATAIRALRALLVAPGDEELLDSTFSWYHGALTFPLMPSQEDKEDEDEDEECPAGKAKRKSPEEESRPPPDLARHDVIKGLLATSLLPRLRYVLEVTYPGPAVVLDILAVLIRLARHSLESATRVLECPRLIETIVREFLPTSWSPVGAGPTPSLYKVPCATAMKLLRVLASAGRNIAARLLSSFDLRSRLCRIIAEAPQELALPPEEAEMLSTEALRLWAVAASYGQGGYLYRELYPVLMRALQVVPRELSTHPPQPLSMQRIASLLTLLTQLTLAAGSTPAETISDSAEASLSATPSLVTWTQVSGLQPLVEPCLRQTLKLLSRPEMWRAVGPVPVACLLFLGAYYQAWSQQPSSCPEDWLQDMQRLSEELLLPLLSQPTLGSLWDSLRHCSLLCNPLSCVPALEAPPSLVSLGCSGGCPRLSLAGSASPFPFLTALLSLLNTLAQIHKGLCGQLAAILAAPGLQNYFLQCVAPGAAPHLTPFSAWALRHEYHLQYLALALAQKAAALQPLPATHAALYHGMALALLSRLLPGSEYLTHELLLSCVFRLEFLPERTSGGPEAADFSDQLSLGSSRVPRCGQGTLLAQACQDLPSIRNCYLTHCSPARASLLASQALHRGELQRVPTLLLPMPTEPLLPTDWPFLPLIRLYHRASDTPSGLSPTDTMGTAMRVLQWVLVLESWRPQALWAVPPAARLARLMCVFLVDSELFRESPVQHLVAALLAQLCQPQVLPNLNLDCRLPGLTSFPDLYANFLDHFEAVSFGDHLFGALVLLPLQRRFSVTLRLALFGEHVGALRALSLPLTQLPVSLECYTVPPEDNLALLQLYFRTLVTGALRPRWCPVLYAVAVAHVNSFIFSQDPQSSDEVKAARRSMLQKTWLLADEGLRQHLLHYKLPNSTLPEGFELYSQLPPLRQHYLQRLTSTVLQNGVSET

SEQ ID NO: 4119 - protein, 1315 aa, Homo sapiens
MLSRPKPGESEVDLLHFQSQFLAAGAAPAVQLVKKGNRGGGDANSDRPPLQDHRDVVMLDNLPDLPPALVPSPPKRARPSPGHCLPEDEDPEERLRRHDQHITAVLTKIIERDTSSVAVNLPVPSGVAFPAVFLRSRDTQGKSATSGKRSIFAQEIAARRIAEAKGPSVGEVVPNVGPPEGAVTCETPTPRNQGCQLPGSSHSFQGPNLVTGKGLRDQEAEQEAQTIHEENIARLQAMAPEEILQEQQRLLAQLDPSLVAFLRSHSHTQEQTGETASEEQRPGGPSANVTKEEPLMSAFASEPRKRDKLEPEAPALALPVTPQKEWLHMDTVELEKLHWTQDLPPVRRQQTQERMQARFSLQGELLAPDVDLPTHLGLHHHGEEAERAGYSLQELFHLTRSQVSQQRALALHVLAQVISRAQAGEFGDRLAGSVLSLLLDAGFLFLLRFSLDDRVDGVIATAIRALRALLVAPGDEELLDSTFSWYHGALTFPLMPSQEDKEDEDEDEECPAGKAKRKSPEEESRPPPDLARHDVIKGLLATSLLPRLRYVLEVTYPGPAVVLDILAVLIRLARHSLESATRVLECPRLIETIVREFLPTSWSPVGAGPTPSLYKVPCATAMKLLRVLASAGRNIAARLLSSFDLRSRLCRIIAEAPQELALPPEEAEMLSTEALRLWAVAASYGQGGYLYRELYPVLMRALQVVPRELSTHPPQPLSMQRIASLLTLLTQLTLAAGSTPAETISDSAEASLSATPSLVTWTQVSGLQPLVEPCLRQTLKLLSRPEMWRAVGPVPVACLLFLGAYYQAWSQQPSSCPEDWLQDMQRLSEELLLPLLSQPTLGSLWDSLRHCSLLCNPLSCVPALEAPPSLVSLGCSGGCPRLSLAGSASPFPFLTALLSLLNTLAQIHKGLCGQLAAILAAPGLQNYFLQCVAPGAAPHLTPFSAWALRHEYHLQYLALALAQKAAALQPLPATHAALYHGMALALLSRLLPGSEYLTHELLLSCVFRLEFLPERTSGGPEAADFSDQLSLGSSRVPRCGQGTLLAQACQDLPSIRNCYLTHCSPARASLLASQALHRGELQRVPTLLLPMPTEPLLPTDWPFLPLIRLYHRASDTPSGLSPTDTMGTAMRVLQWVLVLESWRPQALWAVPPAARLARLMCVFLVDSELFRESPVQHLVAALLAQLCQPQVLPNLNLDCRLPGLTSFPDLYANFLDHFEAVSFGDHLFGALVLLPLQRRFSVTLRLALFGEHVGALRALSLPLTQVLSQPSRTCKGTLHWASGAVLSLEELWKTSASSSYLLGALRGLRESMKRA

SEQ ID NO: 4120 - protein, 772 aa, Homo sapiens
MKLLRVLASAGRNIAARLLSSFDLRSRLCRIIAEAPQELALPPEEAEMLSTEALRLWAVAASYGQGGYLYRELYPVLMRALQVVPRELSTHPPQPLSMQRIASLLTLLTQLTLAAGSTPAETISDSAEASLSATPSLVTWTQVSGLQPLVEPCLRQTLKLLSRPEMWRAVGPVPVACLLFLGAYYQAWSQQPSSCPEDWLQDMQRLSEELLLPLLSQPTLGSLWDSLRHCSLLCNPLSCVPALEAPPSLVSLGCSGGCPRLSLAGSASPFPFLTALLSLLNTLAQIHKGLCGQLAAILAAPGLQNYFLQCVAPGAAPHLTPFSAWALRHEYHLQYLALALAQKAAALQPLPATHAALYHGMALALLSRLLPGSEYLTHELLLSCVFRLEFLPERTSGGPEAADFSDQLSLGSSRVPRCGQGTLLAQACQDLPSIRNCYLTHCSPARASLLASQALHRGELQRVPTLLLPMPTEPLLPTDWPFLPLIRLYHRASDTPSGLSPTDTMGTAMRVLQWVLVLESWRPQALWAVPPAARLARLMCVFLVDSELFRESPVQHLVAALLAQLCQPQVLPNLNLDCRLPGLTSFPDLYANFLDHFEAVSFGDHLFGALVLLPLQRRFSVTLRLALFGEHVGALRALSLPLTQLPVSLECYTVPPEDNLALLQLYFRTLVTGALRPRWCPVLYAVAVAHVNSFIFSQDPQSSDEVKAARRSMLQKTWLLADEGLRQHLLHYKLPNSTLPEGFELYSQLPPLRQHYLQRLTSTVLQNGVSET

SEQ ID NO: 4121 - protein, 1499 aa, Homo sapiens
MKPLAIPANHGVMGQQEKHSLPADFTKLHLTDSLHPQVTHVSSSHSGCSITSDSGSSSLSDIYQATESEAGDMDLSGLPETAVDSEDDDDEEDIERASDPLMSRDIVRDCLEKDPIDRTDDDIEQLLEFMHQLPAFANMTMSVRRELCAVMVFAVVERAGTIVLNDGEELDSWSVILNGSVEVTYPDGKAEILCMGNSFGVSPTMDKEYMKGVMRTKVDDCQFVCIAQQDYCRILNQVEKNMQKVEEEGEIVMVKEHRELDRTGTRKGHIVIKGTSERLTMHLVEEHSVVDPTFIEDFLLTYRTFLSSPMEVGKKLLEWFNDPSLRDKVTRVVLLWVNNHFNDFEGDPAMTRFLEEFENNLEREKMGGHLRLLNIACAAKAKRRLMTLTKPSREAPLPFILLGGSEKGFGIFVDSVDSGSKATEAGLKRGDQILEVNGQNFENIQLSKAMEILRNNTHLSITVKTNLFVFKELLTRLSEEKRNGAPHLPKIGDIKKASRYSIPDLAVDVEQVIGLEKVNKKSKANTVGGRNKLKKILDKTRISILPQKPYNDIGIGQSQDDSIVGLRQTKHIPTALPVSGTLSSSNPDLLQSHHRILDFSATPDLPDQVLRVFKADQQSRYIMISKDTTAKEVVIQAIREFAVTATPDQYSLCEVSVTPEGVIKQRRLPDQLSKLADRIQLSGRYYLKNNMETETLCSDEDAQELLRESQISLLQLSTVEVATQLSMRNFELFRNIEPTEYIDDLFKLRSKTSCANLKRFEEVINQETFWVASEILRETNQLKRMKIIKHFIKIALHCRECKNFNSMFAIISGLNLAPVARLRTTWEKLPNKYEKLFQDLQDLFDPSRNMAKYRNVLNSQNLQPPIIPLFPVIKKDLTFLHEGNDSKVDGLVNFEKLRMIAKEIRHVGRMASVNMDPALMFRTRKKKWRSLGSLSQGSTNATVLDVAQTGGHKKRVRRSSFLNAKKLYEDAQMARKVKQYLSNLELEMDEESLQTLSLQCEPATNTLPKNPGDKKPVKSETSPVAPRAGSQQKAQSLPQPQQQPPPAHKINQGLQVPAVSLYPSRKKVPVKDLPPFGINSPQALKKILSLSEEGSLERHKKQAEDTISNASSQLSSPPTSPQSSPRKGYTLAPSGTVDNFSDSGHSEISSRSSIVSNSSFDSVPVSLHDERRQRHSVSIVETNLGMGRMERRTMIEPDQYSLGSYAPMSEGRGLYATATVISSPSTEELSQDQGDRASLDAADSGRGSWTSCSSGSHDNIQTIQHQRSWETLPFGHTHFDYSGDPAGLWASSSHMDQIMFSDHSTKYNRQNQSRESLEQAQSRASWASSTGYWGEDSEGDTGTIKRRGGKDVSIEAESSSLTSVTTEETKPVPMPAHIAVASSTTKGLIARKEGRYREPPPTPPGYIGIPITDFPEGHSHPARKPPDYNVALQRSRMVARSSDTAGPSSVQQPHGHPTSSRPVNKPQWHKPNESDPRLAPYQSQGFSTEEDEDEQVSAV

SEQ ID NO: 4122 - protein, 205 aa, Homo sapiens
MAASSLTVTLGRLASACSHSILRPSGPGAASLWSASRRFNSQSTSYLPGYVPKTSLSSPPWPEVVLPDPVEETRHHAEVVKKVNEMIVTGQYGRLFAVVHFASRQWKVTSEDLILIGNELDLACGERIRLEKVLLVGADNFTLLGKPLLGKDLVRVEATVIEKTESWPRIIMRFRKRKNFKKKRIVTTPQTVLRINSIEIAPCLL

SEQ ID NO: 4123 - protein, 120 aa, Homo sapiens
MIVTGQYGRLFAVVHFASRQWKVTSEDLILIGNELDLACGERIRLEKVLLVGADNFTLLGKPLLGKDLVRVEATVIEKTESWPRIIMRFRKRKNFKKKRIVTTPQTVLRINSIEIAPCLL

SEQ ID NO: 4124 - protein, 332 aa, Homo sapiens
MASGLVRLLQQGHRCLLAPVAPKLVPPVRGVKKGFRAAFRFQKELERQRLLRCPPPPVRRSEKPNWDYHAEIQAFGHRLQENFSLDLLKTAFVNSCYIKSEEAKRQQLGIEKEAVLLNLKSNQELSEQGTSFSQTCLTQFLEDEYPDMPTEGIKNLVDFLTGEEVVCHVARNLAVEQLTLSEEFPVPPAVLQQTFFAVIGALLQSSGPERTALFIRDFLITQMTGKELFEMWKIINPMGLLVEELKKRNVSAPESRLTRQSGGTTALPLYFVGLYCDKKLIAEGPGETVLVAEEEAARVALRKLYGFTENRRPWNYSKPKETLRAEKSITAS

SEQ ID NO: 4125 - protein, 311 aa, Homo sapiens
MAEASPHPGRYFCHCCSVEIVPRLPDYICPRCESGFIEELPEETRSTENGSAPSTAPTDQSRPPLEHVDQHLFTLPQGYGQFAFGIFDDSFEIPTFPPGAQADDGRDPESRRERDHPSRHRYGARQPRARLTTRRATGRHEGVPTLEGIIQQLVNGIITPATIPSLGPWGVLHSNPMDYAWGANGLDAIITQLLNQFENTGPPPADKEKIQALPTVPVTEEHVGSGLECPVCKDDYALGERVRQLPCNHLFHDGCIVPWLEQHDSCPVCRKSLTGQNTATNPPGLTGVSFSSSSSSSSSSSPSNENATSNS

SEQ ID NO: 4126 - protein, 327 aa, Homo sapiens
MAAVVEVEVGGGAAGERELDEVDMSDLSPEEQWRVEHARMHAKHRGHEAMHAEMVLILIATLVVAQLLLVQWKQRHPRSYNMVTLFQMWVVPLYFTVKLHWWRFLVIWILFSAVTAFVTFRATRKPLVQTTPRLVYKWFLLIYKISYATGIVGYMAVMFTLFGLNLLFKIKPEDAMDFGISLLFYGLYYGVLERDFAEMCADYMASTIGFYSESGMPTKHLSDSVCAVCGQQIFVDVSEEGIIENTYRLSCNHVFHEFCIRGWCIVGKKQTCPYCKEKVDLKRMFSNPWERPHVMYGQLLDWLRYLVAWQPVIIGVVQGINYILGLE

SEQ ID NO: 4127 - protein, 246 aa, Homo sapiens
MVTLFQMWVVPLYFTVKLHWWRFLVIWILFSAVTAFVTFRATRKPLVQTTPRLVYKWFLLIYKISYATGIVGYMAVMFTLFGLNLLFKIKPEDAMDFGISLLFYGLYYGVLERDFAEMCADYMASTIGFYSESGMPTKHLSDSVCAVCGQQIFVDVSEEGIIENTYRLSCNHVFHEFCIRGWCIVGKKQTCPYCKEKVDLKRMFSNPWERPHVMYGQLLDWLRYLVAWQPVIIGVVQGINYILGLE

SEQ ID NO: 4128 - protein, 287 aa, Homo sapiens
MATVMAATAAERAVLEEEFRWLLHDEVHAVLKQLQDILKEASLRFTLPGSGTEGPAKQENFILGSCGTDQVKGVLTLQGDALSQADVNLKMPRNNQLLHFAFREDKQWKLQQIQDARNHVSQAIYLLTSRDQSYQFKTGAEVLKLMDAVMLQLTRARNRLTTPATLTLPEIAASGLTRMFAPALPSDLLVNVYINLNKLCLTVYQLHALQPNSTKNFRPAGGAVLHSPGAMFEWGSQRLEVSHVHKVECVIPWLNDALVYFTVSLQLCQQLKDKISVFSSYWSYRPF

SEQ ID NO: 4129 - protein, 212 aa, Homo sapiens
MAQTDKPTCIPPELPKMLKEFAKAAIRAQPQDLIQWGADYFEALSRGETPPVRERSERVALCNWAELTPELLKILHSQVAGRLIIRAEELAQMWKVVNLPTDLFNSVMNVGRFTEEIEWLKFLALACSALGVTITKTLKIVCEVLSCDHNGGLPRIPFSTFQFLYTYIAEVDGEICASHVSRMLNYIEQEVIGPDGLITVNDFTQNPRVWLE

SEQ ID NO: 4130 - protein, 120 aa, Homo sapiens
MWKVVNLPTDLFNSVMNVGRFTEEIEWLKFLALACSALGVTITKTLKIVCEVLSCDHNGGLPRIPFSTFQFLYTYIAEVDGEICASHVSRMLNYIEQEVIGPDGLITVNDFTQNPRVWLE

SEQ ID NO: 4131 - protein, 203 aa, Homo sapiens
METLSQDSLLECQICFNYYSPRRRPKLLDCKHTCCSVCLQQMRTSQKDVRCPWCRGVTKLPPGFSVSQLPDDPEVLAVIAIPHTSEHTPVFIKLPSNGCYMLPLPISKERALLPGDMGCRLLPGSQQKSVTVVTIPAEQQPLQGGAPQEAVEEEQDRRGVVKSSTWSGVCTVILVACVLVFLLGIVLHNMSCISKRFTVISCG

SEQ ID NO: 4132 - protein, 784 aa, Homo sapiens
MAQLLNSILSVIDVFHKYAKGNGDCALLCKEELKQLLLAEFGDILQRPNDPETVETILNLLDQDRDGHIDFHEYLLLVFQLVQACYHKLDNKSHGGRTSQQERGQEGAQDCKFPGNTGRQHRQRHEEERQNSHHSQPERQDGDSHHGQPERQDRDSHHGQSEKQDRDSHHSQPERQDRDSHHNQSERQDKDFSFDQSERQSQDSSSGKKVSHKSTSGQAKWQGHIFALNRCEKPIQDSHYGQSERHTQQSETLGQASHFNQTNQQKSGSYCGQSERLGQELGCGQTDRQGQSSHYGQTDRQDQSYHYGQTDRQGQSSHYSQTDRQGQSSHYSQPDRQGQSSHYGQMDRKGQCYHYDQTNRQGQGSHYSQPNRQGQSSHYGQPDTQDQSSHYGQTDRQDQSSHYGQTERQGQSSHYSQMDRQGQGSHYGQTDRQGQSSHYGQPDRQGQNSHYGQTDRQGQSSHYGQTDRQGQSSHYSQPDKQGQSSHYGKIDRQDQSYHYGQPDGQGQSSHYGQTDRQGQSFHYGQPDRQGQSSHYSQMDRQGQSSHYGQTDRQGQSSHYGQTDRQGQSYHYGQTDRQGQSSHYIQSQTGEIQGQNKYFQGTEGTRKASYVEQSGRSGRLSQQTPGQEGYQNQGQGFQSRDSQQNGHQVWEPEEDSQHHQHKLLAQIQQERPLCHKGRDWQSCSSEQGHRQAQTRQSHGEGLSHWAEEEQGHQTWDRHSHESQEGPCGTQDRRTHKDEQNHQRRDRQTHEHEQSHQRRDRQTHEDKQNRQRRDRQTHEDEQNHQR

SEQ ID NO: 4133 - protein, 958 aa, Homo sapiens
MLKSKTFLKKTRAGGVMKIVREHYLRDDIGCGAPGCAACGGAHEGPALEPQPQDPASSVCPQPHYLLPDTNVLLHQIDVLEDPAIRNVIVLQTVLQEVRNRSAPVYKRIRDVTNNQEKHFYTFTNEHHRETYVEQEQGENANDRNDRAIRVAAKWYNEHLKKMSADNQLQVIFITNDRRNKEKAIEEGIPAFTCEEYVKSLTANPELIDRLACLSEEGNEIESGKIIFSEHLPLSKLQQGIKSGTYLQGTFRASRENYLEATVWIHGDNEENKEIILQGLKHLNRAVHEDIVAVELLPKSQWVAPSSVVLHDEGQNEEDVEKEEETERMLKTAVSEKMLKPTGRVVGIIKRNWRPYCGMLSKSDIKESRRHLFTPADKRIPRIRIETRQASTLEGRRIIVAIDGWPRNSRYPNGHFVRNLGDVGEKETETEVLLLEHDVPHQPFSQAVLSFLPKMPWSITEKDMKNREDLRHLCICSVDPPGCTDIDDALHCRELENGNLEVGVHIADVSHFIRPGNALDQESARRGTTVYLCEKRIDMVPELLSSNLCSLKCDVDRLAFSCIWEMNHNAEILKTKFTKSVINSKASLTYAEAQLRIDSANMNDDITTSLRGLNKLAKILKKRRIEKGALTLSSPEVRFHMDSETHDPIDLQTKELRETNSMVEEFMLLANISVAKKIHEEFSEHALLRKHPAPPPSNYEILVKAARSRNLEIKTDTAKSLAESLDQAESPTFPYLNTLLRILATRCMMQAVYFCSGMDNDFHHYGLASPIYTHFTSPIRRYADVIVHRLLAVAIGADCTYPELTDKHKLADICKNLNFRHKMAQYAQRASVAFHTQLFFKSKGIVSEEAYILFVRKNAIVVLIPKYGLEGTVFFEEKDKPNPQLIYDDEIPSLKIEDTVFHVFDKVKVKIMLDSSNLQHQKIRMSLVEPQIPGISIPTDTSNMDLNGPKKKKMKLGK

SEQ ID NO: 4134 - protein, 928 aa, Homo sapiens
MLKSKTFLKKTRAGGVMKIVREHYLRDDIGCGAPGCAACGGAHEGPALEPQPQDPASSVCPQPHYLLPDTNVLLHQIVSAWRPGTWASVASSLRLPGSLETYVEQEQGENANDRNDRAIRVAAKWYNEHLKKMSADNQLQVIFITNDRRNKEKAIEEGIPAFTCEEYVKSLTANPELIDRLACLSEEGNEIESGKIIFSEHLPLSKLQQGIKSGTYLQGTFRASRENYLEATVWIHGDNEENKEIILQGLKHLNRAVHEDIVAVELLPKSQWVAPSSVVLHDEGQNEEDVEKEEETERMLKTAVSEKMLKPTGRVVGIIKRNWRPYCGMLSKSDIKESRRHLFTPADKRIPRIRIETRQASTLEGRRIIVAIDGWPRNSRYPNGHFVRNLGDVGEKETETEVLLLEHDVPHQPFSQAVLSFLPKMPWSITEKDMKNREDLRHLCICSVDPPGCTDIDDALHCRELENGNLEVGVHIADVSHFIRPGNALDQESARRGTTVYLCEKRIDMVPELLSSNLCSLKCDVDRLAFSCIWEMNHNAEILKTKFTKSVINSKASLTYAEAQLRIDSANMNDDITTSLRGLNKLAKILKKRRIEKGALTLSSPEVRFHMDSETHDPIDLQTKELRETNSMVEEFMLLANISVAKKIHEEFSEHALLRKHPAPPPSNYEILVKAARSRNLEIKTDTAKSLAESLDQAESPTFPYLNTLLRILATRCMMQAVYFCSGMDNDFHHYGLASPIYTHFTSPIRRYADVIVHRLLAVAIGADCTYPELTDKHKLADICKNLNFRHKMAQYAQRASVAFHTQLFFKSKGIVSEEAYILFVRKNAIVVLIPKYGLEGTVFFEEKDKPNPQLIYDDEIPSLKIEDTVFHVFDKVKVKIMLDSSNLQHQKIRMSLVEPQIPGISIPTDTSNMDLNGPKKKKMKLGK

SEQ ID NO: 4135 - protein, 758 aa, Homo sapiens
MAPAMQPAEIQFAQRLASSEKGIRDRAVKKLRQYISVKTQRETGGFSQEELLKIWKGLFYCMWVQDEPLLQEELANTIAQLVHAVNNSAAQHLFIQTFWQTMNREWKGIDRLRLDKYYMLIRLVLRQSFEVLKRNGWEESRIKVFLDVLMKEVLCPESQSPNGVRFHFIDIYLDELSKVGGKELLADQNLKFIDPFCKIAAKTKDHTLVQTIARGVFEAIVDQSPFVPEETMEEQKTKVGDGDLSAEEIPENEVSLRRAVSKKKTALGKNHSRKDGLSDERGRDDCGTFEDTGPLLQFDYKAVADRLLEMTSRKNTPHFNRKRLSKLIKKFQDLSEGSSISQLSFAEDISADEDDQILSQGKHKKKGNKLLEKTNLEKEKGSRVFCVEEEDSESSLQKRRRKKKKKHHLQPENPGPGGAAPSLEQNRGREPEASGLKALKARVAEPGAEATSSTGEESGSEHPPAVPMHNKRKRPRKKSPRAHREMLESAVLPPEDMSQSGPSGSHPQGPRGSPTGGAQLLKRKRKLGVVPVNGSGLSTPAWPPLQQEGPPTGPAEGANSHTTLPQRRRLQKKKAGPGSLELCGLPSQKTASLKKRKKMRVMSNLVEHNGVLESEAGQPQALGSSGTCSSLKKQKLRAESDFVKFDTPFLPKPLFFRRAKSSTATHPPGPAVQLNKTPSSSKKVTFGLNRNMTAEFKKTDKSILVSPTGPSRVAFDPEQKPLHGVLKTPTSSPASSPLVAKKPLTTTPRRRPRAMDFF

SEQ ID NO: 4136 - protein, 740 aa, Homo sapiens
MAPAMQPAEIQFAQRLASSEKGIRDRAVKKLRQYISVKTQRETGGFSQEELLQEELANTIAQLVHAVNNSAAQHLFIQTFWQTMNREWKGIDRLRLDKYYMLIRLVLRQSFEVLKRNGWEESRIKVFLDVLMKEVLCPESQSPNGVRFHFIDIYLDELSKVGGKELLADQNLKFIDPFCKIAAKTKDHTLVQTIARGVFEAIVDQSPFVPEETMEEQKTKVGDGDLSAEEIPENEVSLRRAVSKKKTALGKNHSRKDGLSDERGRDDCGTFEDTGPLLQFDYKAVADRLLEMTSRKNTPHFNRKRLSKLIKKFQDLSEGSSISQLSFAEDISADEDDQILSQGKHKKKGNKLLEKTNLEKEKGSRVFCVEEEDSESSLQKRRRKKKKKHHLQPENPGPGGAAPSLEQNRGREPEASGLKALKARVAEPGAEATSSTGEESGSEHPPAVPMHNKRKRPRKKSPRAHREMLESAVLPPEDMSQSGPSGSHPQGPRGSPTGGAQLLKRKRKLGVVPVNGSGLSTPAWPPLQQEGPPTGPAEGANSHTTLPQRRRLQKKKAGPGSLELCGLPSQKTASLKKRKKMRVMSNLVEHNGVLESEAGQPQALGSSGTCSSLKKQKLRAESDFVKFDTPFLPKPLFFRRAKSSTATHPPGPAVQLNKTPSSSKKVTFGLNRNMTAEFKKTDKSILVSPTGPSRVAFDPEQKPLHGVLKTPTSSPASSPLVAKKPLTTTPRRRPRAMDFF

SEQ ID NO: 4137 - protein, 280 aa, Homo sapiens
MVARRRKCAARDPEDRIPSPLGYAAIPIKFSEKQQASHYLYVRAHGVRQGTKSTWPQKRTLFVLNVPPYCTEESLSRLLSTCGLVQSVELQEKPDLAESPKESRSKFFHPKPVPGFQVAYVVFQKPSGVSAALALKGPLLVSTESHPVKSGIHKWISDYADSVPDPEALRVEVDTFMEAYDQKIAEEEAKAKEEEGVPDEEGWVKVTRRGRRPVLPRTEAASLRVLERERRKRSRKELLNFYAWQHRESKMEHLAQLRKKFEEDKQRIELLRAQRKFRPY

SEQ ID NO: 4138 - protein, 265 aa, Homo sapiens
MGQILGKIMMSHQPQPQEERSPQRSTSGYPLQEVVDDEVSGPSAPGVDPSPPRRSLGWKRKRECLDESDDEPEKELAPEPEETWVAETLCGLKMKAKRRRVSLVLPEYYEAFNRLLEDPVIKRLLAWDKDLRVSDKYLLAMVIAYFSRAGLPSWQYQRIHFFLALYLANDMEEDDEAPKQNIFYFLYEETRSHIPLLSELWFQLCRYMNPRARKNCSQIALFRKYRFHFFCSMRCRAWVSLEELEEIQAYDPEHWVWARDRAHLS

SEQ ID NO: 4139 - protein, 1246 aa, Homo sapiens
MMETERLVLPPPDPLDLPLRAVELGCTGHWELLNLPGAPESSLPHGLPPCAPDLQQEAEQLFLSSPAWLPLHGVEHSARKWQRKTDPWSLLAVLGAPVPSDLQAQRHPTTGQILGYKEVLLENTNLSATTSLSLRRPPGPASQSLWGNPTQYPFWPGGMDEPTITDLNTREEAEEEIDFEKDLLTIPPGFKKGMDFAPKDCPTPAPGLLSLSCMLEPLDLGGGDEDENEAVGQPGGPRGDTVSASPCSAPLARASSLEDLVLKEASTAVSTPEAPEPPSQEQWAIPVDATSPVGDFYRLIPQPAFQWAFEPDVFQKQAILHLERHDSVFVAAHTSAGKTVVAEYAIALAQKHMTRTIYTSPIKALSNQKFRDFRNTFGDVGLLTGDVQLHPEASCLIMTTEILRSMLYSGSDVIRDLEWVIFDEVHYINDVERGVVWEEVLIMLPDHVSIILLSATVPNALEFADWIGRLKRRQIYVISTVTRPVPLEHYLFTGNSSKTQGELFLLLDSRGAFHTKGYYAAVEAKKERMSKHAQTFGAKQPTHQGGPAQDRGVYLSLLASLRTRAQLPVVVFTFSRGRCDEQASGLTSLDLTTSSEKSEIHLFLQRCLARLRGSDRQLPQVLHMSELLNRGLGVHHSGILPILKEIVEMLFSRGLVKVLFATETFAMGVNMPARTVVFDSMRKHDGSTFRDLLPGEYVQMAGRAGRRGLDPTGTVILLCKGRVPEMADLHRMMMGKPSQLQSQFRLTYTMILNLLRVDALRVEDMMKRSFSEFPSRKDSKAHEQALAELTKRLGALEEPDMTGQLVDLPEYYSWGEELTETQHMIQRRIMESVNGLKSLSAGRVVVVKNQEHHNALGVILQVSSNSTSRVFTTLVLCDKPLSQDPQDRGPATAEVPYPDDLVGFKLFLPEGPCDHTVVKLQPGDMAAITTKVLRVNGEKILEDFSKRQQPKFKKDPPLAAVTTAVQELLRLAQAHPAGPPTLDPVNDLQLKDMSVVEGGLRARKLEELIQGAQCVHSPRFPAQYLKLRERMQIQKEMERLRFLLSDQSLLLLPEYHQRVEVLRTLGYVDEAGTVKLAGRVACAMSSHELLLTELMFDNALSTLRPEEIAALLSGLVCQSPGDAGDQLPNTLKQGIERVRAVAKRIGEVQVACGLNQTVEEFVGELNFGLVEVVYEWARGMPFSELAGLSGTPEGLVVRCIQRLAEMCRSLRGAARLVGEPVLGAKMETAATLLRRDIVFAASLYTQ

SEQ ID NO: 4140 - protein, 561 aa, Homo sapiens
MAKERCLKKSFQDSLEDIKKRMKEKRNKNLAEIGKRRSFIAAPCQIITNTSTLLKNYQDNNKMLVLALENEKSKVKEAQDIILQLRKECYYLTCQLYALKGKLTSQQTVEPAQNQEICSSGMDPNSDDSSRNLFVKDLPQIPLEETELPGQGESFQIEDQIPTIPQDTLGVDFDSGEAKSTDNVLPRTVSVRSSLKKHCNSICQFDSLDDFETSHLAGKSFEFERVGFLDPLVNMHIPENVQHNACQWSKDQVNLSPKLIQPGTFTKTKEDILESKSEQTKSKQRDTQERKREEKRKANRRKSKRMSKYKENKSENKKTVPQKKMHKSVSSNDAYNFNLEEGVHLTPFRQKVSNDSNREENNESEVSLCESSGSGDDSDDLYLPTCKYIQNPTSNSDRPVTRPLAKRALKYTDEKETEGSKPTKTPTTTPPETQQSPHLSLKDITNVSLYPVVKIRRLSLSPKKNKASPAVALPKRRCTASVNYKEPTLASKLRRGDPFTDLCFLNSPIFKQKKDLRRSKKRALEVSPAKEAIFILYYVREFVSRFPDCRKCKLETHICLR

SEQ ID NO: 4141 - protein, 309 aa, Homo sapiens
MAKERCLKKSFQDSLEDIKKRMKEKRNKNLAEIGKRRSFIAAPCQIITNTSTLLKNYQDNNKMLVLALENEKSKVKEAQDIILQLRKECYYLTCQLYALKGKLTSQQTVEPAQNQEICSSGMDPNSDDSSRNLFVKDLPQIPLEETELPGQGESFQIEDQIPTIPQDTLGVDFDSATPPETQQSPHLSLKDITNVSLYPVVKIRRLSLSPKKNKASPAVALPKRRCTASVNYKEPTLASKLRRGDPFTDLCFLNSPIFKQKKDLRRSKKRALEVSPAKEAIFILYYVREFVSRFPDCRKCKLETHICLR

SEQ ID NO: 4142 - protein, 292 aa, Homo sapiens
MAKERCLKKSFQDSLEDIKKRMKEKRNKNLAEIGKRRSFIAAPCQIITNTSTLLKNYQDNNKMLVLALENEKSKVKEAQDIILQLRKECYYLTCQLYALKGKLTSQQTVEPAQNQEICSSGMDPNSDDSSRNLFVKDLPQIPLEETELPGQGESFQIEATPPETQQSPHLSLKDITNVSLYPVVKIRRLSLSPKKNKASPAVALPKRRCTASVNYKEPTLASKLRRGDPFTDLCFLNSPIFKQKKDLRRSKKRALEVSPAKEAIFILYYVREFVSRFPDCRKCKLETHICLR

SEQ ID NO: 4143 - protein, 275 aa, Homo sapiens
MAKERCLKKSFQDSLEDIKKRMKEKRNKNLAEIGKRRSFIAAPCQIITNTSTLLKNYQDNNKMLVLALENEKSKVKEAQDIILQLRKECYYLTCQLYALKGKLTSQQTVEPAQNQEICSSGMDPNSDDSSRNLFVKDLPQIPLEETELPGQGESFQIEDQIPTIPQDTLGVDFDSATPPETQQSPHLSLKDITNVSLYPVVKIRRLSLSPKKNKASPAVALPKRRCTASVNYKEPTLASKLRRGDPFTDLCFLNSPIFKQKKDLRRSKKSMKQIQ

SEQ ID NO: 4144 - protein, 258 aa, Homo sapiens
MAKERCLKKSFQDSLEDIKKRMKEKRNKNLAEIGKRRSFIAAPCQIITNTSTLLKNYQDNNKMLVLALENEKSKVKEAQDIILQLRKECYYLTCQLYALKGKLTSQQTVEPAQNQEICSSGMDPNSDDSSRNLFVKDLPQIPLEETELPGQGESFQIEATPPETQQSPHLSLKDITNVSLYPVVKIRRLSLSPKKNKASPAVALPKRRCTASVNYKEPTLASKLRRGDPFTDLCFLNSPIFKQKKDLRRSKKSMKQIQ

SEQ ID NO: 4145 - protein, 527 aa, Homo sapiens
MAKERCLKKSFQDSLEDIKKRMKEKRNKNLAEIGKRRSFIAAPCQIITNTSTLLKNYQDNNKMLVLALENEKSKVKEAQDIILQLRKECYYLTCQLYALKGKLTSQQTVEPAQNQEICSSGMDPNSDDSSRNLFVKDLPQIPLEETELPGQGESFQIEDQIPTIPQDTLGVDFDSGEAKSTDNVLPRTVSVRSSLKKHCNSICQFDSLDDFETSHLAGKSFEFERVGFLDPLVNMHIPENVQHNACQWSKDQVNLSPKLIQPGTFTKTKEDILESKSEQTKSKQRDTQERKREEKRKANRRKSKRMSKYKENKSENKKTVPQKKMHKSVSSNDAYNFNLEEGVHLTPFRQKVSNDSNREENNESEVSLCESSGSGDDSDDLYLPTCKYIQNPTSNSDRPVTRPLAKRALKYTDEKETEGSKPTKTPTTTPPETQQSPHLSLKDITNVSLYPVVKIRRLSLSPKKNKASPAVALPKRRCTASVNYKEPTLASKLRRGDPFTDLCFLNSPIFKQKKDLRRSKKSMKQIQ

SEQ ID NO: 4146 - protein, 215 aa, Homo sapiens
MAKERCLKKSFQDSLEDIKKRMKEKRNKNLAEIGKRRSFIAAPCQIITNTSTLLKNYQDNNKMLVLALENEKSKVKEAQDIILQLRKECYYLTCQLYALKGKLTSQQTVEPAQNQEICSSGMDPNSDDSSRNLFVKDLPQIPLEETELPGQGESFQIEDQIPTIPQDTLGVDFDSGALEVSPAKEAIFILYYVREFVSRFPDCRKCKLETHICLR

SEQ ID NO: 4147 - protein, 1222 aa, Homo sapiens
MEAARTERPAGRPGAPLVRTGLLLLSTWVLAGAEITWDATGGPGRPAAPASRPPALSPLSPRAVASQWPEELASARRAAVLGRRAGPELLPQQGGGRGGEMQVEAGGTSPAGERRGRGIPAPAKLGGARRSRRAQPPITQERGDAWATAPADGSRGSRPLAKGSREEVKAPRAGGSAAEDLRLPSTSFALTGDSAHNQAMVHWSGHNSSVILILTKLYDFNLGSVTESSLWRSTDYGTTYEKLNDKVGLKTVLSYLYVNPTNKRKIMLLSDPEMESSILISSDEGATYQKYRLTFYIQSLLFHPKQEDWVLAYSLDQKLYSSMDFGRRWQLMHERITPNRFYWSVAGLDKEADLVHMEVRTTDGYAHYLTCRIQECAETTRSGPFARSIDISSLVVQDEYIFIQVTTSGRASYYVSYRREAFAQIKLPKYSLPKDMHIISTDENQVFAAVQEWNQNDTYNLYISDTRGIYFTLAMENIKSSRGLMGNIIIELYEVAGIKGIFLANKKVDDQVKTYITYNKGRDWRLLQAPDVDLRGSPVHCLLPFCSLHLHLQLSENPYSSGRISSKETAPGLVVATGNIGPELSYTDIGVFISSDGGNTWRQIFDEEYNVWFLDWGGALVAMKHTPLPVRHLWVSFDEGHSWDKYGFTSVPLFVDGALVEAGMETHIMTVFGHFSLRSEWQLVKVDYKSIFSRHCTKEDYQTWHLLNQGEPCVMGERKIFKKRKPGAQCALGRDHSGSVVSEPCVCANWDFECDYGYERHGESQCVPAFWYNPASPSKDCSLGQSYLNSTGYRRIVSNNCTDGLREKYTAKAQMCPGKAPRGLHVVTTDGRLVAEQGHNATFIILMEEGDLQRTNIQLDFGDGIAVSYANFSPIEDGIKHVYKSAGIFQVTAYAENNLGSDTAVLFLHVVCPVEHVHLRVPFVAIRNKEVNISAVVWPSQLGTLTYFWWFGNSTKPLITLDSSISFTFLAEGTDTITVQVAAGNALIQDTKEIAVHEYFQSQLLSFSPNLDYHNPDIPEWRKDIGNVIKRALVKVTSVPEDQILIAVFPGLPTSAELFILPPKNLTERRKGNEGDLEQIVETLFNALNQNLVQFELKPGVQVIVYVTQLTLAPLVDSSAGHSSSAMLMLLSVVFVGLAVFLIYKFKRKIPWINIYAQVQHDKEQEMIGSVSQSENAPKITLSDFTEPEELLDKELDTRVIGGIATIANSESTKEIPNCTSV

SEQ ID NO: 4148 - protein, 728 aa, Homo sapiens
MEAAAGGRGCFQPHPGLQKTLEQFHLSSMSSLGGPAAFSARWAQEAYKKESAKEAGAAAVPAPVPAATEPPPVLHLPAIQPPPPVLPGPFFMPSDRSTERCETVLEGETISCFVVGGEKRLCLPQILNSVLRDFSLQQINAVCDELHIYCSRCTADQLEILKVMGILPFSAPSCGLITKTDAERLCNALLYGGAYPPPCKKELAASLALGLELSERSVRVYHECFGKCKGLLVPELYSSPSAACIQCLDCRLMYPPHKFVVHSHKALENRTCHWGFDSANWRAYILLSQDYTGKEEQARLGRCLDDVKEKFDYGNKYKRRVPRVSSEPPASIRPKTDDTSSQSPAPSEKDKPSSWLRTLAGSSNKSLGCVHPRQRLSAFRPWSPAVSASEKELSPHLPALIRDSFYSYKSFETAVAPNVALAPPAQQKVVSSPPCAAAVSRAPEPLATCTQPRKRKLTVDTPGAPETLAPVAAPEEDKDSEAEVEVESREEFTSSLSSLSSPSFTSSSSAKDLGSPGARALPSAVPDAAAPADAPSGLEAELEHLRQALEGGLDTKEAKEKFLHEVVKMRVKQEEKLSAALQAKRSLHQELEFLRVAKKEKLREATEAKRNLRKEIERLRAENEKKMKEANESRLRLKRELEQARQARVCDKGCEAGRLRAKYSAQIEDLQVKLQHAEADREQLRADLLREREAREHLEKVVKELQEQLWPRARPEAAGSEGAAELEP

SEQ ID NO: 4149 - protein, 1312 aa, Homo sapiens
MEEEDESRGKTEESGEDRGDGPPDRDPTLSPSAFILRAIQQAVGSSLQGDLPNDKDGSRCHGLRWRRCRSPRSEPRSQESGGTDTATVLDMATDSFLAGLVSVLDPPDTWVPSRLDLRPGESEDMLELVAEVRIGDRDPIPLPVPSLLPRLRAWRTGKTVSPQSNSSRPTCARHLTLGTGDGGPAPPPAPSSASSSPSPSPSSSSPSPPPPPPPPAPPAPPAPRFDIYDPFHPTDEAYSPPPAPEQKYDPFEPTGSNPSSSAGTPSPEEEEEEEEEEEEEEEDEEEEEGLSQSISRISETLAGIYDDNSLSQDFPGDESPRPDAQPTQPTPAPGTPPQVDSTRADGAMRRRVFVVGTEAEACREGKVSVEVVTAGGAALPPPLLPPGDSEIEEGEIVQPEEEPRLALSLFRPGGRAARPTPAASATPTAQPLPQPPAPRAPEGDDFLSLHAESDGEGALQVDLGEPAPAPPAADSRWGGLDLRRKILTQRRERYRQRSPSPAPAPAPAAAAGPPTRKKSRRERKRSGEAKEAASSSSGTQPAPPAPASPWDSKKHRSRDRKPGSHASSSARRRSRSRSRSRSTRRRSRSTDRRRGGSRRSRSREKRRRRRRSASPPPATSSSSSSRRERHRGKHRDGGGSKKKKKRSRSRGEKRSGDGSEKAPAPAPPPSGSTSCGDRDSRRRGAVPPSIQDLTDHDLFAIKRTITVGRLDKSDPRGPSPAPASSPKREVLYDSEGLSGEERGGKSSQKDRRRSGAASSSSSSREKGSRRKALDGGDRDRDRDRDRDRDRSSKKARPPKESAPSSGPPPKPPVSSGSGSSSSSSSCSSRKVKLQSKVAVLIREGVSSTTPAKDAASAGLGSIGVKFSRDRESRSPFLKPDERAPTEMAKAAPGSTKPKKTKVKAKAGAKKTKGTKGKTKPSKTRKKVRSGGGSGGSGGQVSLKKSKADSCSQAAGTKGAEETSWSGEERAAKVPSTPPPKAAPPPPALTPDSQTVDSSCKTPEVSFLPEEATEEAGVRGGAEEEEEEEEEEEEEEEEEEQQPATTTATSTAAAAPSTAPSAGSTAGDSGAEDGPASRVSQLPTLPPPMPWNLPAGVDCTTSGVLALTALLFKMEEANLASRAKAQELIQATNQILSHRKPPSSLGMTPAPVPTSLGLPPGPSSYLLPGSLPLGGCGSTPPTPTGLAATSDKREGSSSSEGRGDTDKYLKKLHTQERAVEEVKLAIKPYYQKKDITKEEYKDILRKAVHKICHSKSGEINPVKVSNLVRAYVQRYRYFRKHGRKPGDPPGPPRPPKEPGPPDKGGPGLPLPPL

SEQ ID NO: 4150 - protein, 159 aa, Homo sapiens
MSRRAPGSRLSSGGTNYSRSWNDWQPRTDSASADPGNLKYSSSRDRGGSSSYGLQPSNSAVVSRQRHDDTRVHADIQNDEKGGYSVNGGSGENTYGRKSLGQELRVNNVTSPEFTSVQHGSRALATKDMRKSQERSMSYCDESRLSNLLRRITREDDRD

SEQ ID NO: 4151 - protein, 467 aa, Homo sapiens
MSSILPFTPPVVKRLLGWKKSAGGSGGAGGGEQNGQEEKWCEKAVKSLVKKLKKTGRLDELEKAITTQNCNTKCVTIPSTCSEIWGLSTPNTIDQWDTTGLYSFSEQTRSLDGRLQVSHRKGLPHVIYCRLWRWPDLHSHHELKAIENCEYAFNLKKDEVCVNPYHYQRVETPVLPPVLVPRHTEILTELPPLDDYTHSIPENTNFPAGIEPQSNYIPETPPPGYISEDGETSDQQLNQSMDTGSPAELSPTTLSPVNHSLDLQPVTYSEPAFWCSIAYYELNQRVGETFHASQPSLTVDGFTDPSNSERFCLGLLSNVNRNATVEMTRRHIGRGVRLYYIGGEVFAECLSDSAIFVQSPNCNQRYGWHPATVCKIPPGCNLKIFNNQEFAALLAQSVNQGFEAVYQLTRMCTIRMSFVKGWGAEYRRQTVTSTPCWIELHLNGPLQWLDKVLTQMGSPSVRCSSMS

SEQ ID NO: 4152 - protein, 437 aa, Homo sapiens
MSSILPFTPPVVKRLLGWKKSAGGSGGAGGGEQNGQEEKWCEKAVKSLVKKLKKTGRLDELEKAITTQNCNTKCVTIPRSLDGRLQVSHRKGLPHVIYCRLWRWPDLHSHHELKAIENCEYAFNLKKDEVCVNPYHYQRVETPVLPPVLVPRHTEILTELPPLDDYTHSIPENTNFPAGIEPQSNYIPETPPPGYISEDGETSDQQLNQSMDTGSPAELSPTTLSPVNHSLDLQPVTYSEPAFWCSIAYYELNQRVGETFHASQPSLTVDGFTDPSNSERFCLGLLSNVNRNATVEMTRRHIGRGVRLYYIGGEVFAECLSDSAIFVQSPNCNQRYGWHPATVCKIPPGCNLKIFNNQEFAALLAQSVNQGFEAVYQLTRMCTIRMSFVKGWGAEYRRQTVTSTPCWIELHLNGPLQWLDKVLTQMGSPSVRCSSMS

SEQ ID NO: 4153 - protein, 198 aa, Homo sapiens
MAYPGHPGAGGGYYPGGYGGAPGGPAFPGQTQDPLYGYFAAVAGQDGQIDADELQRCLTQSGIAGGYKPFNLETCRLMVSMLDRDMSGTMGFNEFKELWAVLNGWRQHFISFDTDRSGTVDPQELQKALTTMGFRLSPQAVNSIAKRYSTNGKITFDDYIACCVKLRALTDSFRRRDTAQQGVVNFPYDDFIQCVMSV

SEQ ID NO: 4154 - protein, 183 aa, Homo sapiens
MQYGGAPGGPAFPGQTQDPLYGYFAAVAGQDGQIDADELQRCLTQSGIAGGYKPFNLETCRLMVSMLDRDMSGTMGFNEFKELWAVLNGWRQHFISFDTDRSGTVDPQELQKALTTMGFRLSPQAVNSIAKRYSTNGKITFDDYIACCVKLRALTDSFRRRDTAQQGVVNFPYDDFIQCVMSV

SEQ ID NO: 4155 - protein, 180 aa, Homo sapiens
MQYGGAPGGPAFPGQTQDPLYGYFAAVAGQDGQIDADELQRCLTQSGIAGGYKPFNLETCRLMVSMLDRDMSGTMGFNEFKELWAVLNGWRQHFISFDTDRSGTVDPQELQKALTTMGFRLSPQAVNSIAKRYSTNGKITFDDYIACCVKLRALTDSFRRRDTAQQGVVNFPYDDVSLRN

SEQ ID NO: 4156 - protein, 245 aa, Homo sapiens
MAEGEKNQDFTFKMESPSDSAVVLPSTPQASANPSSPYTNSSRKQPMSATLRERLRKTRFSFNSSYNVVKRLKVESEENDQTFSEKPASSTEENCLEFQESFKHIDSEFEENTNLKNTLKNLNVCESQSLDSGSCSALQNEFVSEKLPKQRLNAEKAKLVKQVQEKEDLLRRLKLVKMYRSKNDLSQLQLLIKKWRSCSQLLLYELQSAVSEENKKLSLTQLIDHYGLDDKLLHYNRSEEEFIDV

SEQ ID NO: 4157 - protein, 307 aa, Homo sapiens
MKNLVVPMWEGKWKTAKRARMNYKVKLEEISGLLVDALYTNTIYYLIKVDYREVWLIRLFYNFSFLEKNQDFTFKMESPSDSAVVLPSTPQASANPSSPYTNSSRKQPMSATLRERLRKTRFSFNSSYNVVKRLKVESEENDQTFSEKPASSTEENCLEFQESFKHIDSEFEENTNLKNTLKNLNVCESQSLDSGSCSALQNEFVSEKLPKQRLNAEKAKLVKQVQEKEDLLRRLKLVKMYRSKNDLSQLQLLIKKWRSCSQLLLYELQSAVSEENKKLSLTQLIDHYGLDDKLLHYNRSEEEFIDV

SEQ ID NO: 4158 - protein, 232 aa, Homo sapiens
MESPSDSAVVLPSTPQASANPSSPYTNSSRKQPMSATLRERLRKTRFSFNSSYNVVKRLKVESEENDQTFSEKPASSTEENCLEFQESFKHIDSEFEENTNLKNTLKNLNVCESQSLDSGSCSALQNEFVSEKLPKQRLNAEKAKLVKQVQEKEDLLRRLKLVKMYRSKNDLSQLQLLIKKWRSCSQLLLYELQSAVSEENKKLSLTQLIDHYGLDDKLLHYNRSEEEFIDV

SEQ ID NO: 4159 - protein, 1265 aa, Homo sapiens
MECPVMETGSLFTSGIKRHLKDKRISKTTKLNVSLASKIKTKILNNSSIFKISLKHNNRALAQALSREKENSRRITTEKMLLQKEVEKLNFENTFLRLKLNNLNKKLIDIEALMNNNLITAIEMSSLSEFHQSSFLLSASKKKRISKQCKLMRLPFARVPLTSNDDEDEDKEKMQCDNNIKSKTLPDIPSSGSTTQPLSTQDNSEVLFLKENNQNVYGLDDSEHISSIVDVPPRESHSHSDQSSKTSLMSEMRNAQSIGRRWEKPSPSNVTERKKRGSSWESNNLSADTPCATVLDKQHISSPELNCNNEINGHTNETNTEMQRNKQDLPGLSSESAREPNAECMNQIEDNDDFQLQKTVYDADMDLTASEVSKIVTVSTGIKKKSNKKTNEHGMKTFRKVKDSSSEKKRERSKRQFKNSSDVDIGEKIENRTERSDVLDGKRGAEDPGFIFNNEQLAQMNEQLAQVNELKKMTLQTGFEQGDRENVLCNKKEKRITNEQEETYSLSQSSGKFHQESKFDKGQNSLTCNKSKASRQTFVIHKLEKDNLLPNQKDKVTIYENLDVTNEFHTANLSTKDNGNLCDYGTHNILDLKKYVTDIQPSEQNESNINKLRKKVNRKTEIISGMNHMYEDNDKDVVHGLKKGNFFFKTQEDKEPISENIEVSKELQIPALSTRDNENQCDYRTQNVLGLQKQITNMYPVQQNESKVNKKLRQKVNRKTEIISEVNHLDNDKSIEYTVKSHSLFLTQKDKEIIPGNLEDPSEFETPALSTKDSGNLYDSEIQNVLGVKHGHDMQPACQNDSKIGKKPRLNVCQKSEIIPETNQIYENDNKGVHDLEKDNFFSLTPKDKETISENLQVTNEFQTVDLLIKDNGNLCDYDTQNILELKKYVTDRKSAEQNESKINKLRNKVNWKTEIISEMNQIYEDNDKDAHVQESYTKDLDFKVNKSKQKLECQDIINKHYMEVNSNEKESCDQILDSYKVVKKRKKESSCKAKNILTKAKNKLASQLTESSQTSISLESDLKHITSEADSDPGNPVELCKTQKQSTTTLNKKDLPFVEEIKEGECQVKKVNKMTSKSKKRKTSIDPSPESHEVMERILDSVQGKSTVSEQADKENNLENEKMVKNKPDFYTKAFRSLSEIHSPNIQDSSFDSVREGLVPLSVSSGKNVIIKENFALECSPAFQVSDDEHEKMNKMKFKVNRRTQKSGIGDRPLQDLSNTSFVSNNTAESENKSEDLSSERTSRRRRCTPFYFKEPSLRDKMRR

SEQ ID NO: 4160 - protein, 1261 aa, Homo sapiens
MECPVMETGSLFTSGIKRHLKDKRISKTTKLNVSLASKIKTKILNNSSIFKISLKHNNRALAQALSREKENSRRITTEKMLLQKEVEKLNFENTFLRLKLNNLNKKLIDIEALMNNNLITAIEMSSLSEFHQSSFLLSASKKKRISKQCKLMRLPFARVPLTSNDDEDEDKEKMQCDNNIKSKTLPDIPSSGSTTQPLSTQDNSEVLFLKENNQNVYGLDDSEHISSIVDVPPRESHSHSDQSSKTSLMSEMRNAQSIGRRWEKPSPSNVTERKKRGSSWESNNLSADTPCATVLDKQHISSPELNCNNEINGHTNETNTEMQRNKQDLPGLSSESAREPNAECMNQIEDNDDFQLQKTVYDADMDLTASEVSKIVTVSTGIKKKSNKKTNEHGMKTFRKVKDSSSEKKRERSKRQFKNSSDVDIGEKIENRTERSDVLDGKRGAEDPGFIFNNEQLAQMNEQLAQVNELKKMTLQTGFEQGDRENVLCNKKEKRITNEQEETYSLSQSSGKFHQESKFDKGQNSLTCNKSKASRQTFVIHKLEKDNLLPNQKDKVTIYENLDVTNEFHTANLSTKDNGNLCDYGTHNILDLKKYVTDIQPSEQNESNINKLRKKVNRKTEIISGMNHMYEDNDKDVVHGLKKGNFFFKTQEDKEPISENIEVSKELQIPALSTRDNENQCDYRTQNVLGLQKQITNMYPVQQNESKVNKKLRQKVNRKTEIISEVNHLDNDKSIEYTVKSHSLFLTQKDKEIIPGNLEDPSEFETPALSTKDSGNLYDSEIQNVLGVKHGHDMQPACQNDSKIGKKPRLNVCQKSEIIPETNQIYENDNKGVHDLEKDNFFSLTPKDKETISENLQVTNEFQTVDLLIKDNGNLCDYDTQNILELKKYVTDRKSAEQNESKINKLRNKVNWKTEIISEMNQIYEDNDKDAHVQESYTKDLDFKVNKSKQKLECQDIINKHYMEVNSNEKESCDQILDSYKVVKKRKKESSCKAKNILTKAKNKLASQLTESSQTSISLESDLKHITSEADSDPGNPVELCKTQKQSTTTLNKKDLPFVEEIKEGECQVKKVNKMTSKSKKRKTSIDPSPESHEVMERILDSVQGKSTVSEQADKENNLENEKMVKNKPDFYTKAFRSLSEIHSPNIQDSSFDSVREGLVPLSVSSGKNVIIKENFALECSPAFQVSDDEHEKMNKMKFKVNRRTQKSGIGDRPLQDLSNTSFVSNNTAESENKSEDLSSERTSRRRRCTPFYFKEPSLRE

SEQ ID NO: 4161 - protein, 247 aa, Homo sapiens
MECPVMETGSLFTSGIKRHLKDKRISKTTKLNVSLASKIKTKILNNSSIFKISLKHNNRALAQALSREKENSRRITTEKMLLQKEVEKLNFENTFLRLKLNNLNKKLIDIEALMNNNLITAIEMSSLSEFHQSSFLLSASKKKRISKQCKLMRLPFARVPLTSNDDEDEDKEKMQCDNNIKSKTLPDIPSSGSTTQPLSTQDNSEVLFLKENNQNVYGLDDSEHISSIVDVPPRGEIVLKIHFEYLY

SEQ ID NO: 4162 - protein, 1016 aa, Homo sapiens
MSQGPPTGESSEPEAKVLHTKRLYRAVVEAVHRLDLILCNKTAYQEVFKPENISLRNKLRELCVKLMFLHPVDYGRKAEELLWRKVYYEVIQLIKTNKKHIHSRSTLECAYRTHLVAGIGFYQHLLLYIQSHYQLELQCCIDWTHVTDPLIGCKKPVSASGKEMDWAQMACHRCLVYLGDLSRYQNELAGVDTELLAERFYYQALSVAPQIGMPFNQLGTLAGSKYYNVEAMYCYLRCIQSEVSFEGAYGNLKRLYDKAAKMYHQLKKCETRKLSPGKKRCKDIKRLLVNFMYLQSLLQPKSSSVDSELTSLCQSVLEDFNLCLFYLPSSPNLSLASEDEEEYESGYAFLPDLLIFQMVIICLMCVHSLERAGSKQYSAAIAFTLALFSHLVNHVNIRLQAELEEGENPVPAFQSDGTDEPESKEPVEKEEEPDPEPPPVTPQVGEGRKSRKFSRLSCLRRRRHPPKVGDDSDLSEGFESDSSHDSARASEGSDSGSDKSLEGGGTAFDAETDSEMNSQESRSDLEDMEEEEGTRSPTLEPPRGRSEAPDSLNGPLGPSEASIASNLQAMSTQMFQTKRCFRLAPTFSNLLLQPTTNPHTSASHRPCVNGDVDKPSEPASEEGSESEGSESSGRSCRNERSIQEKLQVLMAEGLLPAVKVFLDWLRTNPDLIIVCAQSSQSLWNRLSVLLNLLPAAGELQESGLALCPEVQDLLEGCELPDLPSSLLLPEDMALRNLPPLRAAHRRFNFDTDRPLLSTLEESVVRICCIRSFGHFIARLQGSILQFNPEVGIFVSIAQSEQESLLQQAQAQFRMAQEEARRNRLMRDMAQLRLQLEVSQLEGSLQQPKAQSAMSPYLVPDTQALCHHLPVIRQLATSGRFIVIIPRTVIDGLDLLKKEHPGARDGIRYLEAEFKKGNRYIRCQKEVGKSFERHKLKRQDADAWTLYKILDSCKQLTLAQGAGEEDPSGMVTIITGLPLDNPSVLSGPMQAALQAAAHASVDIKNVLDFYKQWKEIG

SEQ ID NO: 4163 - protein, 965 aa, Homo sapiens
MALLCGLGQVTLRIWVSLPSQSENGIGFLAARAFLRSGGMEALTTQLGPGREGSSSPNSKQELQPYSGSSALKPNQVGETSLYGVPIVSLVIDGQERLCLAQISNTLLKNYSYNEIHNRRVALGITCVQCTPVQLEILRRAGAMPISSRRCGMITKREAERLCKSFLGEHKPPKLPENFAFDVVHECAWGSRGSFIPARYNSSRAKCIKCGYCSMYFSPNKFIFHSHRTPDAKYTQPDAANFNSWRRHLKLSDKSATDELSHAWEDVKAMFNGGTRKRTFSLQGGGGGGANGGSGGQGKGGAGGGGGGGPGCGAEMAPGPPPHKSLRCGEDEAAGPPGPPPPHPQRGLGLATGASGPAGPGGPGGGAGVRSYPVIPVPSKGFGLLQKLPPPLFPHPYGFPTAFGLCPKKDDPVLGAGEPKGGPGTGSGGGGAGTGGGAGGPGASHLPPGAGAGPGGGAMFWGHQPSGAAKDAAAVAAAAAAATVYPTFPMFWPAAGSLPVPSYPAAQSQAKAVAAAVAAAAAAAAAAAGSGAPEPLDGAEPAKESGLGAEERCPSALSRGPLDEDGTDEALPPPLAPLPPPPPPPARKGSYVSAFRPVVKDTESIAKLYGSAREAYGAGPARGPGPGAGSGGYVSPDFLSEGSSSYNSASPDVDTADEPEVDVESNRFPDDEDAQEETEPSAPSAGGGPDGEQPTGPPSATSSGADGPANSPDGGSPRPRRRLGPPPAGRPAFGDLAAEDLVRRPERSPPSGGGGYELREPCGPLGGPAPAKVFAPERDEHVKSAAVALGPAASYVCTPEAHEPDKEDNHSPADDLETRKSYPDQRSISQPSPANTDRGEDGLTLDVTGTHLVEKDIENLAREELQKLLLEQMELRKKLEREFQSLKDNFQDQMKRELAYREEMVQQLQIVRDTLCNELDQERKARYAIQQKLKEAHDALHHFSCKMLTPRHCTGNCSFKPPLLP

SEQ ID NO: 4164 - protein, 868 aa, Homo sapiens
MIPKSLVQAAETQRGLCEPGGKGREGRSGGKGETRPRGVGTQEGKGTIPGSPREKRGERGEGDPALLPAEDLWRLPGSKDRLRSSLLPPPGPPSSDSGPGPPSSHSGKTAQGPRTLNWARKQSARTSSNLCAWSLAMATKMAEIPSSPYEPGQRGMKDTQRGDAPQRGSPEPRILQLARVGNVYLKEESSRSGRLEAKKWIPTKFLENLSVPHVDLGGNQLWSGGMEALTTQLGPGREGSSSPNSKQELQPYSGSSALKPNQVGETSLYGVPIVSLVIDGQERLCLAQISNTLLKNYSYNEIHNRRVALGITCVQCTPVQLEILRRAGAMPISSRRCGMITKREAERLCKSFLGEHKPPKLPENFAFDVVHECAWGSRGSFIPARYNSSRAKCIKCGYCSMYFSPNKFIFHSHRTPDAKYTQPDAANFNSWRRHLKLSDKSATDELSHAWEDRGLGLATGASGPAGPGGPGGGAGVRSYPVIPVPSKGFGLLQKLPPPLFPHPYGFPTAFGLCPKKDDPVLGAGEPKGGSYVSAFRPVVKDTESIAKLYGSAREAYGAGPARGPGPGAGSGGYVSPDFLSEGSSSYNSASPDVDTADEPEVDVESNRFPDDEDAQEETEPSAPSAGGGPDAGRPAFGDLAAEDLVRRPERSPPSGGGGYELREPCGPLGGPAPAKVFAPERDEHVKSAAVALGPAASYVCTPEAHEPDKEDNHSPADDLETRKSYPDQRSISQPSPANTDRGEDGLTLDVTGTHLVEKDIENLAREELQKLLLEQMELRKKLEREFQSLKDNFQDQMKRELAYREEMVQQLQIVRDTLCNELDQERKARYAIQQKLKEAHDALHHFSCKMLTPRHCTGNCSFKPPLLP

SEQ ID NO: 4165 - protein, 921 aa, Homo sapiens
MALLCGLGQVTLRIWVSLPSQSENGIGSGGMEALTTQLGPGREGSSSPNSKQELQPYSGSSALKPNQVGETSLYGVPIVSLVIDGQERLCLAQISNTLLKNYSYNEIHNRRVALGITCVQCTPVQLEILRRAGAMPISSRRCGMITKREAERLCKSFLGEHKPPKLPENFAFDVVHECAWGSRGSFIPARYNSSRAKCIKCGYCSMYFSPNKFIFHSHRTPDAKYTQPDAANFNSWRRHLKLSDKSATDELSHAWEDVKAMFNGGTRCGAEMAPGPPPHKSLRCGEDEAAGPPGPPPPHPQRGLGLATGASGPAGPGGPGGGAGVRSYPVIPVPSKGFGLLQKLPPPLFPHPYGFPTAFGLCPKKDDPVLGAGEPKGGPGTGSGGGGAGTGGGAGGPGASHLPPGAGAGPGGGAMFWGHQPSGAAKDAAAVAAAAAAATVYPTFPMFWPAAGSLPVPSYPAAQSQAKAVAAAVAAAAAAAAAAAGSGAPEPLDGAEPAKESGLGAEERCPSALSRGPLDEDGTDEALPPPLAPLPPPPPPPARKGSYVSAFRPVVKDTESIAKLYGSAREAYGAGPARGPGPGAGSGGYVSPDFLSEGSSSYNSASPDVDTADEPEVDVESNRFPDDEDAQEETEPSAPSAGGGPDGEQPTGPPSATSSGADGPANSPDGGSPRPRRRLGPPPAGRPAFGDLAAEDLVRRPERSPPSGGGGYELREPCGPLGGPAPAKVFAPERDEHVKSAAVALGPAASYVCTPEAHEPDKEDNHSPADDLETRKSYPDQRSISQPSPANTDRGEDGLTLDVTGTHLVEKDIENLAREELQKLLLEQMELRKKLEREFQSLKDNFQDQMKRELAYREEMVQQLQIVRDTLCNELDQERKARYAIQQKLKEAHDALHHFSCKMLTPRHCTGNCSFKPPLLP

SEQ ID NO: 4166 - protein, 568 aa, Homo sapiens
MPSTDLLMLKAFEPYLEILEVYSTKAKNYVNGHCTKYEPWQLIAWSVVWTLLIVWGYEFVFQPESLWSRFKKKCFKLTRKMPIIGRKIQDKLNKTKDDISKNMSFLKVDKEYVKALPSQGLSSSAVLEKLKEYSSMDAFWQEGRASGTVYSGEEKLTELLVKAYGDFAWSNPLHPDIFPGLRKIEAEIVRIACSLFNGGPDSCGCVTSGGTESILMACKAYRDLAFEKGIKTPEIVAPQSAHAAFNKAASYFGMKIVRVPLTKMMEVDVRAMRRAISRNTAMLVCSTPQFPHGVIDPVPEVAKLAVKYKIPLHVDACLGGFLIVFMEKAGYPLEHPFDFRVKGVTSISADTHKYGYAPKGSSLVLYSDKKYRNYQFFVDTDWQGGIYASPTIAGSRPGGISAACWAALMHFGENGYVEATKQIIKTARFLKSELENIKGIFVFGNPQLSVIALGSRDFDIYRLSNLMTAKGWNLNQLQFPPSIHFCITLLHARKRVAIQFLKDIRESVTQIMKNPKAKTTGMGAIYGMAQTTVDRNMVAELSSVFLDSLYSTDTVTQGSQMNGSPKPH

SEQ ID NO: 4167 - protein, 2214 aa, Homo sapiens
MATRSSRRESRLPFLFTLVALLPPGALCEVWTQRLHGGSAPLPQDRGFLVVQGDPRELRLWARGDARGASRADEKPLRRKRSAALQPEPIKVYGQVSLNDSHNQMVVHWAGEKSNVIVALARDSLALARPKSSDVYVSYDYGKSFKKISDKLNFGLGNRSEAVIAQFYHSPADNKRYIFADAYAQYLWITFDFCNTLQGFSIPFRAADLLLHSKASNLLLGFDRSHPNKQLWKSDDFGQTWIMIQEHVKSFSWGIDPYDKPNTIYIERHEPSGYSTVFRSTDFFQSRENQEVILEEVRDFQLRDKYMFATKVVHLLGSEQQSSVQLWVSFGRKPMRAAQFVTRHPINEYYIADASEDQVFVCVSHSNNRTNLYISEAEGLKFSLSLENVLYYSPGGAGSDTLVRYFANEPFADFHRVEGLQGVYIATLINGSMNEENMRSVITFDKGGTWEFLQAPAFTGYGEKINCELSQGCSLHLAQRLSQLLNLQLRRMPILSKESAPGLIIATGSVGKNLASKTNVYISSSAGARWREALPGPHYYTWGDHGGIITAIAQGMETNELKYSTNEGETWKTFIFSEKPVFVYGLLTEPGEKSTVFTIFGSNKENVHSWLILQVNATDALGVPCTENDYKLWSPSDERGNECLLGHKTVFKRRTPHATCFNGEDFDRPVVVSNCSCTREDYECDFGFKMSEDLSLEVCVPDPEFSGKSYSPPVPCPVGSTYRRTRGYRKISGDTCSGGDVEARLEGELVPCPLAEENEFILYAVRKSIYRYDLASGATEQLPLTGLRAAVALDFDYEHNCLYWSDLALDVIQRLCLNGSTGQEVIINSGLETVEALAFEPLSQLLYWVDAGFKKIEVANPDGDFRLTIVNSSVLDRPRALVLVPQEGVMFWTDWGDLKPGIYRSNMDGSAAYHLVSEDVKWPNGISVDDQWIYWTDAYLECIERITFSGQQRSVILDNLPHPYAIAVFKNEIYWDDWSQLSIFRASKYSGSQMEILANQLTGLMDMKIFYKGKNTGSNACVPRPCSLLCLPKANNSRSCRCPEDVSSSVLPSGDLMCDCPQGYQLKNNTCVKQENTCLRNQYRCSNGNCINSIWWCDFDNDCGDMSDERNCPTTICDLDTQFRCQESGTCIPLSYKCDLEDDCGDNSDESHCEMHQCRSDEYNCSSGMCIRSSWVCDGDNDCRDWSDEANCTAIYHTCEASNFQCRNGHCIPQRWACDGDTDCQDGSDEDPVNCEKKCNGFRCPNGTCIPSSKHCDGLRDCSDGSDEQHCEPLCTHFMDFVCKNRQQCLFHSMVCDGIIQCRDGSDEDAAFAGCSQDPEFHKVCDEFGFQCQNGVCISLIWKCDGMDDCGDYSDEANCENPTEAPNCSRYFQFRCENGHCIPNRWKCDRENDCGDWSDEKDCGDSHILPFSTPGPSTCLPNYYRCSSGTCVMDTWVCDGYRDCADGSDEEACPLLANVTAASTPTQLGRCDRFEFECHQPKTCIPNWKRCDGHQDCQDGRDEANCPTHSTLTCMSREFQCEDGEACIVLSERCDGFLDCSDESDEKACSDELTVYKVQNLQWTADFSGDVTLTWMRPKKMPSASCVYNVYYRVVGESIWKTLETHSNKTNTVLKVLKPDTTYQVKVQVQCLSKAHNTNDFVTLRTPEGLPDAPRNLQLSLPREAEGVIVGHWAPPIHTHGLIREYIVEYSRSGSKMWASQRAASNFTEIKNLLVNTLYTVRVAAVTSRGIGNWSDSKSITTIKGKVIPPPDIHIDSYGENYLSFTLTMESDIKVNGYVVNLFWAFDTHKQERRTLNFRGSILSHKVGNLTAHTSYEISAWAKTDLGDSPLAFEHVMTRGVRPPAPSLKAKAINQTAVECTWTGPRNVVYGIFYATSFLDLYRNPKSLTTSLHNKTVIVSKDEQYLFLVRVVVPYQGPSSDYVVVKMIPDSRLPPRHLHVVHTGKTSVVIKWESPYDSPDQDLLYAVAVKDLIRKTDRSYKVKSRNSTVEYTLNKLEPGGKYHIIVQLGNMSKDSSIKITTVSLSAPDALKIITENDHVLLFWKSLALKEKHFNESRGYEIHMFDSAMNITAYLGNTTDNFFKISNLKMGHNYTFTVQARCLFGNQICGEPAILLYDELGSGADASATQAARSTDVAAVVVPILFLILLSLGVGFAILYTKHRRLQSSFTAFANSHYSSRLGSAIFSSGDDLGEDDEDAPMITGFSDDVPMVIA

SEQ ID NO: 4168 - protein, 1687 aa, Homo sapiens
MTSSSPAGLEGSDLSSINTMMSAVMSVGKVTENGGSPQGIKSPSKPPGPNRIGRRNQETKEEKSSYNCPLCEKICTTQHQLTMHIRQHNTDTGGADHSCSICGKSLSSASSLDRHMLVHSGERPYKCTVCGQSFTTNGNMHRHMKIHEKDPNSATATAPPSPLKRRRLSSKRKLSHDAESEREDPAPAKKMVEDGQSGDLEKKADEVFHCPVCFKEFVCKYGLETHMETHSDNPLRCDICCVTFRTHRGLLRHNALVHKQLPRDAMGRPFIQNNPSIPAGFHDLGFTDFSCRKFPRISQAWCETNLRRCISEQHRFVCDTCDKAFPMLCSLALHKQTHVAADQGQEKPQATPLPGDALDQKGFLALLGLQHTKDVRPAPAEEPLPDDNQAIQLQTLKCQLPQDPGCTNLLSLSPFEAASLGGSLTVLPATKDSIKHLSLQPFQKGFIIQPDSSIVVKPISGESAIELADIQQILKMAASAPPQISLPPFSKAPAAPLQAIFKHMPPLKPKPLVTPRTVVATSTPPPLINAQQASPGCISPSLPPPPLKLLKGSVEAASNAHLLQSKSGTQPHAATRLSLQQPRAELPGQPEMKTQLEQDSIIEALLPLSMEAKIKQEITEGELKAFMTAPGGKKTPAMRKVLYPCRFCNQVFAFSGVLRAHVRSHLGISPYQCNICDYIAADKAALIRHLRTHSGERPYICKICHYPFTVKANCERHLRKKHLKATRKDIEKNIEYVSSSAAELVDAFCAPDTVCRLCGEDLKHYRALRIHMRTHCGRGLGGGHKGRKPFECKECSAAFAAKRNCIHHILKQHLHVPEQDIESYVLAADGLGPAEAPAAEASGRGEDSGCAALGDCKPLTAFLEPQNGFLHRGPTQPPPPHVSIKLEPASSFAVDFNEPLDFSQKGLALVQVKQENISFLSPSSLVPYDCSMEPIDLSIPKNFRKGDKDLATPSEAKKPEEEAGSSEQPSPCPAPGPSLPVTLGPSGILESPMAPAPAATPEPPAQPLQGPVQLAVPIYSSALVSSPPLVGSSALLSGTALLRPLRPKPPLLLPKPPVTEELPPLASIAQIISSVSSAPTLLKTKVADPGPASTGSNTTASDSLGGSVPKAATTATPAATTSPKESSEPPAPASSPEAASPTEQGPAGTSKKRGRKRGMRSRPRANSGGVDLDSSGEFASIEKMLATTDTNKFSPFLQTAEDNTQDEVAGAPADHHGPSDEEQGSPPEDKLLRAKRNSYTNCLQKITCPHCPRVFPWASSLQRHMLTHTDSQSDAETAAAAGEVLDLTSRDREQPSEGATELRQVAGDAPVEQATAETASPVHREEHGRGESHEPEEEHGTEESTGDADGAEEDASSNQSLDLDFATKLMDFKLAEGDGEAGAGGAASQEQKLACDTCGKSFKFLGTLSRHRKAHGRQEPKDEKGDGASTAEEGPQPAPEQEEKPPETPAEVVESAPGAGEAPAEKLAEETEGPSDGESAAEKRSSEKSDDDKKPKTDSPKSVASKADKRKKVCSVCNKRFWSLQDLTRHMRSHTGERPYKCQTCERTFTLKHSLVRHQRIHQKARHAKHHGKDSDKEERGEEDSENESTHSGNNAVSENEAELAPNASNHMAVTRSRKEGLASATKDCSHREEKVTAGWPSEPGQGDLNPESPAALGQDLLEPRSKRPAHPILATADGASQLVGME

SEQ ID NO: 4169 - protein, 1742 aa, Homo sapiens
MTSSSPAGLEGSDLSSINTMMSAVMSVGKVTENGGSPQGIKSPSKPPGPNRIGRRNQETKEEKSSYNCPLCEKICTTQHQLTMHIRQHNTDTGGADHSCSICGKSLSSASSLDRHMLVHSGERPYKCTVCGQSFTTNGNMHRHMKIHEKDPNSATATAPPSPLKRRRLSSKRKLSHDAESEREDPAPAKKMVEDGQSGDLEKKADEVFHCPVCFKEFVCKYGLETHMETHSDNPLRCDICCVTFRTHRGLLRHNALVHKQLPRDAMGRPFIQNNPSIPAGFHDLGFTDFSCRKFPRISQAWCETNLRRCISEQHRFVCDTCDKAFPMLCSLALHKQTHVAADQGQEKPQATPLPGDALDQKGFLALLGLQHTKDVRPAPAEEPLPDDNQAIQLQTLKCQLPQDPGCTNLLSLSPFEAASLGGSLTVLPATKDSIKHLSLQPFQKGFIIQPDSSIVVKPISGESAIELADIQQILKMAASAPPQISLPPFSKAPAAPLQAIFKHMPPLKPKPLVTPRTVVATSTPPPLINAQQASPGCISPSLPPPPLKLLKGSVEAASNAHLLQSKSGTQPHAATRLSLQQPRAELPGQPEMKTQLEQDSIIEALLPLSMEAKIKQEITEGELKAFMTAPGGKKTPAMRKVLYPCRFCNQVFAFSGVLRAHVRSHLGISPYQCNICDYIAADKAALIRHLRTHSGERPYICKICHYPFTVKANCERHLRKKHLKATRKDIEKNIEYVSSSAAELVDAFCAPDTVCRLCGEDLKHYRALRIHMRTHCGRGLGGGHKGRKPFECKECSAAFAAKRNCIHHILKQHLHVPEQDIESYVLAADGLGPAEAPAAEASGRGEDSGCAALGDCKPLTAFLEPQNGFLHRGPTQPPPPHVSIKLEPASSFAVDFNEPLDFSQKGLALVQVKQENISFLSPSSLVPYDCSMEPIDLSIPKNFRKGDKDLATPSEAKKPEEEAGSSEQPSPCPAPGPSLPVTLGPSGILESPMAPAPAATPEPPAQPLQGPVQLAVPIYSSALVSSPPLVGSSALLSGTALLRPLRPKPPLLLPKPPVTEELPPLASIAQIISSVSSAPTLLKTKVADPGPASTGSNTTASDSLGGSVPKAATTATPAATTSPKESSEPPAPASSPEAASPTEQGPAGTSKKRGRKRGMRSRPRANSGGVDLDSSGEFASIEKMLATTDTNKFSPFLQTAEDNTQDEVAGAPADHHGPSDEEQGSPPEDKLLRAKRNSYTNCLQKITCPHCPRVFPWASSLQRHMLTHTGQKPFPCQKCDAFFSTKSNCERHQLRKHGVTTCSLRRNGLIPQSKESDVGSHDSTDSQSDAETAAAAGEVLDLTSRDREQPSEGATELRQVAGDAPVEQATAETASPVHREEHGRGESHEPEEEHGTEESTGDADGAEEDASSNQSLDLDFATKLMDFKLAEGDGEAGAGGAASQEQKLACDTCGKSFKFLGTLSRHRKAHGRQEPKDEKGDGASTAEEGPQPAPEQEEKPPETPAEVVESAPGAGEAPAEKLAEETEGPSDGESAAEKRSSEKSDDDKKPKTDSPKSVASKADKRKKVCSVCNKRFWSLQDLTRHMRSHTGERPYKCQTCERTFTLKHSLVRHQRIHQKARHAKHHGKDSDKEERGEEDSENESTHSGNNAVSENEAELAPNASNHMAVTRSRKEGLASATKDCSHREEKVTAGWPSEPGQGDLNPESPAALGQDLLEPRSKRPAHPILATADGASQLVGME

SEQ ID NO: 4170 - protein, 1476 aa, Homo sapiens
MTSSSPAGLEGSDLSSINTMMSAVMSVGKVTENGGSPQGIKSPSKPPGPNRIGRRNQETKEEKSSYNCPLCEKICTTQHQLTMHIRQHNTDTGGADHSCSICGKSLSSASSLDRHMLVHSGERPYKCTVCGQSFTTNGNMHRHMKIHEKDPNSATATAPPSPLKRRRLSSKRKLSHDAESEREDPAPAKKMVEDGQSGDLEKKADEVFHCPVCFKEFVCKYGLETHMETHSDNPLRCDICCVTFRTHRGLLRHNALVHKQLPRDAMGRPFIQNNPSIPAGFHDLGFTDFSCRKFPRISQAWCETNLRRCISEQHRFVCDTCDKAFPMLCSLALHKQTHVAADQGQEKPQATPLPGDALDQKGFLALLGLQHTKDVRPAPAEEPLPDDNQAIQLQTLKCQLPQDPGCTNLLSLSPFEAASLGGSLTVLPATKDSIKHLSLQPFQKGFIIQPDSSIVVKPISGESAIELADIQQILKMAASAPPQISLPPFSKAPAAPLQAIFKHMPPLKPKPLVTPRTVVATSTPPPLINAQQASPGCISPSLPPPPLKLLKGSVEAASNAHLLQSKSGTQPHAATRLSLQQPRAELPGQPEMKTQLEQDSIIEALLPLSMEAKIKQEITEGELKAFMTAPGGKKTPAMRKVLYPCRFCNQVFAFSGVLRAHVRSHLGISPYQCNICDYIAADKAALIRHLRTHSGERPYICKICHYPFTVKANCERHLRKKHLKATRKDIEKNIEYVSSSAAELVDAFCAPDTVCRLCGEDLKHYRALRIHMRTHCGRGLGGGHKGRKPFECKECSAAFAAKRNCIHHILKQHLHVPEQDIESYVLAADGLGPAEAPAAEASGRGEDSGCAALGDCKPLTAFLEPQNGFLHRGPTQPPPPHVSIKLEPASSFAVDFNEPLDFSQKGLALVQVKQENISFLSPSSLVPYDCSMEPIDLSIPKNFRKGDKDLATPSEAKKPEEEAGSSEQPSPCPAPGPSLPVTLGPSGILESPMAPAPAATPEPPAQPLQGPVQLAVPIYSSALVSSPPLVGSSALLSGTALLRPLRPKPPLLLPKPPVTEELPPLASIAQIISSVSSAPTLLKTKVADPGPASTGSNTTASDSLGGSVPKAATTATPAATTSPKESSEPPAPASSPEAASPTEQGPAGTSKKRGRKRGMRSRPRANSGGVDLDSSGEFASIEKMLATTDTNKFSPFLQTAEDNTQDEVAGAPADHHGPSDEEQGSPPEDKLLRAKRNSYTNCLQKITCPHCPRVFPWASSLQRHMLTHTGQKPFPCQKCDAFFSTKSNCERHQLRKHGVTTCSLRRNGLIPQSKESDVGSHDSTGERPYKCQTCERTFTLKHSLVRHQRIHQKARHAKHHGKDSDKEERGEEDSENESTHSGNNAVSENEAELAPNASNHMAVTRSRKEGLASATKDCSHREEKVTAGWPSEPGQGDLNPESPAALGQDLLEPRSKRPAHPILATADGASQLVGME

SEQ ID NO: 4171 - protein, 478 aa, Homo sapiens
MLTHTGQKPFPCQKCDAFFSTKSNCERHQLRKHGVTTCSLRRNGLIPQSKESDVGSHDSTDSQSDAETAAAAGEVLDLTSRDREQPSEGATELRQVAGDAPVEQATAETASPVHREEHGRGESHEPEEEHGTEESTGDADGAEEDASSNQSLDLDFATKLMDFKLAEGDGEAGAGGAASQEQKLACDTCGKSFKFLGTLSRHRKAHGRQEPKDEKGDGASTAEEGPQPAPEQEEKPPETPAEVVESAPGAGEAPAEKLAEETEGPSDGESAAEKRSSEKSDDDKKPKTDSPKSVASKADKRKKVCSVCNKRFWSLQDLTRHMRSHTGERPYKCQTCERTFTLKHSLVRHQRIHQKARHAKHHGKDSDKEERGEEDSENESTHSGNNAVSENEAELAPNASNHMAVTRSRKEGLASATKDCSHREEKVTAGWPSEPGQGDLNPESPAALGQDLLEPRSKRPAHPILATADGASQLVGME

SEQ ID NO: 4172 - protein, 1421 aa, Homo sapiens
MTSSSPAGLEGSDLSSINTMMSAVMSVGKVTENGGSPQGIKSPSKPPGPNRIGRRNQETKEEKSSYNCPLCEKICTTQHQLTMHIRQHNTDTGGADHSCSICGKSLSSASSLDRHMLVHSGERPYKCTVCGQSFTTNGNMHRHMKIHEKDPNSATATAPPSPLKRRRLSSKRKLSHDAESEREDPAPAKKMVEDGQSGDLEKKADEVFHCPVCFKEFVCKYGLETHMETHSDNPLRCDICCVTFRTHRGLLRHNALVHKQLPRDAMGRPFIQNNPSIPAGFHDLGFTDFSCRKFPRISQAWCETNLRRCISEQHRFVCDTCDKAFPMLCSLALHKQTHVAADQGQEKPQATPLPGDALDQKGFLALLGLQHTKDVRPAPAEEPLPDDNQAIQLQTLKCQLPQDPGCTNLLSLSPFEAASLGGSLTVLPATKDSIKHLSLQPFQKGFIIQPDSSIVVKPISGESAIELADIQQILKMAASAPPQISLPPFSKAPAAPLQAIFKHMPPLKPKPLVTPRTVVATSTPPPLINAQQASPGCISPSLPPPPLKLLKGSVEAASNAHLLQSKSGTQPHAATRLSLQQPRAELPGQPEMKTQLEQDSIIEALLPLSMEAKIKQEITEGELKAFMTAPGGKKTPAMRKVLYPCRFCNQVFAFSGVLRAHVRSHLGISPYQCNICDYIAADKAALIRHLRTHSGERPYICKICHYPFTVKANCERHLRKKHLKATRKDIEKNIEYVSSSAAELVDAFCAPDTVCRLCGEDLKHYRALRIHMRTHCGRGLGGGHKGRKPFECKECSAAFAAKRNCIHHILKQHLHVPEQDIESYVLAADGLGPAEAPAAEASGRGEDSGCAALGDCKPLTAFLEPQNGFLHRGPTQPPPPHVSIKLEPASSFAVDFNEPLDFSQKGLALVQVKQENISFLSPSSLVPYDCSMEPIDLSIPKNFRKGDKDLATPSEAKKPEEEAGSSEQPSPCPAPGPSLPVTLGPSGILESPMAPAPAATPEPPAQPLQGPVQLAVPIYSSALVSSPPLVGSSALLSGTALLRPLRPKPPLLLPKPPVTEELPPLASIAQIISSVSSAPTLLKTKVADPGPASTGSNTTASDSLGGSVPKAATTATPAATTSPKESSEPPAPASSPEAASPTEQGPAGTSKKRGRKRGMRSRPRANSGGVDLDSSGEFASIEKMLATTDTNKFSPFLQTAEDNTQDEVAGAPADHHGPSDEEQGSPPEDKLLRAKRNSYTNCLQKITCPHCPRVFPWASSLQRHMLTHTGERPYKCQTCERTFTLKHSLVRHQRIHQKARHAKHHGKDSDKEERGEEDSENESTHSGNNAVSENEAELAPNASNHMAVTRSRKEGLASATKDCSHREEKVTAGWPSEPGQGDLNPESPAALGQDLLEPRSKRPAHPILATADGASQLVGME

SEQ ID NO: 4173 - protein, 314 aa, Homo sapiens
MTSSSPAGLEGSDLSSINTMMSAVMSVGKVTENGGSPQGIKSPSKPPGPNRIGRRNQETKEEKSSYNCPLCEKICTTQHQLTMHIRQHNTDTGGADHSCSICGKSLSSASSLDRHMLVHSGERPYKCTVCGQSFTTNGNMHRHMKIHEKDPNSATATAPPSPLKRRRLSSKRKLSHDAESEREDPAPAKKMVEDGQSGDLEKKADEVFHCPVCFKEFVCKYGLETHMETHSDNPLRCDICCVTFRTHRGLLRHNALVHKQLPRDAMGRPFIQNNPSIPAGFHDLGFTDFSCRKFPRISQGKGHTNVRPASEPSP

SEQ ID NO: 4174 - protein, 1616 aa, Homo sapiens
MEGAEPRARPERLAEAETRAADGGRLVEVQLSGGAPWGFTLKGGREHGEPLVITKIEEGSKAAAVDKLLAGDEIVGINDIGLSGFRQEAICLVKGSHKTLKLVVKRRSELGWRPHSWHATKFSDSHPELAASPFTSTSGCPSWSGRHHASSSSHDLSSSWEQTNLQRTLDHFSSLGSVDSLDHPSSRLSVAKSNSSIDHLGSHSKRDSAYGSFSTSSSTPDHTLSKADTSSAENILYTVGLWEAPRQGGRQAQAAGDPQGSEEKLSCFPPRVPGDSGKGPRPEYNAEPKLAAPGRSNFGPVWYVPDKKKAPSSPPPPPPPLRSDSFAATKSHEKAQGPVFSEAAAAQHFTALAQAQPRGDRRPELTDRPWRSAHPGSLGKGSGGPGCPQEAHADGSWPPSKDGASSRLQASLSSSDVRFPQSPHSGRHPPLYSDHSPLCADSLGQEPGAASFQNDSPPQVRGLSSCDQKLGSGWQGPRPCVQGDLQAAQLWAGCWPSDTALGALESLPPPTVGQSPRHHLPQPEGPPDARETGRCYPLDKGAEGCSAGAQEPPRASRAEKASQRLAASITWADGESSRICPQETPLLHSLTQEGKRRPESSPEDSATRPPPFDAHVGKPTRRSDRFATTLRNEIQMHRAKLQKSRSTVALTAAGEAEDGTGRWRAGLGGGTQEGPLAGTYKDHLKEAQARVLRATSFKRRDLDPNPGDLYPESLEHRMGDPDTVPHFWEAGLAQPPSSTSGGPHPPRIGGRRRFTAEQKLKSYSEPEKMNEVGLTRGYSPHQHPRTSEDTVGTFADRWKFFEETSKPVPQRPAQKQALHGIPRDKPERPRTAGRTCEGTEPWSRTTSLGDSLNAHSAAEKAGTSDLPRRLGTFAEYQASWKEQRKPLEARSSGRCHSADDILDVSLDPQERPQHVHGRSRSSPSTDHYKQEASVELRRQAGDPGEPREELPSAVRAEEGQSTPRQADAQCREGSPGSQQHPPSQKAPNPPTFSELSHCRGAPELPREGRGRAGTLPRDYRYSEESTPADLGPRAQSPGSPLHARGQDSWPVSSALLSKRPAPQRPPPPKREPRRYRATDGAPADAPVGVLGRPFPTPSPASLDVYVARLSLSHSPSVFSSAQPQDTPKATVCERGSQHVSGDASRPLPEALLPPKQQHLRLQTATMETSRSPSPQFAPQKLTDKPPLLIQDEDSTRIERVMDNNTTVKMVPIKIVHSESQPEKESRQSLACPAEPPALPHGLEKDQIKTLSTSEQFYSRFCLYTRQGAEPEAPHRAQPAEPQPLGTQVPPEKDRCTSPPGLSYMKAKEKTVEDLKSEELAREIVGKDKSLADILDPSVKIKTTMDLMEGIFPKDEHLLEEAQQRRKLLPKIPSPRSTEERKEEPSVPAAVSLATNSTYYSTSAPKAELLIKMKDLQEQQEHEEDSGSDLDHDLSVKKQELIESISRKLQVLREARESLLEDVQANTVLGAEVEAIVKGVCKPSEFDKFRMFIGDLDKVVNLLLSLSGRLARVENALNNLDDGASPGDRQSLLEKQRVLIQQHEDAKELKENLDRRERIVFDILANYLSEESLADYEHFVKMKSALIIEQRELEDKIHLGEEQLKCLLDSLQPERGK

SEQ ID NO: 4175 - protein, 1996 aa, Homo sapiens
MMRTTEDFHKPSATLNSNTATKGRYIYLEAFLEGGAPWGFTLKGGLEHGEPLIISKVEEGGKADTLSSKLQAGDEVVHINEVTLSSSRKEAVSLVKGSYKTLRLVVRRDVCTDPGHADTGASNFVSPEHLTSGPQHRKAAWSGGVKLRLKHRRSEPAGRPHSWHTTKSGEKQPDASMMQISQGMIGPPWHQSYHSSSSTSDLSNYDHAYLRRSPDQCSSQGSMESLEPSGAYPPCHLSPAKSTGSIDQLSHFHNKRDSAYSSFSTSSSILEYPHPGISGRERSGSMDNTSARGGLLEGMRQADIRYVKTVYDTRRGVSAEYEVNSSALLLQGREARASANGQGYDKWSNIPRGKGVPPPSWSQQCPSSLETATDNLPPKVGAPLPPARSDSYAAFRHRERPSSWSSLDQKRLCRPQANSLGSLKSPFIEEQLHTVLEKSPENSPPVKPKHNYTQKAQPGQPLLPTSIYPVPSLEPHFAQVPQPSVSSNGMLYPALAKESGYIAPQGACNKMATIDENGNQNGSGRPGFAFCQPLEHDLLSPVEKKPEATAKYVPSKVHFCSVPENEEDASLKRHLTPPQGNSPHSNERKSTHSNKPSSHPHSLKCPQAQAWQAGEDKRSSRLSEPWEGDFQEDHNANLWRRLEREGLGQSLSGNFGKTKSAFSSLQNIPESLRRHSSLELGRGTQEGYPGGRPTCAVNTKAEDPGRKAAPDLGSHLDRQVSYPRPEGRTGASASFNSTDPSPEEPPAPSHPHTSSLGRRGPGPGSASALQGFQYGKPHCSVLEKVSKFEQREQGSQRPSVGGSGFGHNYRPHRTVSTSSTSGNDFEETKAHIRFSESAEPLGNGEQHFKNGELKLEEASRQPCGQQLSGGASDSGRGPQRPDARLLRSQSTFQLSSEPEREPEWRDRPGSPESPLLDAPFSRAYRNSIKDAQSRVLGATSFRRRDLELGAPVASRSWRPRPSSAHVGLRSPEASASASPHTPRERHSVTPAEGDLARPVPPAARRGARRRLTPEQKKRSYSEPEKMNEVGIVEEAEPAPLGPQRNGMRFPESSVADRRRLFERDGKACSTLSLSGPELKQFQQSALADYIQRKTGKRPTSAAGCSLQEPGPLRERAQSAYLQPGPAALEGSGLASASSLSSLREPSLQPRREATLLPATVAETQQAPRDRSSSFAGGRRLGERRRGDLLSGANGGTRGTQRGDETPREPSSWGARAGKSMSAEDLLERSDVLAGPVHVRSRSSPATADKRQDVLLGQDSGFGLVKDPCYLAGPGSRSLSCSERGQEEMLPLFHHLTPRWGGSGCKAIGDSSVPSECPGTLDHQRQASRTPCPRPPLAGTQGLVTDTRAAPLTPIGTPLPSAIPSGYCSQDGQTGRQPLPPYTPAMMHRSNGHTLTQPPGPRGCEGDGPEHGVEEGTRKRVSLPQWPPPSRAKWAHAAREDSLPEESSAPDFANLKHYQKQQSLPSLCSTSDPDTPLGAPSTPGRISLRISESVLRDSPPPHEDYEDEVFVRDPHPKATSSPTFEPLPPPPPPPPSQETPVYSMDDFPPPPPHTVCEAQLDSEDPEGPRPSFNKLSKVTIARERHMPGAAHVVGSQTLASRLQTSIKGSEAESTPPSFMSVHAQLAGSLGGQPAPIQTQSLSHDPVSGTQGLEKKVSPDPQKSSEDIRTEALAKEIVHQDKSLADILDPDSRLKTTMDLMEGLFPRDVNLLKENSVKRKAIQRTVSSSGCEGKRNEDKEAVSMLVNCPAYYSVSAPKAELLNKIKEMPAEVNEEEEQADVNEKKAELIGSLTHKLETLQEAKGSLLTDIKLNNALGEEVEALISELCKPNEFDKYRMFIGDLDKVVNLLLSLSGRLARVENVLSGLGEDASNEERSSLYEKRKILAGQHEDARELKENLDRRERVVLGILANYLSEEQLQDYQHFVKMKSTLLIEQRKLDDKIKLGQEQVKCLLESLPSDFIPKAGALALPPNLTSEPIPAGGCTFSGIFPTLTSPL

SEQ ID NO: 4176 - protein, 186 aa, Homo sapiens
MAFYSTPEYDIQLARGLLSGMFLFATRRSEPAGRPHSWHTTKSGEKQPDASMMQISQGMIGPPWHQSYHSSSSTSDLSNYDHAYLRRSPDQCSSQGSMESLEPSGAYPPCHLSPAKSTGSIDQLSHFHNKRDSAYSSFSTSSSILEYPHPGKRVKTRDLPGSQSPGRAISRKTTMPTSGGGWREKA

SEQ ID NO: 4177 - protein, 58 aa, Homo sapiens
MNWKVLEHVPLLLYILAAKTLILCLTFAGVKMYQRKRLEAKQQKLEAERKKQSEKKDN

SEQ ID NO: 4178 - protein, 92 aa, Homo sapiens
MWPVFWTVVRTYAPYVTFPVAFVVGAVGYHLEWFIRGKDPQPVEEEKSISERREDRKLDELLGKDHTQVVSLKDKLEFAPKAVLNRNRPEKN

SEQ ID NO: 4179 - protein, 994 aa, Homo sapiens
MRPVALLLLPSLLALLAHGLSLEAPTVGKGQAPGIEETDGELTAAPTPEQPERGVHFVTTAPTLKLLNHHPLLEEFLQEGLEKGDEELRPALPFQPDPPAPFTPSPLPRLANQDSRPVFTSPTPAMAAVPTQPQSKEGPWSPESESPMLRITAPLPPGPSMAVPTLGPGEIASTTPPSRAWTPTQEGPGDMGRPWVAEVVSQGAGIGIQGTITSSTASGDDEETTTTTTIITTTITTVQTPGPCSWNFSGPEGSLDSPTDLSSPTDVGLDCFFYISVYPGYGVEIKVQNISLREGETVTVEGLGGPDPLPLANQSFLLRGQVIRSPTHQAALRFQSLPPPAGPGTFHFHYQAYLLSCHFPRRPAYGDVTVTSLHPGGSARFHCATGYQLKGARHLTCLNATQPFWDSKEPVCIAACGGVIRNATTGRIVSPGFPGNYSNNLTCHWLLEAPEGQRLHLHFEKVSLAEDDDRLIIRNGDNVEAPPVYDSYEVEYLPIEGLLSSGKHFFVELSTDSSGAAAGMALRYEAFQQGHCYEPFVKYGNFSSSTPTYPVGTTVEFSCDPGYTLEQGSIIIECVDPHDPQWNETEPACRAVCSGEITDSAGVVLSPNWPEPYGRGQDCIWGVHVEEDKRIMLDIRVLRIGPGDVLTFYDGDDLTARVLGQYSGPRSHFKLFTSMADVTIQFQSDPGTSVLGYQQGFVIHFFEVPRNDTCPELPEIPNGWKSPSQPELVHGTVVTYQCYPGYQVVGSSVLMCQWDLTWSEDLPSCQRVTSCHDPGDVEHSRRLISSPKFPVGATVQYICDQGFVLMGSSILTCHDRQAGSPKWSDRAPKCLLEQLKPCHGLSAPENGARSPEKQLHPAGATIHFSCAPGYVLKGQASIKCVPGHPSHWSDPPPICRAASLDGFYNSRSLDVAKAPAASSTLDAAHIAAAIFLPLVAMVLLVGGVYFYFSRLQGKSSLQLPRPRPRPYNRITIESAFDNPTYETGSLSFAGDERI

SEQ ID NO: 4180 - protein, 869 aa, Homo sapiens
MAAVPTQPQSKEGPWSPESESPMLRITAPLPPGPSMAVPTLGPGEIASTTPPSRAWTPTQEGPGDMGRPWVAEVVSQGAGIGIQGTITSSTASGDDEETTTTTTIITTTITTVQTPGPCSWNFSGPEGSLDSPTDLSSPTDVGLDCFFYISVYPGYGVEIKVQNISLREGETVTVEGLGGPDPLPLANQSFLLRGQVIRSPTHQAALRFQSLPPPAGPGTFHFHYQAYLLSCHFPRRPAYGDVTVTSLHPGGSARFHCATGYQLKGARHLTCLNATQPFWDSKEPVCIAACGGVIRNATTGRIVSPGFPGNYSNNLTCHWLLEAPEGQRLHLHFEKVSLAEDDDRLIIRNGDNVEAPPVYDSYEVEYLPIEGLLSSGKHFFVELSTDSSGAAAGMALRYEAFQQGHCYEPFVKYGNFSSSTPTYPVGTTVEFSCDPGYTLEQGSIIIECVDPHDPQWNETEPACRAVCSGEITDSAGVVLSPNWPEPYGRGQDCIWGVHVEEDKRIMLDIRVLRIGPGDVLTFYDGDDLTARVLGQYSGPRSHFKLFTSMADVTIQFQSDPGTSVLGYQQGFVIHFFEVPRNDTCPELPEIPNGWKSPSQPELVHGTVVTYQCYPGYQVVGSSVLMCQWDLTWSEDLPSCQRVTSCHDPGDVEHSRRLISSPKFPVGATVQYICDQGFVLMGSSILTCHDRQAGSPKWSDRAPKCLLEQLKPCHGLSAPENGARSPEKQLHPAGATIHFSCAPGYVLKGQASIKCVPGHPSHWSDPPPICRAASLDGFYNSRSLDVAKAPAASSTLDAAHIAAAIFLPLVAMVLLVGGVYFYFSRLQGKSSLQLPRPRPRPYNRITIESAFDNPTYETGSLSFAGDERI

SEQ ID NO: 4181 - protein, 993 aa, Homo sapiens
MRPVALLLLPSLLALLAHGLSLEAPTVGKGQAPGIEETDGELTAAPTPEQPERGVHFVTTAPTLKLLNHHPLLEEFLQEGLEKGDEELRPALPFQPDPPAPFTPSPLPRLANQDSRPVFTSPTPAMAAVPTQPQSKEGPWSPESESPMLRITAPLPPGPSMAVPTLGPGEIASTTPPSRAWTPTQEGPGDMGRPWVAEVVSQGAGIGIQGTITSSTASGDDEETTTTTTIITTTITTVQTPGPCSWNFSGPEGSLDSPTDLSSPTDVGLDCFFYISVYPGYGVEIKVQNISLREGETVTVEGLGGPDPLPLANQSFLLRGQVIRSPTHQAALRFQSLPPPAGPGTFHFHYQAYLLSCHFPRRPAYGDVTVTSLHPGGSARFHCATGYQLKGARHLTCLNATQPFWDSKEPVCIAACGGVIRNATTGRIVSPGFPGNYSNNLTCHWLLEAPEGQRLHLHFEKVSLAEDDDRLIIRNGDNVEAPPVYDSYEVEYLPIEGLLSSGKHFFVELSTDSSGAAAGMALRYEAFQQGHCYEPFVKYGNFSSSTPTYPVGTTVEFSCDPGYTLEQGSIIIECVDPHDPQWNETEPACRAVCSGEITDSAGVVLSPNWPEPYGRGQDCIWGVHVEEDKRIMLDIRVLRIGPGDVLTFYDGDDLTARVLGQYSGPRSHFKLFTSMADVTIQFQSDPGTSVLGYQQGFVIHFFEVPRNDTCPELPEIPNGWKSPSQPELVHGTVVTYQCYPGYQVVGSSVLMCQWDLTWSEDLPSCQRVTSCHDPGDVEHSRRLISSPKFPVGATVQYICDQGFVLMGSSILTCHDRQAGSPKWSDRAPKCLLEQLKPCHGLSAPENGARSPEKQLHPAGATIHFSCAPGYVLKGQASIKCVPGHPSHWSDPPPICRAASLDGFYNSRSLDVAKAPAASSTLDAAHIAAAIFLPLVAMVLLVGGVYFYFSRLQGKSSLQLPRPRPRPYNRITIESAFDNPTYETGETREYEVSI

SEQ ID NO: 4182 - protein, 508 aa, Homo sapiens
MRPVALLLLPSLLALLAHGLSLEAPTVGKGQAPGIEETDGELTAAPTPEQPERGVHFVTTAPTLKLLNHHPLLEEFLQEGLEKGDEELRPALPFQPDPPAPFTPSPLPRLANQDSRPVFTSPTPAMAAVPTQPQSKEGPWSPESESPMLRITAPLPPGPSMAVPTLGPGEIASTTPPSRAWTPTQEGPGDMGRPWVAEVVSQGAGIGIQGTITSSTASGDDEETTTTTTIITTTITTVQTPGPCSWNFSGPEGSLDSPTDLSSPTDVGLDCFFYISVYPGYGVEIKVQNISLREGETVTVEGLGGPDPLPLANQSFLLRGQVIRSPTHQAALRFQSLPPPAGPGTFHFHYQAYLLSCHFPRRPAYGDVTVTSLHPGGSARFHCATGYQLKGARHLTCLNATQPFWDSKEPVCIAACGGVIRNATTGRIVSPGFPGNYSNNLTCHWLLEAPEGQRLHLHFEKVSLAEDDDRLIIRNGDNVEAPPVYDSYEVEYPPPPPPLQPHYHRVSV

SEQ ID NO: 4183 - protein, 1423 aa, Homo sapiens
MLEMRDVYMEEDVYQLQELRQQLDQASKTCRILQYRLRKAERRSLRAAQTGQVDGELIRGLEQDVKVSKDISMRLHKELEVVEKKRARLEEENEELRQRLIETELAKQVLQTELERPREHSLKKRGTRSLGKADKKTLVQEDSADLKCQLHFAKEESALMCKKLTKLAKENDSMKEELLKYRSLYGDLDSALSAEELADAPHSRETELKVHLKLVEEEANLLSRRIVELEVENRGLRAEMDDMKDHGGGCGGPEARLAFSALGGGECGESLAELRRHLQFVEEEAELLRRSSAELEDQNKLLLNELAKFRSEHELDVALSEDSCSVLSEPSQEELAAAKLQIGELSGKVKKLQYENRVLLSNLQRCDLASCQSTRPMLETDAEAGDSAQCVPAPLGETHESHAVRLCRAREAEVLPGLREQAALVSKAIDVLVADANGFTAGLRLCLDNECADFRLHEAPDNSEGPRDTKLIHAILVRLSVLQQELNAFTRKADAVLGCSVKEQQESFSSLPPLGSQGLSKEILLAKDLGSDFQPPDFRDLPEWEPRIREAFRTGDLDSKPDPSRSFRPYRAEDNDSYASEIKELQLVLAEAHDSLRGLQEQLSQERQLRKEEADNFNQKMVQLKEDQQRALLRREFELQSLSLQRRLEQKFWSQEKNMLVQESQQFKHNFLLLFMKLRWFLKRWRQGKVLPSEGDDFLEVNSMKELYLLMEEEEINAQHSDNKACTGDSWTQNTPNEYIKTLADMKVTLKELCWLLRDERRGLTELQQQFAKAKATWETERAELKGHTSQMELKTGKGAGERAGPDWKAALQREREEQQHLLAESYSAVMELTRQLQISERNWSQEKLQLVERLQGEKQQVEQQVKELQNRLSQLQKAADPWVLKHSELEKQDNSWKETRSEKIHDKEAVSEVELGGNGLKRTKSVSSMSEFESLLDCSPYLAGGDARGKKLPNNPAFGFVSSEPGDPEKDTKEKPGLSSRDCNHLGALACQDPPGRQMQRSYTAPDKTGIRVYYSPPVARRLGVPVVHDKEGKIIIEPGFLFTTAKPKESAEADGLAESSYGRWLCNFSRQRLDGGSAGSPSAAGPGFPAALHDFEMSGNMSDDMKEITNCVRQAMRSGSLERKVKSTSSQTVGLASVGTQTIRTVSVGLQTDPPRSSLHGKAWSPRSSSLVSVRSKQISSSLDKVHSRIERPCCSPKYGSPKLQRRSVSKLDSSKDRSLWNLHQGKQNGSAWARSTTTRDSPVLRNINDGLSSLFSVVEHSGSTESVWKLGMSETRAKPEPPKYGIVQEFFRNVCGRAPSPTSSAGEEGTKKPEPLSPASYHQPEGVARILNKKAAKLGSSEEVRLTMLPQVGKDGVLRDGDGAVVLPNEDAVCDCSTQSLTSCFARSSRSAIRHSPSKCRLHPSESSWGGEERALPPSE

SEQ ID NO: 4184 - protein, 1661 aa, Homo sapiens
MEAPAAEPPVRGCGPQPAPAPAPAPERKKSHRAPSPARPKDVAGWSLAKGRRGPGPGSAVACSAAFSSRPDKKGRAVAPGARGAGVRVAGVRTGVRAKGRPRSGAGPRPPPPPPSLTDSSSEVSDCASEEARLLGLELALSSDAESAAGGPAGVRTGQPAQPAPSAQQPPRPPASPDEPSVAASSVGSSRLPLSASLAFSDLTEEMLDCGPSGLVRELEELRSENDYLKDEIEELRAEMLEMRDVYMEEDVYQLQELRQQLDQASKTCRILQYRLRKAERRSLRAAQTGQVDGELIRGLEQDVKVSKDISMRLHKELEVVEKKRARLEEENEELRQRLIETELAKQVLQTELERPREHSLKKRGTRSLGKADKKTLVQEDSADLKCQLHFAKEESALMCKKLTKLAKENDSMKEELLKYRSLYGDLDSALSAEELADAPHSRETELKVHLKLVEEEANLLSRRIVELEVENRGLRAEMDDMKDHGGGCGGPEARLAFSALGGGECGESLAELRRHLQFVEEEAELLRRSSAELEDQNKLLLNELAKFRSEHELDVALSEDSCSVLSEPSQEELAAAKLQIGELSGKVKKLQYENRVLLSNLQRCDLASCQSTRPMLETDAEAGDSAQCVPAPLGETHESHAVRLCRAREAEVLPGLREQAALVSKAIDVLVADANGFTAGLRLCLDNECADFRLHEAPDNSEGPRDTKLIHAILVRLSVLQQELNAFTRKADAVLGCSVKEQQESFSSLPPLGSQGLSKEILLAKDLGSDFQPPDFRDLPEWEPRIREAFRTGDLDSKPDPSRSFRPYRAEDNDSYASEIKELQLVLAEAHDSLRGLQEQLSQERQLRKEEADNFNQKMVQLKEDQQRALLRREFELQSLSLQRRLEQKFWSQEKNMLVQESQQFKHNFLLLFMKLRWFLKRWRQGKVLPSEGDDFLEVNSMKELYLLMEEEEINAQHSDNKACTGDSWTQNTPNEYIKTLADMKVTLKELCWLLRDERRGLTELQQQFAKAKATWETERAELKGHTSQMELKTGKGAGERAGPDWKAALQREREEQQHLLAESYSAVMELTRQLQISERNWSQEKLQLVERLQGEKQQVEQQVKELQNRLSQLQKAADPWVLKHSELEKQDNSWKETRSEKIHDKEAVSEVELGGNGLKRTKSVSSMSEFESLLDCSPYLAGGDARGKKLPNNPAFGFVSSEPGDPEKDTKEKPGLSSRDCNHLGALACQDPPGRQMQRSYTAPDKTGIRVYYSPPVARRLGVPVVHDKEGKIIIEPGFLFTTAKPKESAEADGLAESSYGRWLCNFSRQRLDGGSAGSPSAAGPGFPAALHDFEMSGNMSDDMKEITNCVRQAMRSGSLERKVKSTSSQTVGLASVGTQTIRTVSVGLQTDPPRSSLHGKAWSPRSSSLVSVRSKQISSSLDKVHSRIERPCCSPKYGSPKLQRRSVSKLDSSKDRSLWNLHQGKQNGSAWARSTTTRDSPVLRNINDGLSSLFSVVEHSGSTESVWKLGMSETRAKPEPPKYGIVQEFFRNVCGRAPSPTSSAGEEGTKKPEPLSPASYHQPEGVARILNKKAAKLGSSEEVRLTMLPQVGKDGVLRDGDGAVVLPNEDAVCDCSTQSLTSCFARSSRSAIRHSPSKCRLHPSESSWGGEERALPPSE

SEQ ID NO: 4185 - protein, 518 aa, Homo sapiens
MWDWAPTTSLQEVNKTVLVFALTQHTDQGGRPECALSVISTNNDVSSSVLRRTKSVSSMSEFESLLDCSPYLAGGDARGKKLPNNPAFGFVSSEPGDPEKDTKEKPGLSSRDCNHLGALACQDPPGRQMQRSYTAPDKTGIRVYYSPPVARRLGVPVVHDKEGKIIIEPGFLFTTAKPKESAEADGLAESSYGRWLCNFSRQRLDGGSAGSPSAAGPGFPAALHDFEMSGNMSDDMKEITNCVRQAMRSGSLERKVKSTSSQTVGLASVGTQTIRTVSVGLQTDPPRSSLHGKAWSPRSSSLVSVRSKQISSSLDKVHSRIERPCCSPKYGSPKLQRRSVSKLDSSKDRSLWNLHQGKQNGSAWARSTTTRDSPVLRNINDGLSSLFSVVEHSGSTESVWKLGMSETRAKPEPPKYGIVQEFFRNVCGRAPSPTSSAGEEGTKKPEPLSPASYHQPEGVARILNKKAAKLGSSEEVRLTMLPQVGKDGVLRDGDGAVVLPNEVGGWDLSFLLVGGVSI

SEQ ID NO: 4186 - protein, 1016 aa, Homo sapiens
MLEMRDVYMEEDVYQLQELRQQLDQASKTCRILQYRLRKAERRSLRAAQTGQVDGELIRGLEQDVKVSKDISMRLHKELEVVEKKRARLEEENEELRQRLIETELAKQVLQTELERPREHSLKKRGTRSLGKADKKTLVQEDSADLKCQLHFAKEESALMCKKLTKLAKENDSMKEELLKYRSLYGDLDSALSAEELADAPHSRETELKVHLKLVEEEANLLSRRIVELEVENRGLRAEMDDMKDHGGGCGGPEARLAFSALGGGECGESLAELRRHLQFVEEEAELLRRSSAELEDQNKLLLNELAKFRSEHELDVALSEDSCSVLSEPSQEELAAAKLQIGELSGKVKKLQYENRVLLSNLQRCDLASCQSTRPMLETDAEAGDSAQCVPAPLGETHESHAVRLCRAREAEVLPGLREQAALVSKAIDVLVADANGFTAGLRLCLDNECADFRLHEAPDNSEGPRDTKLIHAILVRLSVLQQELNAFTRKADAVLGCSVKEQQESFSSLPPLGSQGLSKEILLAKDLGSDFQPPDFRDLPEWEPRIREAFRTGDLDSKPDPSRSFRPYRAEDNDSYASEIKELQLVLAEAHDSLRGLQEQLSQERQLRKEEADNFNQKMVQLKEDQQRALLRREFELQSLSLQRRLEQKFWSQEKNMLVQESQQFKHNFLLLFMKLRWFLKRWRQGKVLPSEGDDFLEVNSMKELYLLMEEEEINAQHSDNKACTGDSWTQNTPNEYIKTLADMKVTLKELCWLLRDERRGLTELQQQFAKAKATWETERAELKGHTSQMELKTGKGAGERAGPDWKAALQREREEQQHLLAESYSAVMELTRQLQISERNWSQEKLQLVERLQGEKQQVEQQVKELQNRLSQLQKAADPWVLKHSELEKQDNSWKETRSEKIHDKEAVSEVELGGNGLKRTKSVSSMSEFESLLDCSPYLAGGDARGKKLPNNPAFGFVSSEPGDPEKDTKEKPGLSSRDCNHLGALACQDPPGRQKLPFLLILAPPQPPPIL

SEQ ID NO: 4187 - protein, 639 aa, Homo sapiens
MATGANATPLDFPSKKRKRSRWNQDTMEQKTVIPGMPTVIPPGLTREQERAYIVQLQIEDLTRKLRTGDLGIPPNPEDRSPSPEPIYNSEGKRLNTREFRTRKKLEEERHNLITEMVALNPDFKPPADYKPPATRVSDKVMIPQDEYPEINFVGLLIGPRGNTLKNIEKECNAKIMIRGKGSVKEGKVGRKDGQMLPGEDEPLHALVTANTMENVKKAVEQIRNILKQGIETPEDQNDLRKMQLRELARLNGTLREDDNRILRPWQSSETRSITNTTVCTKCGGAGHIASDCKFQRPGDPQSAQDKARMDKEYLSLMAELGEAPVPASVGSTSGPATTPLASAPRPAAPANNPPPPSLMSTTQSRPPWMNSGPSESRPYHGMHGGGPGGPGGGPHSFPHPLPSLTGGHGGHPMQHNPNGPPPPWMQPPPPPMNQGPHPPGHHGPPPMDQYLGSTPVGSGVYRLHQGKGMMPPPPMGMMPPPPPPPSGQPPPPPSGPLPPWQQQQQQPPPPPPPSSSMASSTPLPWQQNTTTTTTSAGTGSIPPWQQQQAAAAASPGAPQMQGNPTMVPLPPGVQPPLPPGAPPPPPPPPPGSAGMMYAPPPPPPPPMDPSNFVTMMGMGVAGMPPFGMPPAPPPPPPQN

SEQ ID NO: 4188 - protein, 638 aa, Homo sapiens
MATGANATPLDFPSKKRKRSRWNQDTMEQKTVIPGMPTVIPPGLTREQERAYIVQLQIEDLTRKLRTGDLGIPPNPEDRSPSPEPIYNSEGKRLNTREFRTRKKLEEERHNLITEMVALNPDFKPPADYKPPATRVSDKVMIPQDEYPEINFVGLLIGPRGNTLKNIEKECNAKIMIRGKGSVKEGKVGRKDGQMLPGEDEPLHALVTANTMENVKKAVEQIRNILKQGIETPEDQNDLRKMQLRELARLNGTLREDDNRILRPWQSSETRSITNTTVCTKCGGAGHIASDCKFQRPGDPQSAQDKARMDKEYLSLMAELGEAPVPASVGSTSGPATTPLASAPRPAAPANNPPPPSLMSTTQSRPPWMNSGPSESRPYHGMHGGGPGGPGGGPHSFPHPLPSLTGGHGGHPMQHNPNGPPPPWMQPPPPPMNQGPHPPGHHGPPPMDQYLGSTPVGSGVYRLHQGKGMMPPPPMGMMPPPPPPPSGQPPPPPSGPLPPWQQQQQQPPPPPPPSSSMASSTPLPWQQNTTTTTTSAGTGSIPPWQQQQAAAAASPGAPQMQGNPTMVPLPPGVQPPLPPGAPPPPPPPPPGSAGMMIPPRGGDGPSHESEDFPRPLVTLPGRQPQQRPWWTGWFGKAA

SEQ ID NO: 4189 - protein, 623 aa, Homo sapiens
MATGANATPLDFPSKKRKRSRWNQDTMEQKTVIPGMPTVIPPGLTREQERAYIVQLQIEDLTRKLRTGDLGIPPNPEDRSPSPEPIYNSEGKRLNTREFRTRKKLEEERHNLITEMVALNPDFKPPADYKPPATRVSDKVMIPQDEYPEINFVGLLIGPRGNTLKNIEKECNAKIMIRGKGSVKEGKVGRKDGQMLPGEDEPLHALVTANTMENVKKAVEQIRNILKQGIETPEDQNDLRKMQLRELARLNGTLREDDNRILRPWQSSETRSITNTTVCTKCGGAGHIASDCKFQRPGDPQSAQDKARMDKEYLSLMAELGEAPVPASVGSTSGPATTPLASAPRPAAPANNPPPPSLMSTTQSRPPWMNSGPSESRPYHGMHGGGPGGPGGGPHSFPHPLPSLTGGHGGHPMQHNPNGPPPPWMQPPPPPMNQGPHPPGHHGPPPMDQYLGSTPVGSGVYRLHQGKGMMPPPPMGMMPPPPPPPSGQPPPPPSGPLPPWQQQQQQPPPPPPPSSSMASSTPLPWQQNTTTTTTSAGTGSIPPWQQQQAAAAASPGAPQMQGNPTMVPLPPGVQPPLPPGAPPPPPRSIECLLCLLSLLTQLPLPLPKPGRQDPSPRRRWPEP

SEQ ID NO: 4190 - protein, 548 aa, Homo sapiens
MATGANATPLDFPSKKRKRSRWNQDTMEQKTVIPGMPTVIPPGLTREQERAYIVQLQIEDLTRKLRTGDLGIPPNPEDRSPSPEPIYNSEGKRLNTREFRTRKKLEEERHNLITEMVALNPDFKPPADYKPPATRVSDKVMIPQDEYPEINFVGLLIGPRGNTLKNIEKECNAKIMIRGKGSVKEGKVGRKDGQMLPGEDEPLHALVTANTMENVKKAVEQIRNILKQGIETPEDQNDLRKMQLRELARLNGTLREDDNRILRPWQSSETRSITNTTVCTKCGGAGHIASDCKFQRPGDPQSAQDKARMDKEYLSLMAELGEAPVPASVGSTSGPATTPLASAPRPAAPANNPPPPSLMSTTQSRPPWMNSGPSESRPYHGMHGGGPGGPGGGPHSFPHPLPSLTGGHGGHPMQHNPNGPPPPWMQPPPPPMNQGPHPPGHHGPPPMDQYLGSTPVGSGVYRLHQGKGMMPPPPMGMMPPPPPPPSGQPPPPPSGPLPPWQQQQQQPPPPPPPSSSMASSTPLPWQQRSLPAAAMARAMRVRTFRAHW

SEQ ID NO: 4191 - protein, 673 aa, Homo sapiens
MATGANATPLGKLGPPGLPPLPGPKGGFEPGPPPAPGPGAGLLAPGPPPPPPVGSMGALTAAFPFAALPPPPPPPPPPPPQQPPPPPPPPSPGASYPPPQPPPPPPLYQRVSPPQPPPPQPPRKDQQPGPAGGGGDFPSKKRKRSRWNQDTMEQKTVIPGMPTVIPPGLTREQERAYIVQLQIEDLTRKLRTGDLGIPPNPEDRSPSPEPIYNSEGKRLNTREFRTRKKLEEERHNLITEMVALNPDFKPPADYKPPATRVSDKVMIPQDEYPEINFVGLLIGPRGNTLKNIEKECNAKIMIRGKGSVKEGKVGRKDGQMLPGEDEPLHALVTANTMENVKKAVEQIRNILKQGIETPEDQNDLRKMQLRELARLNGTLREDDNRILRPWQSSETRSITNTTVCTKCGGAGHIASDCKFQRPGDPQSAQDKARMDKEYLSLMAELGEAPVPASVGSTSGPATTPLASAPRPAAPANNPPPPSLMSTTQSRPPWMNSGPSESRPYHGMHGGGPGGPGGGPHSFPHPLPSLTGGHGGHPMQHNPNGPPPPWMQPPPPPMNQGPHPPGHHGPPPMDQYLGSTPVGSGVYRLHQGKGMMPPPPMGMMPPPPPPPSGQPPPPPSGPLPPWQQQQQQPPPPPPPSSSMASSTPLPWQQRSLPAAAMARAMRVRTFRAHW

SEQ ID NO: 4192 - protein, 571 aa, Homo sapiens
MATGANATPLDFPSKKRKRSRWNQDTMEQKTVIPGMPTVIPPGLTREQERAYIVQLQIEDLTRKLRTGDLGIPPNPEDRSPSPEPIYNSEGKRLNTREFRTRKKLEEERHNLITEMVALNPDFKPPADYKPPATRVSDKVMIPQDEYPEINFVGLLIGPRGNTLKNIEKECNAKIMIRGKGSVKEGKVGRKDGQMLPGEDEPLHALVTANTMENVKKAVEQIRNILKQGIETPEDQNDLRKMQLRELARLNGTLREDDNRILRPWQSSETRSITNTTVCTKCGGAGHIASDCKFQRPGDPQSAQDKARMDKEYLSLMAELGEAPVPASVGSTSGPATTPLASAPRPAAPANNPPPPSLMSTTQSRPPWMNSGPSESRPYHGMHGGGPGGPGGGPHSFPHPLPSLTGGHGGHPMQHNPNGPPPPWMQPPPPPMNQGPHPPGHHGPPPMGKSVPGKYACGLWGLSPASRKRYDAATTYGHDAAAAAASQWAAPTPSLWSSSPMATTAAAASATPSAQQQYGFQYPLAMAAKIPPRGGDGPSHESEDFPRPLVTLPGRQPQQRPWWTGWFGKAA

SEQ ID NO: 4193 - protein, 613 aa, Homo sapiens
MEQKTVIPGMPTVIPPGLTREQERAYIVQLQIEDLTRKLRTGDLGIPPNPEDRSPSPEPIYNSEGKRLNTREFRTRKKLEEERHNLITEMVALNPDFKPPADYKPPATRVSDKVMIPQDEYPEINFVGLLIGPRGNTLKNIEKECNAKIMIRGKGSVKEGKVGRKDGQMLPGEDEPLHALVTANTMENVKKAVEQIRNILKQGIETPEDQNDLRKMQLRELARLNGTLREDDNRILRPWQSSETRSITNTTVCTKCGGAGHIASDCKFQRPGDPQSAQDKARMDKEYLSLMAELGEAPVPASVGSTSGPATTPLASAPRPAAPANNPPPPSLMSTTQSRPPWMNSGPSESRPYHGMHGGGPGGPGGGPHSFPHPLPSLTGGHGGHPMQHNPNGPPPPWMQPPPPPMNQGPHPPGHHGPPPMDQYLGSTPVGSGVYRLHQGKGMMPPPPMGMMPPPPPPPSGQPPPPPSGPLPPWQQQQQQPPPPPPPSSSMASSTPLPWQQNTTTTTTSAGTGSIPPWQQQQAAAAASPGAPQMQGNPTMVPLPPGVQPPLPPGAPPPPPPPPPGSAGMMYAPPPPPPPPMDPSNFVTMMGMGVAGMPPFGMPPAPPPPPPQN

SEQ ID NO: 4194 - protein, 340 aa, Homo sapiens
MADTATTASAAAASAASASSDAPPFQLGKPRFQQTSFYGRFRHFLDIIDPRTLFVTERRLREAVQLLEDYKHGTLRPGVTNEQLWSAQKIKQAILHPDTNEKIFMPFRMSGYIPFGTPIVVGLLLPNQTLASTVFWQWLNQSHNACVNYANRNATKPSPASKFIQGYLGAVISAVSIAVGLNVLVQKANKFTPATRLLIQRFVPFPAVASANICNVVLMRYGELEEGIDVLDSDGNLVGSSKIAARHALLETALTRVVLPMPILVLPPIVMSMLEKTALLQARPRLLLPVQSLVCLAAFGLALPLAISLFPQMSEIETSQLEPEIAQATSSRTVVYNKGL

SEQ ID NO: 4195 - protein, 1173 aa, Homo sapiens
MTRRCMPARPGFPSSPAPGSSPPRCHLRPGSTAHAAAGKRTESPGDRKQSIIDFFKPASKQDRHMLDSPQKSNIKYGGSRLSITGTEQFERKLSSPKESKPKRVPPEKSPIIEAFMKGVKEHHEDHGIHESRRPCLSLASKYLAKGTNIYVPSSYHLPKEMKSLKKKHRSPERRKSLFIHENNEKNDRDRGKTNADSKKQTTVAEADIFNNSSRSLSSRSSLSRHHPEESPLGAKFQLSLASYCRERELKRLRKEQMEQRINSENSFSEASSLSLKSSIERKYKPRQEQRKQNDIIPGKNNLSNVENGHLSRKRSSSDSWEPTSAGSKQNKFPEKRKRNSVDSDLKSTRESMIPKARESFLEKRPDGPHQKEKFIKHIALKTPGDVLRLEDISKEPSDETDGSSAGLAPSNSGNSGHHSTRNSDQIQVAGTKETKMQKPHLPLSQEKSAIKKASNLQKNKTASSTTKEKETKLPLLSRVPSAGSSLVPLNAKNCALPVSKKDKERSSSKECSGHSTESTKHKEHKAKTNKADSNVSSGKISGGPLRSEYGTPTKSPPAALEVVPCIPSPAAPSDKAPSEGESSGNSNAGSSALKRKLRGDFDSDEESLGYNLDSDEEEETLKSLEEIMALNFNQTPAATGKPPALSKGLRSQSSDYTGHVHPGTYTNTLERLVKEMEDTQRLDELQKQLQEDIRQGRGIKSPIRIGEEDSTDDEDGLLEEHKEFLKKFSVTIDAIPDHHPGEEIFNFLNSGKIFNQYTLDLRDSGFIGQSAVEKLILKSGKTDQIFLTTQGFLTSAYHYVQCPVPVLKWLFRMMSVHTDCIVSVQILSTLMEITIRNDTFSDSPVWPWIPSLSDVAAVFFNMGIDFRSLFPLENLQPDFNEDYLVSETQTTSRGKESEDSSYKPIFSTLPETNILNVVKFLGLCTSIHPEGYQDREIMLLILMLFKMSLEKQLKQIPLVDFQSLLINLMKNIRDWNTKVPELCLGINELSSHPHNLLWLVQLVPNWTSRGRQLRQCLSLVIISKLLDEKHEDVPNASNLQVSVLHRYLVQMKPSDLLKKMVLKKKAEQPDGIIDDSLHLELEKQAYYLTYILLHLVGEVSCSHSFSSGQRKHFVLLCGALEKHVKCDIREDARLFYRTKVKDLVARIHGKWQEIIQNCRPTQGQLHDFWVPDS

SEQ ID NO: 4196 - protein, 1186 aa, Homo sapiens
MTRRCMPARPGFPSSPAPGSSPPRCHLRPGSTAHAAAGKRTESPGDRKQSIIDFFKPASKQDRHMLDSPQKSNIKYGGSRLSITGTEQFERKLSSPKESKPKRVPPEKSPIIEAFMKGVKEHHEDHGIHESRRPCLSLASKYLAKGTNIYVPSSYHLPKEMKSLKKKHRSPERRKSLFIHENNEKNDRDRGKTNADSKKQTTVAEADIFNNSSRSLSSRSSLSRHHPEESPLGAKFQLSLASYCRERELKRLRKEQMEQRINSENSFSEASSLSLKSSIERKYKPRQEQRKQNDIIPGKNNLSNVENGHLSRKRSSSDSWEPTSAGSKQNKFPEKRKRNSVDSDLKSTRESMIPKARESFLEKRPDGPHQKEKFIKHIALKTPGDVLRLEDISKEPSDETDGSSAGLAPSNSGNSGHHSTRNSDQIQVAGTKETKMQKPHLPLSQEKSAIKKASNLQKNKTASSTTKEKETKLPLLSRVPSAGSSLVPLNAKNCALPVSKKDKERSSSKECSGHSTESTKHKEHKAKTNKADSNVSSGKISGGPLRSEYGTPTKSPPAALEVVPCIPSPAAPSDKAPSEGESSGNSNAGSSALKRKLRGDFDSDEESLGYNLDSDEEEETLKSLEEIMALNFNQTPAATGKPPALSKGLRSQSSDYTGHVHPGTYTNTLERLVKEMEDTQRLDELQKQLQEDIRQGRGIKSPIRIGEEDSTDDEDGLLEEHKEFLKKFSVTIDAIPDHHPGEEIFNFLNSGKIFNQYTLDLRDSGFIGQSAVEKLILKSGKTDQIFLTTQGFLTSAYHYVQCPVPVLKWLFRMMSVHTDCIVSVQILSTLMEITIRNDTFSDSPVWPWIPSLSDVAAVFFNMGIDFRSLFPLENLQPDFNEDYLVSETQTTSRGKESEDSSYKPIFSTLPETNILNVVKFLGLCTSIHPEGYQDREIMLLILMLFKMSLEKQLKQIPLVDFQSLLINLMKNIRDWNTKVPELCLGINELSSHPHNLLWLVQLVPNWTSRGRQLRQCLSLVIISKLLDEKHEDVPNASNLQVSVLHRYLVQMKPSDLLKKMVLKKKAEQPDGIIDDSLHLELEKQAYYLTYILLHLVGEVSCSHSFSSGQRKHFVLLCGALEKHVKCDIREDARLFYRTKVKDLVARIHGKWQEIIQNCRPTQVSFCYTISCILNSFAEWHSSYCLK

SEQ ID NO: 4197 - protein, 63 aa, Homo sapiens
MTRRCMPARPGFPSSPAPGSSPPRCHLRPGSTAHAAAGKRTESPGDRYRAEGLRRGRVAGARV

SEQ ID NO: 4198 - protein, 891 aa, Homo sapiens
MSLRIDVDTNFPECVVDAGKVTLGTQQRQEMDPRLREKQNEIILRAVCALLNSGGGIIKAEIENKGYNYERHGVGLDVPPIFRSHLDKMQKENHFLIFVKSWNTEAGVPLATLCSNLYHRERTSTDVMDSQEALAFLKCRTQTPTNINVSNSLGPQAAQGSVQYEGNINVSAAALFDRKRLQYLEKLNLPESTHVEFVMFSTDVSHCVKDRLPKCVSAFANTEGGYVFFGVHDETCQVIGCEKEKIDLTSLRASIDGCIKKLPVHHFCTQRPEIKYVLNFLEVHDKGALRGYVCAIKVEKFCCAVFAKVPSSWQVKDNRVRQLPTREWTAWMMEADPDLSRCPEMVLQLSLSSATPRSKPVCIHKNSECLKEQQKRYFPVFSDRVVYTPESLYKELFSQHKGLRDLINTEMRPFSQGILIFSQSWAVDLGLQEKQGVICDALLISQNNTPILYTIFSKWDAGCKGYSMIVAYSLKQKLVNKGGYTGRLCITPLVCVLNSDRKAQSVYSSYLQIYPESYNFMTPQHMEALLQSLVIVLLGFKSFLSEELGSEVLNLLTNKQYELLSKNLRKTRELFVHGLPGSGKTILALRIMEKIRNVFHCEPANILYICENQPLKKLVSFSKKNICQPVTRKTFMKNNFEHIQHIIIDDAQNFRTEDGDWYGKAKFITQTARDGPGVLWIFLDYFQTYHLSCSGLPPPSDQYPREEINRVVRNAGPIANYLQQVMQEARQNPPPNLPPGSLVMLYEPKWAQGVPGNLEIIEDLNLEEILIYVANKCRFLLRNGYSPKDIAVLFTKASEVEKYKDRLLTAMRKRKLSQLHEESDLLLQIGDASDVLTDHIVLDSVCRFSGLERNIVFGINPGVAPPAGAYNLLLCLASRAKRHLYILKASV

SEQ ID NO: 4199 - protein, 338 aa, Homo sapiens
MSLRIDVDTNFPECVVDAGKVTLGTQQRQEMDPRLREKQNEIILRAVCALLNSGGGIIKAEIENKGYNYERHGVGLDVPPIFRSHLDKMQKENHFLIFVKSWNTEAGVPLATLCSNLYHRERTSTDVMDSQEALAFLKCRTQTPTNINVSNSLGPQAAQGSVQYEGNINVSAAALFDRKRLQYLEKLNLPESTHVEFVMFSTDVSHCVKDRLPKCVSAFANTEGGYVFFGVHDETCQVIGCEKEKIDLTSLRASIDGCIKKLPVHHFCTQRPEIKYVLNFLEVHDKGALRGYVCAIKVEKFCCAVFAKVPSSWQVKDNRVRQLPTREWTAWMMEADPG

SEQ ID NO: 4200 - protein, 1461 aa, Homo sapiens
MAAGGGGGSSKASSSSASSAGALESSLDRKFQSVTNTMESIQGLSSWCIENKKHHSTIVYHWMKWLRRSAYPHRLNLFYLANDVIQNCKRKNAIIFRESFADVLPEAAALVKDPSVSKSVERIFKIWEDRNVYPEEMIVALREALSTTFKTQKQLKENLNKQPNKQWKKSQTSTNPKAALKSKIVAEFRSQALIEELLLYKRSEDQIELKEKQLSTMRVDVCSTETLKCLKDKTGGKKFSKEFEEASSKLEEFVNGLDKQVKNGPSLTEALENAGIFYEAQYKEVKVVANAYKTFANRVNNLKKKLDQLKSTLPDPEESPVPSPSMDAPSPTGSESPFQGMGGEESQSPTMESEKSATPEPVTDNRDVEDMELSDVEDDGSKIIVEDRKEKPAEKSAVSTSVPTKPTENISKASSCTPVPVTMTATPPLPKPVNTSLSPSPALALPNLANVDLAKISSILSSLTSVMKNTGVSPASRPSPGTPTSPSNLTSGLKTPAPATTTSHNPLANILSKVEITPESILSALSKTQTQSAPALQGLSSLLQSVTGNPVPASEAASQSTSASPANTTVSTIKGRNLPSSAQPFIPKSFNYSPNSSTSEVSSTSASKASIGQSPGLPSTTFKLPSNSLGFTATHNTSPAAPPTEVTICQSSEVSKPKLESESTSPSLEMKIHNFLKGNPGFSGLNLNIPILSSLGSSAPSESHPSDFQRGPTSTSIDNIDGTPVRDERSGTPTQDEMMDKPTSSSVDTMSLLSKIISPGSSTPSSTRSPPPGRDESYPRELSNSVSTYRPFGLGSESPYKQPSDGMERPSSLMDSSQEKFYPDTSFQEDEDYRDFEYSGPPPSAMMNLEKKPAKSILKSSKLSDTTEYQPILSSYSHRAQEFGVKSAFPPSVRALLDSSENCDRLSSSPGLFGAFSVRGNEPGSDRSPSPSKNDSFFTPDSNHNSLSQSTTGHLSLPQKQYPDSPHPVPHRSLFSPQNTLAAPTGHPPTSGVEKVLASTISTTSTIEFKNMLKNASRKPSDDKHFGQAPSKGTPSDGVSLSNLTQPSLTATDQQQQEEHYRIETRVSSSCLDLPDSTEEKGAPIETLGYHSASNRRMSGEPIQTVESIRVPGKGNRGHGREASRVGWFDLSTSGSSFDNGPSSASELASLGGGGSGGLTGFKTAPYKERAPQFQESVGSFRSNSFNSTFEHHLPPSPLEHGTPFQREPVGPSSAPPVPPKDHGGIFSRDAPTHLPSVDLSNPFTKEAALAHAAPPPPPGEHSGIPFPTPPPPPPPGEHSSSGGSGVPFSTPPPPPPPVDHSGVVPFPAPPLAEHGVAGAVAVFPKDHSSLLQGTLAEHFGVLPGPRDHGGPTQRDLNGPGLSRVRESLTLPSHSLEHLGPPHGGGGGGGSNSSSGPPLGPSHRDTISRSGIILRSPRPDFRPREPFLSRDPFHSLKRPRPPFARGPPFFAPKRPFFPPRY

SEQ ID NO: 4201 - protein, 1424 aa, Homo sapiens
MESIQGLSSWCIENKKHHSTIVYHWMKWLRRSAYPHRLNLFYLANDVIQNCKRKNAIIFRESFADVLPEAAALVKDPSVSKSVERIFKIWEDRNVYPEEMIVALREALSTTFKTQKQLKENLNKQPNKQWKKSQTSTNPKAALKSKIVAEFRSQALIEELLLYKRSEDQIELKEKQLSTMRVDVCSTETLKCLKDKTGGKKFSKEFEEASSKLEEFVNGLDKQVKNGPSLTEALENAGIFYEAQYKEVKVVANAYKTFANRVNNLKKKLDQLKSTLPDPEESPVPSPSMDAPSPTGSESPFQGMGGEESQSPTMESEKSATPEPVTDNRDVEDMELSDVEDDGSKIIVEDRKEKPAEKSAVSTSVPTKPTENISKASSCTPVPVTMTATPPLPKPVNTSLSPSPALALPNLANVDLAKISSILSSLTSVMKNTGVSPASRPSPGTPTSPSNLTSGLKTPAPATTTSHNPLANILSKVEITPESILSALSKTQTQSAPALQGLSSLLQSVTGNPVPASEAASQSTSASPANTTVSTIKGRNLPSSAQPFIPKSFNYSPNSSTSEVSSTSASKASIGQSPGLPSTTFKLPSNSLGFTATHNTSPAAPPTEVTICQSSEVSKPKLESESTSPSLEMKIHNFLKGNPGFSGLNLNIPILSSLGSSAPSESHPSDFQRGPTSTSIDNIDGTPVRDERSGTPTQDEMMDKPTSSSVDTMSLLSKIISPGSSTPSSTRSPPPGRDESYPRELSNSVSTYRPFGLGSESPYKQPSDGMERPSSLMDSSQEKFYPDTSFQEDEDYRDFEYSGPPPSAMMNLEKKPAKSILKSSKLSDTTEYQPILSSYSHRAQEFGVKSAFPPSVRALLDSSENCDRLSSSPGLFGAFSVRGNEPGSDRSPSPSKNDSFFTPDSNHNSLSQSTTGHLSLPQKQYPDSPHPVPHRSLFSPQNTLAAPTGHPPTSGVEKVLASTISTTSTIEFKNMLKNASRKPSDDKHFGQAPSKGTPSDGVSLSNLTQPSLTATDQQQQEEHYRIETRVSSSCLDLPDSTEEKGAPIETLGYHSASNRRMSGEPIQTVESIRVPGKGNRGHGREASRVGWFDLSTSGSSFDNGPSSASELASLGGGGSGGLTGFKTAPYKERAPQFQESVGSFRSNSFNSTFEHHLPPSPLEHGTPFQREPVGPSSAPPVPPKDHGGIFSRDAPTHLPSVDLSNPFTKEAALAHAAPPPPPGEHSGIPFPTPPPPPPPGEHSSSGGSGVPFSTPPPPPPPVDHSGVVPFPAPPLAEHGVAGAVAVFPKDHSSLLQGTLAEHFGVLPGPRDHGGPTQRDLNGPGLSRVRESLTLPSHSLEHLGPPHGGGGGGGSNSSSGPPLGPSHRDTISRSGIILRSPRPDFRPREPFLSRDPFHSLKRPRPPFARGPPFFAPKRPFFPPRY

SEQ ID NO: 4202 - protein, 1435 aa, Homo sapiens
MAAGGGGGSSKASSSSASSAGALESSLDRKFQSVTNTMESIQGLSSWCIENKKHHSTIVYHWMKWLRRSAYPHRLNLFYLANDVIQNCKRKNAIIFRESFADVLPEAAALVKDPSVSKSVERIFKIWEDRNVYPEEMIVALREALTSTNPKAALKSKIVAEFRSQALIEELLLYKRSEDQIELKEKQLSTMRVDVCSTETLKCLKDKTGGKKFSKEFEEASSKLEEFVNGLDKQVKNGPSLTEALENAGIFYEAQYKEVKVVANAYKTFANRVNNLKKKLDQLKSTLPDPEESPVPSPSMDAPSPTGSESPFQGMGGEESQSPTMESEKSATPEPVTDNRDVEDMELSDVEDDGSKIIVEDRKEKPAEKSAVSTSVPTKPTENISKASSCTPVPVTMTATPPLPKPVNTSLSPSPALALPNLANVDLAKISSILSSLTSVMKNTGVSPASRPSPGTPTSPSNLTSGLKTPAPATTTSHNPLANILSKVEITPESILSALSKTQTQSAPALQGLSSLLQSVTGNPVPASEAASQSTSASPANTTVSTIKGRNLPSSAQPFIPKSFNYSPNSSTSEVSSTSASKASIGQSPGLPSTTFKLPSNSLGFTATHNTSPAAPPTEVTICQSSEVSKPKLESESTSPSLEMKIHNFLKGNPGFSGLNLNIPILSSLGSSAPSESHPSDFQRGPTSTSIDNIDGTPVRDERSGTPTQDEMMDKPTSSSVDTMSLLSKIISPGSSTPSSTRSPPPGRDESYPRELSNSVSTYRPFGLGSESPYKQPSDGMERPSSLMDSSQEKFYPDTSFQEDEDYRDFEYSGPPPSAMMNLEKKPAKSILKSSKLSDTTEYQPILSSYSHRAQEFGVKSAFPPSVRALLDSSENCDRLSSSPGLFGAFSVRGNEPGSDRSPSPSKNDSFFTPDSNHNSLSQSTTGHLSLPQKQYPDSPHPVPHRSLFSPQNTLAAPTGHPPTSGVEKVLASTISTTSTIEFKNMLKNASRKPSDDKHFGQAPSKGTPSDGVSLSNLTQPSLTATDQQQQEEHYRIETRVSSSCLDLPDSTEEKGAPIETLGYHSASNRRMSGEPIQTVESIRVPGKGNRGHGREASRVGWFDLSTSGSSFDNGPSSASELASLGGGGSGGLTGFKTAPYKERAPQFQESVGSFRSNSFNSTFEHHLPPSPLEHGTPFQREPVGPSSAPPVPPKDHGGIFSRDAPTHLPSVDLSNPFTKEAALAHAAPPPPPGEHSGIPFPTPPPPPPPGEHSSSGGSGVPFSTPPPPPPPVDHSGVVPFPAPPLAEHGVAGAVAVFPKDHSSLLQGTLAEHFGVLPGPRDHGGPTQRDLNGPGLSRVRESLTLPSHSLEHLGPPHGGGGGGGSNSSSGPPLGPSHRDTISRSGIILRSPRPDFRPREPFLSRDPFHSLKRPRPPFARGPPFFAPKRPFFPPRY

SEQ ID NO: 4203 - protein, 152 aa, Homo sapiens
MAAGGGGGSSKASSSSASSAGALESSLDRKFQSVTNTMESIQGLSSWCIENKKHHSTIVYHWMKWLRRSAYPHRLNLFYLANDVIQNCKRKNAIIFRESFADVLPEAAALVKDPSVSKSVERIFKIWEDRNVYPEEMIVALREALSKCLFLS

SEQ ID NO: 4204 - protein, 934 aa, Homo sapiens
MAAGGGGGSSKASSSSASSAGALESSLDRKFQSVTNTMESIQGLSSWCIENKKHHSTIVYHWMKWLRRSAYPHRLNLFYLANDVIQNCKRKNAIIFRESFADVLPEAAALVKDPSVSKSVERIFKIWEDRNVYPEEMIVALREALTSTNPKAALKSKIVAEFRSQALIEELLLYKRSEDQIELKEKQLSTMRVDVCSTETLKCLKDKTGGKKFSKEFEEASSKLEEFVNGLDKQVKNGPSLTEALENAGIFYEAQYKEVKVVANAYKTFANRVNNLKKKLDQLKSTLPDPEESPVPSPSMDAPSPTGSESPFQGMGGEESQSPTMESEKSATPEPVTDNRDVEDMELSDVEDDGSKIIVEDRKEKPAEKSAVSTSVPTKPTENISKASSCTPVPVTMTATPPLPKPVNTSLSPSPALALPNLANVDLAKISSILSSLTSVMKNTGVSPASRPSPGTPTSPSNLTSGLKTPAPATTTSHNPLANILSKVEITPESILSALSKTQTQSAPALQGLSSLLQSVTGNPVPASEAASQSTSASPANTTVSTIKGRNLPSSAQPFIPKSFNYSPNSSTSEVSSTSASKASIGQSPGLPSTTFKLPSNSLGFTATHNTSPAAPPTEVTICQSSEVSKPKLESESTSPSLEMKIHNFLKGNPGFSGLNLNIPILSSLGSSAPSESHPSDFQRGPTSTSIDNIDGTPVRDERSGTPTQDEMMDKPTSSSVDTMSLLSKIISPGSSTPSSTRSPPPGRDESYPRELSNSVSTYRPFGLGSESPYKQPSDGMERPSSLMDSSQEKFYPDTSFQEDEDYRDFEYSGPPPSAMMNLEKKPAKSILKSSKLSDTTEYQPILSSYSHRAQEFGVKSAFPPSVRALLDSSENCDRLSSSPGLFGAFSVRGNEPGSDRSPSPKHPCRSHGSPTHVRRGESPGLHHFHHVDD

SEQ ID NO: 4205 - protein, 230 aa, Homo sapiens
MGKVRGLRARVHQAAVRPKGEAAPGPAPPAPEATPPPASAAGKDWAFINTNIFARTKIDPSALVQKLELDVRSVTSVRRGEAGSSARSVPSIRRGAEAKTVLPKKEKMKLRREQWLQKIEAIKLAEQKHREERRRRATVVVGDLHPLRDALPELLGLEAGSRRQARSRESNKPRPSELSRMSAAQRQQLLEEERTRFQELLASPAYRASPLVAIGQTLARQMQLEDGGQL

SEQ ID NO: 4206 - protein, 215 aa, Homo sapiens
MGKVRGLRARVHQAAVRPKGEAAPGPAPPAPEATPPPASAAGKDWAFINTNIFARTKIDPSALVQKLELDVRSVTSVRRGAEAKTVLPKKEKMKLRREQWLQKIEAIKLAEQKHREERRRRATVVVGDLHPLRDALPELLGLEAGSRRQARSRESNKPRPSELSRMSAAQRQQLLEEERTRFQELLASPAYRASPLVAIGQTLARQMQLEDGGQL

SEQ ID NO: 4207 - protein, 895 aa, Homo sapiens
MATEHPEPPKAELQLPPPPPPGHYGAWAAQELQAKLAEIGAPIQGNREELVERLQSYTRQTGIVLNRPVLRGEDGDKAAPPPMSAQLPGIPMPPPPLGLPPLQPPPPPPPPPPGLGLGFPMAHPPNLGPPPPLRVGEPVALSEEERLKLAQQQAALLMQQEERAKQQGDHSLKEHELLEQQKRAAVLLEQERQQEIAKMGTPVPRPPQDMGQIGVRTPLGPRVAAPVGPVGPTPTVLPMGAPVPRPRGPPPPPGDENREMDDPSVGPKIPQALEKILQLKESRQEEMNSQQEEEEMETDARSSLGQSASETEEDTVSVSKKEKNRKRRNRKKKKKPQRVRGVSSESSGDREKDSTRSRGSDSPAADVEIEYVTEEPEIYEPNFIFFKRIFEAFKLTDDVKKEKEKEPEKLDKLENSAAPKKKGFEEEHKDSDDDSSDDEQEKKPEAPKLSKKKLRRMNRFTVAELKQLVARPDVVEMHDVTAQDPKLLVHLKATRNSVPVPRHWCFKRKYLQGKRGIEKPPFELPDFIKRTGIQEMREALQEKEEQKTMKSKMREKVRPKMGKIDIDYQKLHDAFFKWQTKPKLTIHGDLYYEGKEFETRLKEKKPGDLSDELRISLGMPVGPNAHKVPPPWLIAMQRYGPPPSYPNLKIPGLNSPIPESCSFGYHAGGWGKPPVDETGKPLYGDVFGTNAAEFQTKTEEEEIDRTPWGELEPSDEESSEEEEEEESDEDKPDETGFITPADSGLITPGGFSSVPAGMETPELIELRKKKIEEAMDGSETPQLFTVLPEKRTATVGGAMMGSTHIYDMSTVMSRKGPAPELQGVEVALAPEELELDPMAMTQKYEEHVREQQAQVEKEDFSDMVAEHAAKQKQKKRKAQPQDSRGGSKKYKEFKF

SEQ ID NO: 4208 - protein, 350 aa, Homo sapiens
MKCSLRVWFLSVAFLLVFIMSLLFTYSHHSMATLPYLDSGALDGTHRVKLVPGYAGLQRLSKERLSGKSCACRRCMGDAGASDWFDSHFDGNISPVWTRENMDLPPDVQRWWMMLQPQFKSHNTNEVLEKLFQIVPGENPYRFRDPHQCRRCAVVGNSGNLRGSGYGQDVDGHNFIMRMNQAPTVGFEQDVGSRTTHHFMYPESAKNLPANVSFVLVPFKVLDLLWIASALSTGQIRFTYAPVKSFLRVDKEKVQIYNPAFFKYIHDRWTEHHGRYPSTGMLVLFFALHVCDEVNVYGFGADSRGNWHHYWENNRYAGEFRKTGVHDADFEAHIIDMLAKASKIEVYRGN

SEQ ID NO: 4209 - protein, 958 aa, Homo sapiens
MHTCCPPVTLEQDLHRKMHSWMLQTLAFAVTSLVLSCAETIDYYGEICDNACPCEEKDGILTVSCENRGIISLSEISPPRFPIYHLLLSGNLLNRLYPNEFVNYTGASILHLGSNVIQDIETGAFHGLRGLRRLHLNNNKLELLRDDTFLGLENLEYLQVDYNYISVIEPNAFGKLHLLQVLILNDNLLSSLPNNLFRFVPLTHLDLRGNRLKLLPYVGLLQHMDKVVELQLEENPWNCSCELISLKDWLDSISYSALVGDVVCETPFRLHGRDLDEVSKQELCPRRLISDYEMRPQTPLSTTGYLHTTPASVNSVATSSSAVYKPPLKPPKGTRQPNKPRVRPTSRQPSKDLGYSNYGPSIAYQTKSPVPLECPTACSCNLQISDLGLNVNCQERKIESIAELQPKPYNPKKMYLTENYIAVVRRTDFLEATGLDLLHLGNNRISMIQDRAFGDLTNLRRLYLNGNRIERLSPELFYGLQSLQYLFLQYNLIREIQSGTFDPVPNLQLLFLNNNLLQAMPSGVFSGLTLLRLNLRSNHFTSLPVSGVLDQLKSLIQIDLHDNPWDCTCDIVGMKLWVEQLKVGVLVDEVICKAPKKFAETDMRSIKSELLCPDYSDVVVSTPTPSSIQVPARTSAVTPAVRLNSTGAPASLGAGGGASSVPLSVLILSLLLVFIMSVFVAAGLFVLVMKRRKKNQSDHTSTNNSDVSSFNMQYSVYGGGGGTGGHPHAHVHHRGPALPKVKTPAGHVYEYIPHPLGHMCKNPIYRSREGNSVEDYKDLHELKVTYSSNHHLQQQQQPPPPPQQPQQQPPPQLQLQPGEEERRESHHLRSPAYSVSTIEPREDLLSPVQDADRFYRGILEPDKHCSTTPAGNSLPEYPKFPCSPAAYTFSPNYDLRRPHQYLHPGAGDSRLREPVLYSPPSAVFVEPNRNEYLELKAKLNVEPDYLEVLEKQTTFSQF

SEQ ID NO: 4210 - protein, 717 aa, Homo sapiens
MGAGKHREGGGGDPTSLNGCADLIQRRTEISRDLDEVSKQELCPRRLISDYEMRPQTPLSTTGYLHTTPASVNSVATSSSAVYKPPLKPPKGTRQPNKPRVRPTSRQPSKDLGYSNYGPSIAYQTKSPVPLECPTACSCNLQISDLGLNVNCQERKIESIAELQPKPYNPKKMYLTENYIAVVRRTDFLEATGLDLLHLGNNRISMIQDRAFGDLTNLRRLYLNGNRIERLSPELFYGLQSLQYLFLQYNLIREIQSGTFDPVPNLQLLFLNNNLLQAMPSGVFSGLTLLRLNLRSNHFTSLPVSGVLDQLKSLIQIDLHDNPWDCTCDIVGMKLWVEQLKVGVLVDEVICKAPKKFAETDMRSIKSELLCPDYSDVVVSTPTPSSIQVPARTSAVTPAVRLNSTGAPASLGAGGGASSVPLSVLILSLLLVFIMSVFVAAGLFVLVMKRRKKNQSDHTSTNNSDVSSFNMQYSVYGGGGGTGGHPHAHVHHRGPALPKVKTPAGHVYEYIPHPLGHMCKNPIYRSREGNSVEDYKDLHELKVTYSSNHHLQQQQQPPPPPQQPQQQPPPQLQLQPGEEERRESHHLRSPAYSVSTIEPREDLLSPVQDADRFYRGILEPDKHCSTTPAGNSLPEYPKFPCSPAAYTFSPNYDLRRPHQYLHPGAGDSRLREPVLYSPPSAVFVEPNRNEYLELKAKLNVEPDYLEVLEKQTTFSQF

SEQ ID NO: 4211 - protein, 380 aa, Homo sapiens
MRNCKMARVASVLGLVMLSVALLILSLISYVSLKKENIFTTPKYASPGAPRMYMFHAGFRSQFALKFLDPSFVPITNSLTQELQEKPSKWKFNRTAFLHQRQEILQHVDVIKNFSLTKNSVRIGQLMHYDYSSHKYVFSISNNFRSLLPDVSPIMNKHYNICAVVGNSGILTGSQCGQEIDKSDFVFRCNFAPTEAFQRDVGRKTNLTTFNPSILEKYYNNLLTIQDRNNFFLSLKKLDGAILWIPAFFFHTSATVTRTLVDFFVEHRGQLKVQLAWPGNIMQHVNRYWKNKHLSPKRLSTGILMYTLASAICEEIHLYGFWPFGFDPNTREDLPYHYYDKKGTKFTTKWQESHQLPAEFQLLYRMHGEGLTKLTLSHCA

SEQ ID NO: 4212 - protein, 462 aa, Homo sapiens
MLLLARCLLLVLVSSLLVCSGLACGPGRGFGKRRHPKKLTPLAYKQFIPNVAEKTLGASGRYEGKISRNSERFKELTPNYNPDIIFKDEENTGADRLMTQRCKDKLNALAISVMNQWPGVKLRVTEGWDEDGHHSEESLHYEGRAVDITTSDRDRSKYGMLARLAVEAGFDWVYYESKAHIHCSVKAENSVAAKSGGCFPGSATVHLEQGGTKLVKDLSPGDRVLAADDQGRLLYSDFLTFLDRDDGAKKVFYVIETREPRERLLLTAAHLLFVAPHNDSATGEPEASSGSGPPSGGALGPRALFASRVRPGQRVYVVAERDGDRRLLPAAVHSVTLSEEAAGAYAPLTAQGTILINRVLASCYAVIEEHSWAHRAFAPFRLAHALLAALAPARTDRGGDSGGGDRGGGGGRVALTAPGAADAPGAGATAGIHWYSQLLYQIGTWLLDSEALHPLGMAVKSS

SEQ ID NO: 4213 - protein, 135 aa, Homo sapiens [sequence omitted]

SEQ ID NO: 4214 - protein, 376 aa, Homo sapiens
MRYADPSANRDLLGSRTLLFIFICAFALVTLLQQILYGRNYIKRYFEFYEGPFEYNSTRCLELRHEILEVKVLSMVKQSELFDRWKSLQMCKWAMNISEANQFKSTLSRCCNAPAFLFTTQKNTPLGTKLKYEVDTSGIYHINQEIFRMFPKDMPYYRSQFKKCAVVGNGGILKNSRCGREINSADFVFRCNLPPISEKYTMDVGVKTDVVTVNPSIITERFHKLEKWRRPFYRVLQVYENASVLLPAFYNTRNTDVSIRVKYVLDDFESPQAVYYFHPQYLVNVSRYWLSLGVRAKRISTGLILVTAALELCEEVHLFGFWAFPMNPSGLYITHHYYDNVKPRPGFHAMPSEIFNFLHLHSRGILRVHTGTCSCC

SEQ ID NO: 4215 - protein, 412 aa, Homo sapiens
MRYADPSANRDLLGSRTLLFIFICAFALVTLLQQILYGRNYIKRGLQFGWQSGDQLTNWTGLFNVTDDPAVQSGSDSSSRYFEFYEGPFEYNSTRCLELRHEILEVKVLSMVKQSELFDRWKSLQMCKWAMNISEANQFKSTLSRCCNAPAFLFTTQKNTPLGTKLKYEVDTSGIYHINQEIFRMFPKDMPYYRSQFKKCAVVGNGGILKNSRCGREINSADFVFRCNLPPISEKYTMDVGVKTDVVTVNPSIITERFHKLEKWRRPFYRVLQVYENASVLLPAFYNTRNTDVSIRVKYVLDDFESPQAVYYFHPQYLVNVSRYWLSLGVRAKRISTGLILVTAALELCEEVHLFGFWAFPMNPSGLYITHHYYDNVKPRPGFHAMPSEIFNFLHLHSRGILRVHTGTCSCC

SEQ ID NO: 4216 - protein, 398 aa, Homo sapiens
MRPGGALLALLASLLLLLLLRLLWCPADAPGRARILVEESREATHGTPAALRTLRSPATAVPRATNSTYLNEKSLQLTEKCKNLQYGIESFSNKTKGYSENDYLQIITDIQSCPWKRQAEEYANFRAKLASCCDAVQNFVVSQNNTPVGTNMSYEVESKKEIPIKKNIFHMFPVSQPFVDYPYNQCAVVGNGGILNKSLCGTEIDKSDFVFRCNLPPTTGDVSKDVGSKTNLVTINPSIITLKYGNLKEKKALFLEDIATYGDAFFLLPAFSFRANTGTSFKVYYTLEESKARQKVLFFHPKYLKDLALFWRTKGVTAYRLSTGLMITSVAVELCKNVKLYGFWPFSKTVEDIPVSHHYYDNKLPKHGFHQMPKEYSQILQLHMKGILKLQFSKCEVA

SEQ ID NO: 4217 - protein, 1943 aa, Homo sapiens
MEENESQKCEPCLPYSADRRQMQEQGKGNLHVTSPEDAECRRTKERLSNGNSRGSVSKSSRNIPRRHTLGGPRSSKEILGMQTSEMDRKREAFLEHLKQKYPHHASAIMGHQERLRDQTRSPKLSHSPQPPSLGDPVEHLSETSADSLEAMSEGDAPTPFSRGSRTRASLPVVRSTNQTKERSLGVLYLQYGDETKQLRMPNEITSADTIRALFVSAFPQQLTMKMLESPSVAIYIKDESRNVYYELNDVRNIQDRSLLKVYNKDPAHAFNHTPKTMNGDMRMQRELVYARGDGPGAPRPGSTAHPPHAIPNSPPSTPVPHSMPPSPSRIPYGGTRSMVVPGNATIPRDRISSLPVSRPISPSPSAILERRDVKPDEDMSGKNIAMYRNEGFYADPYLYHEGRMSIASSHGGHPLDVPDHIIAYHRTAIRSASAYCNPSMQAEMHMEQSLYRQKSRKYPDSHLPTLGSKTPPASPHRVSDLRMIDMHAHYNAHGPPHTMQPDRASPSRQAFKKEPGTLVYIEKPRSAAGLSSLVDLGPPLMEKQVFAYSTATIPKDRETRERMQAMEKQIASLTGLVQSALFKGPITSYSKDASSEKMMKTTANRNHTDSAGTPHVSGGKMLSALESTVPPSQPPPVGTSAIHMSLLEMRRSVAELRLQLQQMRQLQLQNQELLRAMMKKAELEISGKVMETMKRLEDPVQRQRVLVEQERQKYLHEEEKIVKKLCELEDFVEDLKKDSTAASRLVTLKDVEDGAFLLRQVGEAVATLKGEFPTLQNKMRAILRIEVEAVRFLKEEPHKLDSLLKRVRSMTDVLTMLRRHVTDGLLKGTDAAQAAQYMAMEKATAAEVLKSQEEAAHTSGQPFHSTGAPGDAKSEVVPLSGMMVRHAQSSPVVIQPSQHSVALLNPAQNLPHVASSPAVPQEATSTLQMSQAPQSPQIPMNGSAMQSLFIEEIHSVSAKNRAVSIEKAEKKWEEKRQNLDHYNGKEFEKLLEEAQANIMKSIPNLEMPPATGPLPRGDAPVDKVELSEDSPNSEQDLEKLGGKSPPPPPPPPRRSYLPGSGLTTTRSGDVVYTGRKENITAKASSEDAGPSPQTRATKYPAEEPASAWTPSPPPVTTSSSKDEEEEEEEGDKIMAELQAFQKCSFMDVNSNSHAEPSRADSHVKDTRSGATVPPKEKKNLEFFHEDVRKSDVEYENGPQMEFQKVTTGAVRPSDPPKWERGMENSISDASRTSEYKTEIIMKENSISNMSLLRDSRNYSQETVPKASFGFSGISPLEDEINKGSKISGLQYSIPDTENQTLNYGKTKEMEKQNTDKCHVSSHTRLTESSVHDFKTEDQEVITTDFGQVVLRPKEARHANVNPNEDGESSSSSPTEENAATDNIAFMITETTVQVLSSGEVHDIVSQKGEDIQTVNIDARKEMTPRQEGTDNEDPVVCLDKKPVIIIFDEPMDIRSAYKRLSTIFEECDEELERMMMEEKIEEEEEEENGDSVVQNNNTSQMSHKKVAPGNLRTGQQVETKSQPHSLATETRNPGGQEMNRTELNKFSHVDSPNSECKGEDATDDQFESPKKKFKFKFPKKQLAALTQAIRTGTKTGKKTLQVVVYEEEEEDGTLKQHKEAKRFEIARSQPEDTPENTVRRQEQPSIESTSPISRTDEIRKNTYRTLDSLEQTIKQLENTISEMSPKALVDTSCSSNRDSVASSSHIAQEASPRPLLVPDEGPTALEPPTSIPSASRKGSSGAPQTSRMPVPMSAKNRPGTLDKPGKQSKLQDPRQYRQANGSAKKSGGDFKPTSPSLPASKIPALSPSSGKSSSLPSSSGDSSNLPNPPATKPSIASNPLSPQTGPPAHSASLIPSVSNGSLKFQSLTHTGKGHHLSFSPQSQNGRAPPPLSFSSSPPSPASSVSLNQGAKGTRTIHTPSLTSYKAQNGSSSKATPSTAKETS

SEQ ID NO: 4218 - protein, 1344 aa, Homo sapiens
MEENESQKCEPCLPYSADRRQMQEQGKGNLHVTSPEDAECRRTKERLSNGNSRGSVSKSSRNIPRRHTLGGPRSSKEILGMQTSEMDRKREAFLEHLKQKYPHHASAIMGHQERLRDQTRSPKLSHSPQPPSLGDPVEHLSETSADSLEAMSEGDAPTPFSRGSRTRASLPVVRSTNQTKERSLGVLYLQYGDETKQLRMPNEITSADTIRALFVSAFPQQLTMKMLESPSVAIYIKDESRNVYYELNDVRNIQDRSLLKVYNKDPAHAFNHTPKTMNGDMRMQRELVYARGDGPGAPRPGSTAHPPHAIPNSPPSTPVPHSMPPSPSRIPYGGTRSMVVPGNATIPRDRISSLPVSRPISPSPSAILERRDVKPDEDMSGKNIAMYRNEGFYADPYLYHEGRMSIASSHGGHPLDVPDHIIAYHRTAIRSASAYCNPSMQAEMHMEQSLYRQKSRKYPDSHLPTLGSKTPPASPHRVSDLRMIDMHAHYNAHGPPHTMQPDRASPSRQAFKKEPGTLVYIEKPRSAAGLSSLVDLGPPLMEKQVFAYSTATIPKDRETRERMQAMEKQIASLTGLVQSALFKGPITSYSKDASSEKMMKTTANRNHTDSAGTPHVSGGKMLSALESTVPPSQPPPVGTSAIHMSLLEMRRSVAELRLQLQQMRQLQLQNQELLRAMMKKAELEISGKVMETMKRLEDPVQRQRVLVEQERQKYLHEEEKIVKKLCELEDFVEDLKKDSTAASRLVTLKDVEDGAFLLRQVGEAVATLKGEFPTLQNKMRAILRIEVEAVRFLKEEPHKLDSLLKRVRSMTDVLTMLRRHVTDGLLKGTDAAQAAQYMAMEKATAAEVLKSQEEAAHTSGQPFHSTGAPGDAKSEVVPLSGMMVRHAQSSPVVIQPSQHSVALLNPAQNLPHVASSPAVPQEATSTLQMSQAPQSPQIPMNGSAMQSLFIEEIHSVSAKNRAVSIEKAEKKWEEKRQNLDHYNGKEFEKLLEEAQANIMKSIPNLEMPPATGPLPRGDAPVDKVELSEDSPNSEQDLEKLGGKSPPPPPPPPRRSYLPGSGLTTTRSGDVVYTGRKENITAKASSEDAGPSPQTRATKYPAEEPASAWTPSPPPVTTSSSKDEEEEEEEGDKIMAELQGSSGAPQTSRMPVPMSAKNRPGTLDKPGKQSKLQDPRQYRQANGSAKKSGGDFKPTSPSLPASKIPALSPSSGKSSSLPSSSGDSSNLPNPPATKPSIASNPLSPQTGPPAHSASLIPSVSNGSLKFQSLTHTGKGHHLSFSPQSQNGRAPPPLSFSSSPPSPASSVSLNQGAKGTRTIHTPSLTSYKAQNGSSSKATPSTAKETS

SEQ ID NO: 4219 - protein, 1465 aa, Homo sapiens
MQRELVYARGDGPGAPRPGSTAHPPHAIPNSPPSTPVPHSMPPSPSRIPYGGTRSMVVPGNATIPRDRISSLPVSRPISPSPSAILERRDVKPDEDMSGKNIAMYRNEGFYADPYLYHEGRMSIASSHGGHPLDVPDHIIAYHRTAIRSASAYCNPSMQAEMHMEQSLYRQKSRKYPDSHLPTLGSKTPPASPHRVSDLRMIDMHAHYNAHGPPHTMQPDRASPSRQAFKKEPGTLVYIEKPRSAAGLSSLVDLGPPLMEKQVFAYSTATIPKDRETSEKMMKTTANRNHTDSAGTPHVSGGKMLSALESTVPPSQPPPVGTSAIHMSLLEMRRSVAELRLQLQQMRQLQLQNQELLRAMMKKAELEISGKVMETMKRLEDPVQRQRVLVEQERQKYLHEEEKIVKKLCELEDFVEDLKKDSTAASRLVTLKDVEDGAFLLRQVGEAVATLKGEFPTLQNKMRAILRIEVEAVRFLKEEPHKLDSLLKRVRSMTDVLTMLRRHVTDGLLKGTDAAQAAQYMAMEKATAAEVLKSQEEAAHTSGQPFHSTGAPGDAKSEVVPLSGMMVRHAQSSPVVIQPSQHSVALLNPAQNLPHVASSPAVPQEATSTLQMSQAPQSPQIPMNGSAMQSLFIEEIHSVSAKNRAVSIEKAEKKWEEKRQNLDHYNGKEFEKLLEEAQANIMKSIPNLEMPPATGPLPRGDAPVDKVELSEDSPNSEQDLEKLGGKSPPPPPPPPRRSYLPGSGLTTTRSGDVVYTGRKENITAKASSEDAGPSPQTRATKYPAEEPASAWTPSPPPVTTSSSKDEEEEEEEGDKIMAELQAFQKCSFMDVNSNSHAEPSRADSHVKDTRSGATVPPKEKKNLEFFHEDVRKSDVEYENGPQMEFQKVTTGAVRPSDPPKWERGMENSISDASRTSEYKTEIIMKENSISNMSLLRDSRNYSQETVPKASFGFSGISPLEDEINKGSKISGLQYSIPDTENQTLNYGKTKEMEKQNTDKCHVSSHTRLTESSVHDFKTEDQEVITTDFGQVVLRPKEARHANVNPNEDGESSSSSPTEENAATDNIAFMITETTVQVLSSGEVHDIVSQKGEDIQTVNIDARKEMTPRQEGTDNEDPVVCLDKKPVIIIFDEPMDIRSAYKRLSTIFEECDEELERMMMEEKIEEEEEEENGDSVVQNNNTSQMSHKKVAPGNLRTGQQVETKSQPHSLATETRNPGGQEMNRTELNKFSHVDSPNSECKGEDATDDQFESPKKKFKFKFPKKQLAALTQAIRTGTKTGKKTLQVVVYEEEEEDGTLKQHKEAKRFEIARSQPEDTPENTVRRQEQPSIESTSPISRTDEIRKNTYRTLDSLEQTIKQLENTISEMSPKALVDTSCSSNRDSVASSSHIAQEASPRPLLVPDEGPTALEPPTSIPSASRKGSSGAPQTSRMPVPMSAKNRPGTLDKPGKQSKLQDPRQYRQVVLP

SEQ ID NO: 4220 - protein, 866 aa, Homo sapiens
MQRELVYARGDGPGAPRPGSTAHPPHAIPNSPPSTPVPHSMPPSPSRIPYGGTRSMVVPGNATIPRDRISSLPVSRPISPSPSAILERRDVKPDEDMSGKNIAMYRNEGFYADPYLYHEGRMSIASSHGGHPLDVPDHIIAYHRTAIRSASAYCNPSMQAEMHMEQSLYRQKSRKYPDSHLPTLGSKTPPASPHRVSDLRMIDMHAHYNAHGPPHTMQPDRASPSRQAFKKEPGTLVYIEKPRSAAGLSSLVDLGPPLMEKQVFAYSTATIPKDRETSEKMMKTTANRNHTDSAGTPHVSGGKMLSALESTVPPSQPPPVGTSAIHMSLLEMRRSVAELRLQLQQMRQLQLQNQELLRAMMKKAELEISGKVMETMKRLEDPVQRQRVLVEQERQKYLHEEEKIVKKLCELEDFVEDLKKDSTAASRLVTLKDVEDGAFLLRQVGEAVATLKGEFPTLQNKMRAILRIEVEAVRFLKEEPHKLDSLLKRVRSMTDVLTMLRRHVTDGLLKGTDAAQAAQYMAMEKATAAEVLKSQEEAAHTSGQPFHSTGAPGDAKSEVVPLSGMMVRHAQSSPVVIQPSQHSVALLNPAQNLPHVASSPAVPQEATSTLQMSQAPQSPQIPMNGSAMQSLFIEEIHSVSAKNRAVSIEKAEKKWEEKRQNLDHYNGKEFEKLLEEAQANIMKSIPNLEMPPATGPLPRGDAPVDKVELSEDSPNSEQDLEKLGGKSPPPPPPPPRRSYLPGSGLTTTRSGDVVYTGRKENITAKASSEDAGPSPQTRATKYPAEEPASAWTPSPPPVTTSSSKDEEEEEEEGDKIMAELQGSSGAPQTSRMPVPMSAKNRPGTLDKPGKQSKLQDPRQYRQVVLP

SEQ ID NO: 4221 - protein, 1349 aa, Homo sapiens
MEENESQKCEPCLPYSADRRQMQEQGKGNLHVTSPEDAECRRTKERLSNGNSRGSVSKSSRNIPRRHTLGGPRSSKEILGMQTSEMDRKREAFLEHLKQKYPHHASAIMGHQERLRDQTRSPKLSHSPQPPSLGDPVEHLSETSADSLEAMSEGDAPTPFSRGSRTRASLPVVRSTNQTKERSLGVLYLQYGDETKQLRMPNEITSADTIRALFVSAFPQQLTMKMLESPSVAIYIKDESRNVYYELNDVRNIQDRSLLKVYNKDPAHAFNHTPKTMNGDMRMQRELVYARGDGPGAPRPGSTAHPPHAIPNSPPSTPVPHSMPPSPSRIPYGGTRSMVVPGNATIPRDRISSLPVSRPISPSPSAILERRDVKPDEDMSGKNIAMYRNEGFYADPYLYHEGRMSIASSHGGHPLDVPDHIIAYHRTAIRSASAYCNPSMQAEMHMEQSLYRQKSRKYPDSHLPTLGSKTPPASPHRVSDLRMIDMHAHYNAHGPPHTMQPDRASPSRQAFKKEPGTLVYIEKPRSAAGLSSLVDLGPPLMEKQVFAYSTATIPKDRETSEKMMKTTANRNHTDSAGTPHVSGGKMLSALESTVPPSQPPPVGTSAIHMSLLEMRRSVAELRLQLQQMRQLQLQNQELLRAMMKKAELEISGKVMETMKRLEDPVQRQRVLVEQERQKYLHEEEKIVKKLCELEDFVEDLKKDSTAASRLVTLKDVEDGAFLLRQVGEAVATLKGEFPTLQNKMRAILRIEVEAVRFLKEEPHKLDSLLKRVRSMTDVLTMLRRHVTDGLLKGTDAAQAAQYMAMEKATAAEVLKSQEEAAHTSGQPFHSTGAPGDAKSEVVPLSGMMVRHAQSSPVVIQPSQHSVALLNPAQNLPHVASSPAVPQEATSTLQMSQAPQSPQIPMNGSAMQSLFIEEIHSVSAKNRAVSIEKAEKKWEEKRQNLDHYNGKEFEKLLEEAQANIMKSIPNLEMPPATGPLPRGDAPVDKVELSEDSPNSEQDLEKLGGKSPPPPPPPPRRSYLPGSGLTTTRSGDVVYTGRKENITAKASSEDAGPSPQTRATKYPAEEPASAWTPSPPPVTTSSSKDEEEEEEEGDKIMAELQAFQKCSFMDVNSNSHAEPSRADSHVKDTRSGATVPPKEKKGSSGAPQTSRMPVPMSAKNRPGTLDKPGKQSKLQDPRQYRQANGSAKKSGGDFKPTSPSLPASKIPALSPSSGKSSSLPSSSGDSSNLPNPPATKPSIASNPLSPQTGPPAHSASLIPSVSNGSLKFQSLTHTGKGHHLSFSPQSQNGRAPPPLSFSSSPPSPASSVSLNQGAKGTRTIHTPSLTSYKAQNGSSSKATPSTAKETS

SEQ ID NO: 4222 - protein, 932 aa, Homo sapiens
MQRELVYARGDGPGAPRPGSTAHPPHAIPNSPPSTPVPHSMPPSPSRIPYGGTRSMVVPGNATIPRDRISSLPVSRPISPSPSAILERRDVKPDEDMSGKNIAMYRNEGFYADPYLYHEGRMSIASSHGGHPLDVPDHIIAYHRTAIRSASAYCNPSMQAEMHMEQSLYRQKSRKYPDSHLPTLGSKTPPASPHRVSDLRMIDMHAHYNAHGPPHTMQPDRASPSRQAFKKEPGTLVYIEKPRSAAGLSSLVDLGPPLMEKQVFAYSTATIPKDRETSEKMMKTTANRNHTDSAGTPHVSGGKMLSALESTVPPSQPPPVGTSAIHMSLLEMRRSVAELRLQLQQMRQLQLQNQELLRAMMKKAELEISGKVMETMKRLEDPVQRQRVLVEQERQKYLHEEEKIVKKLCELEDFVEDLKKDSTAASRLVTLKDVEDGAFLLRQVGEAVATLKGEFPTLQNKMRAILRIEVEAVRFLKEEPHKLDSLLKRVRSMTDVLTMLRRHVTDGLLKGTDAAQAAQYMAMEKATAAEVLKSQEEAAHTSGQPFHSTGAPGDAKSEVVPLSGMMVRHAQSSPVVIQPSQHSVALLNPAQNLPHVASSPAVPQEATSTLQMSQAPQSPQIPMNGSAMQSLFIEEIHSVSAKNRAVSIEKAEKKWEEKRQNLDHYNGKEFEKLLEEAQANIMKSIPNLEMPPATGPLPRGDAPVDKVELSEDSPNSEQDLEKLGGKSPPPPPPPPRRSYLPGSGLTTTRSGDVVYTGRKENITAKASSEDAGPSPQTRATKYPAEEPASAWTPSPPPVTTSSSKDEEEEEEEGDKIMAELQAFQKCSFMDVNSNSHAEPSRADSHVKDTRSGATVPPKEKKNLEFFHEDVRKSDVEYENGPQMEFQKGSSGAPQTSRMPVPMSAKNRPGTLDKPGKQSKLQDPRQYRQVVLP

SEQ ID NO: 4223 - protein, 906 aa, Homo sapiens
MQRELVYARGDGPGAPRPGSTAHPPHAIPNSPPSTPVPHSMPPSPSRIPYGGTRSMVVPGNATIPRDRISSLPVSRPISPSPSAILERRDVKPDEDMSGKNIAMYRNEGFYADPYLYHEGRMSIASSHGGHPLDVPDHIIAYHRTAIRSASAYCNPSMQAEMHMEQSLYRQKSRKYPDSHLPTLGSKTPPASPHRVSDLRMIDMHAHYNAHGPPHTMQPDRASPSRQAFKKEPGTLVYIEKPRSAAGLSSLVDLGPPLMEKQVFAYSTATIPKDRETSEKMMKTTANRNHTDSAGTPHVSGGKMLSALESTVPPSQPPPVGTSAIHMSLLEMRRSVAELRLQLQQMRQLQLQNQELLRAMMKKAELEISGKVMETMKRLEDPVQRQRVLVEQERQKYLHEEEKIVKKLCELEDFVEDLKKDSTAASRLVTLKDVEDGAFLLRQVGEAVATLKGEFPTLQNKMRAILRIEVEAVRFLKEEPHKLDSLLKRVRSMTDVLTMLRRHVTDGLLKGTDAAQAAQYMAMEKATAAEVLKSQEEAAHTSGQPFHSTGAPGDAKSEVVPLSGMMVRHAQSSPVVIQPSQHSVALLNPAQNLPHVASSPAVPQEATSTLQMSQAPQSPQIPMNGSAMQSLFIEEIHSVSAKNRAVSIEKAEKKWEEKRQNLDHYNGKEFEKLLEEAQANIMKSIPNLEMPPATGPLPRGDAPVDKVELSEDSPNSEQDLEKLGGKSPPPPPPPPRRSYLPGSGLTTTRSGDVVYTGRKENITAKASSEDAGPSPQTRATKYPAEEPASAWTPSPPPVTTSSSKDEEEEEEEGDKIMAELQAFQKCSFMDVNSNSHAEPSRADSHVKDTRSGATVPPKEKKGSSGAPQTSRMPVPMSAKNRPGTLDKPGKQSKLQDPRQYRQVVLP

SEQ ID NO: 4224 - protein, 1264 aa, Homo sapiens
MQTSEMDRKREAFLEHLKQKYPHHASAIMGHQERLRDQTRSPKLSHSPQPPSLGDPVEHLSETSADSLEAMSEGDAPTPFSRGSRTRASLPVVRSTNQTKERSLGVLYLQYGDETKQLRMPNEITSADTIRALFVSAFPQQLTMKMLESPSVAIYIKDESRNVYYELNDVRNIQDRSLLKVYNKDPAHAFNHTPKTMNGDMRMQRELVYARGDGPGAPRPGSTAHPPHAIPNSPPSTPVPHSMPPSPSRIPYGGTRSMVVPGNATIPRDRISSLPVSRPISPSPSAILERRDVKPDEDMSGKNIAMYRNEGFYADPYLYHEGRMSIASSHGGHPLDVPDHIIAYHRTAIRSASAYCNPSMQAEMHMEQSLYRQKSRKYPDSHLPTLGSKTPPASPHRVSDLRMIDMHAHYNAHGPPHTMQPDRASPSRQAFKKEPGTLVYIEKPRSAAGLSSLVDLGPPLMEKQVFAYSTATIPKDRETRERMQAMEKQIASLTGLVQSALFKGPITSYSKDASSEKMMKTTANRNHTDSAGTPHVSGGKMLSALESTVPPSQPPPVGTSAIHMSLLEMRRSVAELRLQLQQMRQLQLQNQELLRAMMKKAELEISGKVMETMKRLEDPVQRQRVLVEQERQKYLHEEEKIVKKLCELEDFVEDLKKDSTAASRLVTLKDVEDGAFLLRQVGEAVATLKGEFPTLQNKMRAILRIEVEAVRFLKEEPHKLDSLLKRVRSMTDVLTMLRRHVTDGLLKGTDAAQAAQYMAMEKATAAEVLKSQEEAAHTSGQPFHSTGAPGDAKSEVVPLSGMMVRHAQSSPVVIQPSQHSVALLNPAQNLPHVASSPAVPQEATSTLQMSQAPQSPQIPMNGSAMQSLFIEEIHSVSAKNRAVSIEKAEKKWEEKRQNLDHYNGKEFEKLLEEAQANIMKSIPNLEMPPATGPLPRGDAPVDKVELSEDSPNSEQDLEKLGGKSPPPPPPPPRRSYLPGSGLTTTRSGDVVYTGRKENITAKASSEDAGPSPQTRATKYPAEEPASAWTPSPPPVTTSSSKDEEEEEEEGDKIMAELQGSSGAPQTSRMPVPMSAKNRPGTLDKPGKQSKLQDPRQYRQANGSAKKSGGDFKPTSPSLPASKIPALSPSSGKSSSLPSSSGDSSNLPNPPATKPSIASNPLSPQTGPPAHSASLIPSVSNGSLKFQSLTHTGKGHHLSFSPQSQNGRAPPPLSFSSSPPSPASSVSLNQGAKGTRTIHTPSLTSYKAQNGSSSKATPSTAKETS

SEQ ID NO: 4225 - protein, 1374 aa, Homo sapiens
MEENESQKCEPCLPYSADRRQMQEQGKGNLHVTSPEDAECRRTKERLSNGNSRGSVSKSSRNIPRRHTLGGPRSSKEILGMQTSEMDRKREAFLEHLKQKYPHHASAIMGHQERLRDQTRSPKLSHSPQPPSLGDPVEHLSETSADSLEAMSEGDAPTPFSRGSRTRASLPVVRSTNQTKERSLGVLYLQYGDETKQLRMPNEITSADTIRALFVSAFPQQLTMKMLESPSVAIYIKDESRNVYYELNDVRNIQDRSLLKVYNKDPAHAFNHTPKTMNGDMRMQRELVYARGDGPGAPRPGSTAHPPHAIPNSPPSTPVPHSMPPSPSRIPYGGTRSMVVPGNATIPRDRISSLPVSRPISPSPSAILERRDVKPDEDMSGKNIAMYRNEGFYADPYLYHEGRMSIASSHGGHPLDVPDHIIAYHRTAIRSASAYCNPSMQAEMHMEQSLYRQKSRKYPDSHLPTLGSKTPPASPHRVSDLRMIDMHAHYNAHGPPHTMQPDRASPSRQAFKKEPGTLVYIEKPRSAAGLSSLVDLGPPLMEKQVFAYSTATIPKDRETSEKMMKTTANRNHTDSAGTPHVSGGKMLSALESTVPPSQPPPVGTSAIHMSLLEMRRSVAELRLQLQQMRQLQLQNQELLRAMMKKAELEISGKVMETMKRLEDPVQRQRVLVEQERQKYLHEEEKIVKKLCELEDFVEDLKKDSTAASRLVTLKDVEDGAFLLRQVGEAVATLKGEFPTLQNKMRAILRIEVEAVRFLKEEPHKLDSLLKRVRSMTDVLTMLRRHVTDGLLKGTDAAQAAQYMAMEKATAAEVLKSQEEAAHTSGQPFHSTGAPGDAKSEVVPLSGMMVRHAQSSPVVIQPSQHSVALLNPAQNLPHVASSPAVPQEATSTLQMSQAPQSPQIPMNGSAMQSLFIEEIHSVSAKNRAVSIEKAEKKWEEKRQNLDHYNGKEFEKLLEEAQANIMKSIPNLEMPPATGPLPRGDAPVDKVELSDSPNSEQDLEKLGGKSPPPPPPPPRRSYLPGSGLTTTRSGDVVYTGRKENITAKASSEDAGPSPQTRATKYPAEEPASAWTPSPPPVTTSSSKDEEEEEEEGDKIMAELQAFQKCSFMDVNSNSHAEPSRADSHVKDTRSGATVPPKEKKNLEFFHEDVRKSDVEYENGPQMEFQKGSSGAPQTSRMPVPMSAKNRPGTLDKPGKQSKLQDPRQYRQANGSAKKSGGDFKPTSPSLPASKIPALSPSSGKSSSLPSSSGDSSNLPNPPATKPSIASNPLSPQTGPPAHSASLIPSVSNGSLKFQSLTHTGKGHHLSFSPQSQNGRAPPPLSFSSSPPSPASSVSLNQGAKGTRTIHTPSLTSYKAQNGSSSKATPSTAKETS

SEQ ID NO: 4226 - protein, 1189 aa, Homo sapiens
MVPCWNHGNITRSKAEELLSRTGKDGSFLVRASESISRAYALCVLYRNCVYTYRILPNEDDKFTVQASEGVSMRFFTKLDQLIEFYKKENMGLVTHLQYPVPLEEEDTGDDPEEDTVESVVSPPELPPRNIPLTASSCEAKEVPFSNENPRATETSRPSLSETLFQRLQSMDTSGLPEEHLKAIQDYLSTQLAQDSEFVKTGSSSLPHLKKLTTLLCKELYGEVIRTLPSLESLQRLFDQQLSPGLRPRPQVPGEANPINMVSKLSQLTSLLSSIEDKVKALLHEGPESPHRPSLIPPVTFEVKAESLGIPQKMQLKVDVESGKLIIKKSKDGSEDKFYSHKKILQLIKSQKFLNKLVILVETEKEKILRKEYVFADSKKREGFCQLLQQMKNKHSEQPEPDMITIFIGTWNMGNAPPPKKITSWFLSKGQGKTRDDSADYIPHDIYVIGTQEDPLSEKEWLEILKHSLQEITSVTFKTVAIHTLWNIRIVVLAKPEHENRISHICTDNVKTGIANTLGNKGAVGVSFMFNGTSLGFVNSHLTSGSEKKLRRNQNYMNILRFLALGDKKLSPFNITHRFTHLFWFGDLNYRVDLPTWEAETIIQKIKQQQYADLLSHDQLLTERREQKVFLHFEEEEITFAPTYRFERLTRDKYAYTKQKATGMKYNLPSWCDRVLWKSYPLVHVVCQSYGSTSDIMTSDHSPVFATFEAGVTSQFVSKNGPGTVDSQGQIEFLRCYATLKTKSQTKFYLEFHSSCLESFVKSQEGENEEGSEGELVVKFGETLPKLKPIISDPEYLLDQHILISIKSSDSDESYGEGCIALRLEATETQLPIYTPLTHHGELTGHFQGEIKLQTSQGKTREKLYDFVKTERDESSGPKTLKSLTSHDPMKQWEVTSRAPPCSGSSITEIINPNYMGVGPFGPPMPLHVKQTLSPDQQPTAWSYDQPPKDSPLGPCRGESPPTPPGQPPISPKKFLPSTANRGLPPRTQESRPSDLGKNAGDTLPQEDLPLTKPEMFENPLYGSLSSFPKPAPRKDQESPKMPRKEPPPCPEPGILSPSIVLTKAQEADRGEGPGKQVPAPRLRSFTCSSSAEGRAAGGDKSQGKPKTPVSSQAPVPAKRPIKPSRSEINQQTPPTPTPRPPLPVKSPAVLHLQHSKGRDYRDNTELPHHGKHRPEEGPPGPLGRTAMQ

SEQ ID NO: 4227 - protein, 1188 aa, Homo sapiens
MVPCWNHGNITRSKAEELLSRTGKDGSFLVRASESISRAYALCVLYRNCVYTYRILPNEDDKFTVQASEGVSMRFFTKLDQLIEFYKKENMGLVTHLQYPVPLEEEDTGDDPEEDTESVVSPPELPPRNIPLTASSCEAKEVPFSNENPRATETSRPSLSETLFQRLQSMDTSGLPEEHLKAIQDYLSTQLAQDSEFVKTGSSSLPHLKKLTTLLCKELYGEVIRTLPSLESLQRLFDQQLSPGLRPRPQVPGEANPINMVSKLSQLTSLLSSIEDKVKALLHEGPESPHRPSLIPPVTFEVKAESLGIPQKMQLKVDVESGKLIIKKSKDGSEDKFYSHKKILQLIKSQKFLNKLVILVETEKEKILRKEYVFADSKKREGFCQLLQQMKNKHSEQPEPDMITIFIGTWNMGNAPPPKKITSWFLSKGQGKTRDDSADYIPHDIYVIGTQEDPLSEKEWLEILKHSLQEITSVTFKTVAIHTLWNIRIVVLAKPEHENRISHICTDNVKTGIANTLGNKGAVGVSFMFNGTSLGFVNSHLTSGSEKKLRRNQNYMNILRFLALGDKKLSPFNITHRFTHLFWFGDLNYRVDLPTWEAETIIQKIKQQQYADLLSHDQLLTERREQKVFLHFEEEEITFAPTYRFERLTRDKYAYTKQKATGMKYNLPSWCDRVLWKSYPLVHVVCQSYGSTSDIMTSDHSPVFATFEAGVTSQFVSKNGPGTVDSQGQIEFLRCYATLKTKSQTKFYLEFHSSCLESFVKSQEGENEEGSEGELVVKFGETLPKLKPIISDPEYLLDQHILISIKSSDSDESYGEGCIALRLEATETQLPIYTPLTHHGELTGHFQGEIKLQTSQGKTREKLYDFVKTERDESSGPKTLKSLTSHDPMKQWEVTSRAPPCSGSSITEIINPNYMGVGPFGPPMPLHVKQTLSPDQQPTAWSYDQPPKDSPLGPCRGESPPTPPGQPPISPKKFLPSTANRGLPPRTQESRPSDLGKNAGDTLPQEDLPLTKPEMFENPLYGSLSSFPKPAPRKDQESPKMPRKEPPPCPEPGILSPSIVLTKAQEADRGEGPGKQVPAPRLRSFTCSSSAEGRAAGGDKSQGKPKTPVSSQAPVPAKRPIKPSRSEINQQTPPTPTPRPPLPVKSPAVLHLQHSKGRDYRDNTELPHHGKHRPEEGPPGPLGRTAMQ

SEQ ID NO: 4228 - protein, 976 aa, Homo sapiens
MFTLSPAPREVIRTLPSLESLQRLFDQQLSPGLRPRPQVPGEANPINMVSKLSQLTSLLSSIEDKVKALLHEGPESPHRPSLIPPVTFEVKAESLGIPQKMQLKVDVESGKLIIKKSKDGSEDKFYSHKKILQLIKSQKFLNKLVILVETEKEKILRKEYVFADSKKREGFCQLLQQMKNKHSEQPEPDMITIFIGTWNMGNAPPPKKITSWFLSKGQGKTRDDSADYIPHDIYVIGTQEDPLSEKEWLEILKHSLQEITSVTFKTVAIHTLWNIRIVVLAKPEHENRISHICTDNVKTGIANTLGNKGAVGVSFMFNGTSLGFVNSHLTSGSEKKLRRNQNYMNILRFLALGDKKLSPFNITHRFTHLFWFGDLNYRVDLPTWEAETIIQKIKQQQYADLLSHDQLLTERREQKVFLHFEEEEITFAPTYRFERLTRDKYAYTKQKATGMKYNLPSWCDRVLWKSYPLVHVVCQSYGSTSDIMTSDHSPVFATFEAGVTSQFVSKNGPGTVDSQGQIEFLRCYATLKTKSQTKFYLEFHSSCLESFVKSQEGENEEGSEGELVVKFGETLPKLKPIISDPEYLLDQHILISIKSSDSDESYGEGCIALRLEATETQLPIYTPLTHHGELTGHFQGEIKLQTSQGKTREKLYDFVKTERDESSGPKTLKSLTSHDPMKQWEVTSRAPPCSGSSITEIINPNYMGVGPFGPPMPLHVKQTLSPDQQPTAWSYDQPPKDSPLGPCRGESPPTPPGQPPISPKKFLPSTANRGLPPRTQESRPSDLGKNAGDTLPQEDLPLTKPEMFENPLYGSLSSFPKPAPRKDQESPKMPRKEPPPCPEPGILSPSIVLTKAQEADRGEGPGKQVPAPRLRSFTCSSSAEGRAAGGDKSQGKPKTPVSSQAPVPAKRPIKPSRSEINQQTPPTPTPRPPLPVKSPAVLHLQHSKGRDYRDNTELPHHGKHRPEEGPPGPLGRTAMQ

SEQ ID NO: 4229 - protein, 1258 aa, Homo sapiens
MASACGAPGPGGALGSQAPSWYHRDLSRAAAEELLARAGRDGSFLVRDSESVAGAFALCVLYQKHVHTYRILPDGEDFLAVQTSQGVPVRRFQTLGELIGLYAQPNQGLVCALLLPVEGEREPDPPDDRDASDGEDEKPPLPPRSGSTSISAPTGPSSPLPAPETPTAPAAESAPNGLSTVSHDYLKGSYGLDLEAVRGGASHLPHLTRTLATSCRRLHSEVDKVLSGLEILSKVFDQQSSPMVTRLLQQQNLPQTGEQELESLVLKLSVLKDFLSGIQKKALKALQDMSSTAPPAPQPSTRKAKTIPVQAFEVKLDVTLGDLTKIGKSQKFTLSVDVEGGRLVLLRRQRDSQEDWTTFTHDRIRQLIKSQRVQNKLGVVFEKEKDRTQRKDFIFVSARKREAFCQLLQLMKNKHSKQDEPDMISVFIGTWNMGSVPPPKNVTSWFTSKGLGKTLDEVTVTIPHDIYVFGTQENSVGDREWLDLLRGGLKELTDLDYRPIAMQSLWNIKVAVLVKPEHENRISHVSTSSVKTGIANTLGNKGAVGVSFMFNGTSFGFVNCHLTSGNEKTARRNQNYLDILRLLSLGDRQLNAFDISLRFTHLFWFGDLNYRLDMDIQEILNYISRKEFEPLLRVDQLNLEREKHKVFLRFSEEEISFPPTYRYERGSRDTYAWHKQKPTGVRTNVPSWCDRILWKSYPETHIICNSYGCTDDIVTSDHSPVFGTFEVGVTSQFISKKGLSKTSDQAYIEFESIEAIVKTASRTKFFIEFYSTCLEEYKKSFENDAQSSDNINFLKVQWSSRQLPTLKPILADIEYLQDQHLLLTVKSMDGYESYGECVVALKSMIGSTAQQFLTFLSHRGEETGNIRGSMKVRVPTERLGTRERLYEWISIDKDEAGAKSKAPSVSRGSQEPRSGSRKPAFTEASCPLSRLFEEPEKPPPTGRPPAPPRAAPREEPLTPRLKPEGAPEPEGVAAPPPKNSFNNPAYYVLEGVPHQLLPPEPPSPARAPVPSATKNKVAITVPAPQLGHHRHPRVGEGSSSDEESGGTLPPPDFPPPPLPDSAIFLPPSLDPLPGPVVRGRGGAEARGPPPPKAHPRPPLPPGPSPASTFLGEVASGDDRSCSVLQMAKTLSEVDYAPAGPARSALLPGPLELQPPRGLPSDYGRPLSFPPPRIRESIQEDLAEEAPCLQGGRASGLGEAGMSAWLRAIGLERYEEGLVHNGWDDLEFLSDITEEDLEEAGVQDPAHKRLLLDTLQLSK

SEQ ID NO: 4230 - protein, 1016 aa, Homo sapiens
MVTRLLQQQNLPQTGEQELESLVLKLSVLKDFLSGIQKKALKALQDMSSTAPPAPQPSTRKAKTIPVQAFEVKLDVTLGDLTKIGKSQKFTLSVDVEGGRLVLLRRQRDSQEDWTTFTHDRIRQLIKSQRVQNKLGVVFEKEKDRTQRKDFIFVSARKREAFCQLLQLMKNKHSKQDEPDMISVFIGTWNMGSVPPPKNVTSWFTSKGLGKTLDEVTVTIPHDIYVFGTQENSVGDREWLDLLRGGLKELTDLDYRPIAMQSLWNIKVAVLVKPEHENRISHVSTSSVKTGIANTLGNKGAVGVSFMFNGTSFGFVNCHLTSGNEKTARRNQNYLDILRLLSLGDRQLNAFDISLRFTHLFWFGDLNYRLDMDIQEILNYISRKEFEPLLRVDQLNLEREKHKVFLRFSEEEISFPPTYRYERGSRDTYAWHKQKPTGVRTNVPSWCDRILWKSYPETHIICNSYGCTDDIVTSDHSPVFGTFEVGVTSQFISKKGLSKTSDQAYIEFESIEAIVKTASRTKFFIEFYSTCLEEYKKSFENDAQSSDNINFLKVQWSSRQLPTLKPILADIEYLQDQHLLLTVKSMDGYESYGECVVALKSMIGSTAQQFLTFLSHRGEETGNIRGSMKVRVPTERLGTRERLYEWISIDKDEAGAKSKAPSVSRGSQEPRSGSRKPAFTEASCPLSRLFEEPEKPPPTGRPPAPPRAAPREEPLTPRLKPEGAPEPEGVAAPPPKNSFNNPAYYVLEGVPHQLLPPEPPSPARAPVPSATKNKVAITVPAPQLGHHRHPRVGEGSSSDEESGGTLPPPDFPPPPLPDSAIFLPPSLDPLPGPVVRGRGGAEARGPPPPKAHPRPPLPPGPSPASTFLGEVASGDDRSCSVLQMAKTLSEVDYAPAGPARSALLPGPLELQPPRGLPSDYGRPLSFPPPRIRESIQEDLAEEAPCLQGGRASGLGEAGMSAWLRAIGLERYEEGLVHNGWDDLEFLSDITEEDLEEAGVQDPAHKRLLLDTLQLSK

SEQ ID NO: 4231 - protein, 110 aa, Homo sapiens
MARGNQRELARQKNMKKTQEISKGKRKEDSLTASQRKQSSGGQKSESKMSAGPHLPLKAPRENPCFPLPAAGGSRYYLAYGSITPISAFVFVVFFSVFFPSFYEDFCCWI

SEQ ID NO: 4232 - protein, 62 aa, Homo sapiens
MARGNQRELARQKNMKKTQEISKGKRKEDSLTASQRKQRDSEIMQEKQKAANEKKSMQTREK

SEQ ID NO: 4233 - protein, 59 aa, Homo sapiens
MTRGNQRELARQKNMKKQSDSVKGKRRDDGLSAAARKQRDSEIMQQKQKKANEKKEEPK

SEQ ID NO: 4234 - protein, 170 aa, Homo sapiens
MTRGNQRELARQKNMKKQSDSVKGKRRDDGLSAAARKQRVGVQQPNAELSPIHFHLILCALHPPASCPFCPLVPPSAPSSLPPGTRRSCSRSRKRQTRRRRNPSSFVASCPTLLPFACVPGASPTTLAFPPVVLTGPSTDGIPFALSLQRVPFVLPSPQVASLPLGHSRG

SEQ ID NO: 4235 - protein, 133 aa, Homo sapiens
MTRGNQRELARQKNMKKQSDSVKGKRRDDGLSAAARKQSAPSSLPPGTRRSCSRSRKRQTRRRRNPSSFVASCPTLLPFACVPGASPTTLAFPPVVLTGPSTDGIPFALSLQRVPFVLPSPQVASLPLGHSRG

SEQ ID NO: 4236 - protein, 45 aa, Homo sapiens
MKKQSDSVKGKRRDDGLSAAARKQRDSEIMQQKQKKANEKKEEPK

SEQ ID NO: 4237 - protein, 707 aa, Homo sapiens
MAAAATAAEGVPSRGPPGEVIHLNVGGKRFSTSRQTLTWIPDSFFSSLLSGRISTLKDETGAIFIDRDPTVFAPILNFLRTKELDPRGVHGSSLLHEAQFYGLTPLVRRLQLREELDRSSCGNVLFNGYLPPPVFPVKRRNRHSLVGPQQLGGRPAPVRRSNTMPPNLGNAGLLGRMLDEKTPPSPSGQPEEPGMVRLVCGHHNWIAVAYTQFLVCYRLKEASGWQLVFSSPRLDWPIERLALTARVHGGALGEHDKMVAAATGSEILLWALQAEGGGSEIGVFHLGVPVEALFFVGNQLIATSHTGRIGVWNAVTKHWQVQEVQPITSYDAAGSFLLLGCNNGSIYYVDVQKFPLRMKDNDLLVSELYRDPAEDGVTALSVYLTPKTSDSGNWIEIAYGTSSGGVRVIVQHPETVGSGPQLFQTFTVHRSPVTKIMLSEKHLISVCADNNHVRTWSVTRFRGMISTQPGSTPLASFKILALESADGHGGCSAGNDIGPYGERDDQQVFIQKVVPSASQLFVRLSSTGQRVCSVRSVDGSPTTAFTVLECEGSRRLGSRPRRYLLTGQANGSLAMWDLTTAMDGLGQAPAGGLTEQELMEQLEHCELAPPAPSAPSWGCLPSPSPRISLTSLHSASSNTSLSGHRGSPSPPQAEARRRGGGSFVERCQELVRSGPDLRRPPTPAPWPSSGLGTPLTPPKMKLNETSF

SEQ ID NO: 4238 - protein, 305 aa, Homo sapiens
MAAAATAAEGVPSRGPPGEVIHLNVGGKRFSTSRQTLTWIPDSFFSSLLSGRISTLKDETGAIFIDRDPTVFAPILNFLRTKELDPRGVHGSSLLHEAQFYGLTPLVRRLQLREELDRSSCGNVLFNGYLPPPVFPVKRRNRHSLVGPQQLGGRPAPVRRSNTMPPNLGNAGLLGRMLDEKTPPSPSGQPEEPGMVRLVCGHHNWIAVAYTQFLVCYRLKEASGWQLVFSSPRLDWPIERLALTARVHGGALGEHDKMVAAATGSEILLWALQAEGGGSEIGAHRGVECRHQALAGPGGAAHHQL

SEQ ID NO: 4239 - protein, 629 aa, Homo sapiens
MGCKVLLNIGQQMLRRKVVDCSREETRLSRCLNTFDLVALGVGSTLGAGVYVLAGAVARENAGPAIVISFLIAALASVLAGLCYGEFGARVPKTGSAYLYSYVTVGELWAFITGWNLILSYIIGTSSVARAWSATFDELIGRPIGEFSRTHMTLNAPGVLAENPDIFAVIIILILTGLLTLGVKESAMVNKIFTCINVLVLGFIMVSGFVKGSVKNWQLTEEDFGNTSGRLCLNNDTKEGKPGVGGFMPFGFSGVLSGAATCFYAFVGFDCIATTGEEVKNPQKAIPVGIVASLLICFIAYFGVSAALTLMMPYFCLDNNSPLPDAFKHVGWEGAKYAVAVGSLCALSASLLGSMFPMPRVIYAMAEDGLLFKFLANVNDRTKTPIIATLASGAVAAVMAFLFDLKDLVDLMSIGTLLAYSLVAACVLVLRYQPEQPNLVYQMASTSDELDPADQNELASTNDSQLGFLPEAEMFSLKTILSPKNMEPSKISGLIVNISTSLIAVLIITFCIVTVLGREALTKGALWAVFLLAGSALLCAVVTGVIWRQPESKTKLSFKVPFLPVLPILSIFVNVYLMMQLDQGTWVRFAVWMLIGFIIYFGYGLWHSEEASLDADQARTPDGNLDQCK

SEQ ID NO: 4240 - protein, 203 aa, Homo sapiens
MAENAAPGLISELKLAVPWGHIAAKAWGSLQGPPVLCLHGWLDNASSFDRLIPLLPQDFYYVAMDFGGHGLSSHYSPGVPYYLQTFVSEIRRVVAALKWNRFSILGHSFGGVVGGMFFCTFPEMVDKLILLDTPLFLLESDEMENLLTYKRRAIEHVLQVEASQEPSHVFSLKQLLQRQRTALTSSAGSCVRIPSGSCRPMSC

SEQ ID NO: 4241 - protein, 190 aa, Homo sapiens
MSGACTSYVSAEQEVVRGFSCPRPGGEAAAVFCCGFRDHKYCCDDPHSFFPYEHSYMWWLSIGALIGLSVAAVVLLAFIVTACVLCYLFISSKPHTKLDLGLSLQTAGPEEVSPDCQGVNTGMAAEVPKVSPLQQSYSCLNPQLESNEGQAVNSKRLLHHCFMATVTTSDIPGSPEEASVPNPDLCGPVP

SEQ ID NO: 4242 - protein, 153 aa, Homo sapiens
MSGACTSYVSAEQEVVRGFSCPRPGGEAAAVFCCGFRDHKYCCDDPHSFFPYEHSYMWWLSIGALIGLSVAAVVLLAFIVTACVLCYLFISSKPHTKLDLGLSLQTAGPVQVATNKRNQTVLTLKGLTWRTRQAHKWPGGPVVALHGALGRKK

SEQ ID NO: 4243 - protein, 160 aa, Homo sapiens
MSEASRLCSGYYSLNQSFVEPFQCPRRGEGAALQYCCGFADLKYCCSEPGSYFPYKHSYMWSLSIGALIGLGIAALVLLAFVISVCVLCYLFLYTKPQRLDTGLKLQHLEASSTQEGKSNGKTKALNSNAASNATNETYYEADDIIQEKTMDATQIHIAY

SEQ ID NO: 4244 - protein, 815 aa, Homo sapiens
MVLRSGICGLSPHRIFPSLLVVVALVGLLPVLRSHGLQLSPTASTIRSSEPPRERSIGDVTTAPPEVTPESRPVNHSVTDHGMKPRKAFPVLGIDYTHVRTPFEISLWILLACLMKIGFHVIPTISSIVPESCLLIVVGLLVGGLIKGVGETPPFLQSDVFFLFLLPPIILDAGYFLPLRQFTENLGTILIFAVVGTLWNAFFLGGLMYAVCLVGGEQINNIGLLDNLLFGSIISAVDPVAVLAVFEEIHINELLHILVFGESLLNDAVTVVLYHLFEEFANYEHVGIVDIFLGFLSFFVVALGGVLVGVVYGVIAAFTSRFTSHIRVIEPLFVFLYSYMAYLSAELFHLSGIMALIASGVVMRPYVEANISHKSHTTIKYFLKMWSSVSETLIFIFLGVSTVAGSHHWNWTFVISTLLFCLIARVLGVLGLTWFINKFRIVKLTPKDQFIIAYGGLRGAIAFSLGYLLDKKHFPMCDLFLTAIITVIFFTVFVQGMTIRPLVDLLAVKKKQETKRSINEEIHTQFLDHLLTGIEDICGHYGHHHWKDKLNRFNKKYVKKCLIAGERSKEPQLIAFYHKMEMKQAIELVESGGMGKIPSAVSTVSMQNIHPKSLPSERILPALSKDKEEEIRKILRNNLQKTRQRLRSYNRHTLVADPYEEAWNQMLLRRQKARQLEQKINNYLTVPAHKLDSPTMSRARIGSDPLAYEPKEDLPVITIDPASPQSPESVDLVNEELKGKVLGLSRDPAKVAEEDEDDDGGIMMRSKETSSPGTDDVFTPAPSDSPSSQRIQRCLSDPGPHPEPGEGEPFFPKGQ

SEQ ID NO: 4245 - protein, 555 aa, Homo sapiens
MVLRSGICGLSPHRIFPSLLVVVALVGLLPVLRSHGLQLSPTASTIRSSEPPRERSIGDVTTAPPEVTPESRPVNHSVTDHGMKPRKAFPVLGIDYTHVRTPFEISLWILLACLMKIGFHVIPTISSIVPESCLLIVVGLLVGGLIKGVGETPPFLQSDVFFLFLLPPIILDAGYFLPLRQFTENLGTILIFAVVGTLWNAFFLGGLMYAVCLVGGEQINNIGLLDNLLFGSIISAVDPVAVLAVFEEIHINELLHILVFGESLLNDAVTVVLYHLFEEFANYEHVGIVDIFLGFLSFFVVALGGVLVGVVYGVIAAFTSRFTSHIRVIEPLFVFLYSYMAYLSAELFHLSGIMALIASGVVMRPYVEANISHKSHTTIKYFLKMWSSVSETLIFIFLGVSTVAGSHHWNWTFVISTLLFCLIARVLGVLGLTWFINKFRIVKLTPKDQFIIAYGGLRGAIAFSLGYLLDKKHFPMCDLFLTAIITVIFFTVFVQVLGQGRAGPCLGDPHRLFPWKERKACDLKCDSSPSSTTNLLCDLGRATPPFWASVSSIVK

SEQ ID NO: 4246 - protein, 395 aa, Homo sapiens
MDFNMKKLASDAGIFFTRAVQFTEEKFGQAEKTELDAHFENLLARADSTKNWTEKILRQTEVLLQPNPSARVEEFLYEKLDRKVPSRVTNGELLAQYMADAASELGPTTPYGKTLIKVAEAEKQLGAAERDFIHTASISFLTPLRNFLEGDWKTISKERRLLQNRRLDLDACKARLKKAKAAEAKATTVPDFQETRPRNYILSASASALWNDEVDKAEQELRVAQTEFDRQAEVTRLLLEGISSTHVNHLRCLHEFVKSQTTYYAQCYRHMLDLQKQLGRFPGTFVGTTEPASPPLSSTSPTTAAATMPVVPSVASLAPPGEASLCLEEVAPPASGTRKARVLYDYEAADSSELALLADELITVYSLPGMDPDWLIGERGNKKGKVPVTYLELLS

SEQ ID NO: 4247 - protein, 404 aa, Homo sapiens
MDFNMKKLASDAGIFFTRAVQFTEEKFGQAEKTELDAHFENLLARADSTKNWTEKILRQTEVLLQPNPSARVEEFLYEKLDRKVPSRVTNGELLAQYMADAASELGPTTPYGKTLIKVAEAEKQLGAAERDFIHTASISFLTPLRNFLEGDWKTISKERRLLQNRRLDLDACKARLKKAKAAEAKATCEGDTVPDFQETRPRNYILSASASALWNDEVDKAEQELRVAQTEFDRQAEVTRLLLEGISSTHVNHLRCLHEFVKSQTTYYAQCYRHMLDLQKQLGSSQGAIFPGTFVGTTEPASPPLSSTSPTTAAATMPVVPSVASLAPPGEASLCLEEVAPPASGTRKARVLYDYEAADSSELALLADELITVYSLPGMDPDWLIGERGNKKGKVPVTYLELLS

SEQ ID NO: 4248 - protein, 151 aa, Homo sapiens [sequence omitted]

SEQ ID NO: 4249 - protein, 115 aa, Homo sapiens
MTKKRRNNSHAKKGRGHVQPIRCTNCVRCVPTDKAIKKFVIRNIVEAAAVRDISEVSVFDAYVLPKLYVKLHYCVSCAIHSKVVRNRSREACKDRTPPPRFRPAGAAPRPPPKPM

SEQ ID NO: 4250 - protein, 263 aa, Homo sapiens [sequence omitted]

SEQ ID NO: 4251 - protein, 902 aa, Homo sapiens
MLSPQRALLCNLNHIHLQHVSLGLHLSRRPELQEGPLSTPPPPGDTGGKESRGPCSGTLVDANSNSPAVPCRCCQEHGPGLENRQDPSQEEEGAASPSDPGCSSSLSSCSDLSPDESPVSVYLRDLPGDEDAHPQPSIIPLEQGSPLASAGPGTCSPDSFCCSPDSCSGASSSPDPGLDSNCNALTTCQDVPSPGLEEEDERAEQDLPTSELLEADDGKIDAGKTEPSWKINPIWKIDTEKTKAEWKTTENNNTGWKNNGNVNSSWKSEPEKFDSGWKTNTRITDSGSKTDAGKIDGGWRSDVSEEPVPHRTITSFHELAQKRKRGPGLPLVPQAKKDRSDWLIVFSPDTELPPSGSPGGSSAPPREVTTFKELRSRSRAPAPPVPPRDPPVGWALVPPRPPPPPVPPRRKKNRPGLQPIAEGQSEEGRAVSPAAGEEAPAAKEPGAQAGLEVRSSWSFAGVPGAQRLWMAEAQSGTGQLQEQKKGLLIAVSVSVDKIISHFGAARNLVQKAQLGDSRLSPDVGHLVLTTLCPALHALVADGLKPFRKDLITGQRRSSPWSVVEASVKPGSSTRSLGTLYSQVSRLAPLSSSRSRFHAFILGLLNTKQLELWFSSLQEDAGLLSLLYLPTGFFSLARGGCPSLSTELLLLLQPLSVLTFHLDLLFEHHHHLPLGPPQAPAPPGPPPALQQTMQAMLHFGGRLAQSLRGTSKEAASDPSDSPNLPTPGSWWEQLTQASRVYASGGTEGFPLSRWAPGRHGTAAEEGAQERPLPTDEMAPGRGLWLGRLFGVPGGPAENENGALKSRRPSSWLPPTVSVLALVKRGAPPEMPSPQELEASAPRMVQTHRAVRALCDHTAARPDQLSFRRGEVLRVITTVDEDWLRCGRDGMEGLVPVGYTSLVL

SEQ ID NO: 4252 - protein, 433 aa, Homo sapiens
MAEAQSGTGQLQEQKKGLLIAVSVSVDKIISHFGAARNLVQKAQLGDSRLSPDVGHLVLTTLCPALHALVADGLKPFRKDLITGQRRSSPWSVVEASVKPGSSTRSLGTLYSQVSRLAPLSSSRSRFHAFILGLLNTKQLELWFSSLQEDAGLLSLLYLPTGFFSLARGGCPSLSTELLLLLQPLSVLTFHLDLLFEHHHHLPLGPPQAPAPPGPPPALQQTMQAMLHFGGRLAQSLRGTSKEAASDPSDSPNLPTPGSWWEQLTQASRVYASGGTEGFPLSRWAPGRHGTAAEEGAQERPLPTDEMAPGRGLWLGRLFGVPGGPAENENGALKSRRPSSWLPPTVSVLALVKRGAPPEMPSPQELEASAPRMVQTHRAVRALCDHTAARPDQLSFRRGEVLRVITTVDEDWLRCGRDGMEGLVPVGYTSLVL

SEQ ID NO: 4253 - protein, 492 aa, Homo sapiens
MPPTCSPGLRRQDWAPGRCAGLHLPPRAPSSPALQALAGQAGVRSSWSFAGVPGAQRLWMAEAQSGTGQLQEQKKGLLIAVSVSVDKIISHFGAARNLVQKAQLGDSRLSPDVGHLVLTTLCPALHALVADGLKPFRKDLITGQRRSSPWSVVEASVKPGSSTRSLGTLYSQVSRLAPLSSSRSRFHAFILGLLNTKQLELWFSSLQEDAGLLSLLYLPTGFFSLARGGCPSLSTELLLLLQPLSVLTFHLDLLFEHHHHLPLGPPQAPAPPGPPPALQQTMQAMLHFGGRLAQSLRGTSKEAASDPSDSPNLPTPGSWWEQLTQASRVYASGGTEGFPLSRWAPGRHGTAAEEGAQERPLPTDEMAPGRGLWLGRLFGVPGGPAENENGALKSRRPSSWLPPTVSVLALVKRGAPPEMPSPQELEASAPRMVQTHRAVRALCDHTAARPDQLSFRRGEVLRVITTVDEDWLRCGRDGMEGLVPVGYTSLVL

SEQ ID NO: 4254 - protein, 796 aa, Homo sapiens
MLSPQRALLCNLNHIHLQHVSLGLHLSRRPELQEGPLSTPPPPGDTGGKESRGPCSGTLVDANSNSPAVPCRCCQEHGPGLENRQDPSQEEEGAASPSDPGCSSSLSSCSDLSPDESPVSVYLRDLPGDEDAHPQPSIIPLEQGSPLASAGPGTCSPDSFCCSPDSCSGASSSPDPGLDSNCNALTTCQDVPSPGLEEEDERAEQDLPTSELLEADDGKIDAGKTEPSWKINPIWKIDTEKTKAEWKTTENNNTGWKNNGNVNSSWKSEPEKFDSGWKTNTRITDSGSKTDAGKIDGGWRSDVSEEPVPHRTITSFHELAQKRKRGPGLPLVPQAKKDRSDWLIVFSPDTELPPSGSPGGSSAPPREVTTFKELRSRSRAPAPPVPPRDPPVGWALVPPRPPPPPVPPRRKKNRPGLQPIAEGQSEEGRAVSPAAGEEAPAAKEPGAQAGLEVRSSWSFAGVPGAQRLWMAEAQSGTGQLQEQKKGLLIAVSVSVDKIISHFGAARNLVQKAQLGDSRLSPDVGHLVLTTLCPALHALVADGLKPFRKDLITGQRRSSPWSVVEASVKPGSSTRSLGTLYSQVSRLAPLSSSRSRFHAFILGLLNTKQLELWFSSLQEDAGSWWEQLTQASRVYASGGTEGFPLSRWAPGRHGTAAEEGAQERPLPTDEMAPGRGLWLGRLFGVPGGPAENENGALKSRRPSSWLPPTVSVLALVKRGAPPEMPSPQELEASAPRMVQTHRAVRALCDHTAARPDQLSFRRGEVLRVITTVDEDWLRCGRDGMEGLVPVGYTSLVL

SEQ ID NO: 4255 - protein, 292 aa, Homo sapiens
MSASVKESLQLQLLEMEMLFSMFPNQGEVKLEDVNALTNIKRYLEGTREALPPKIEFVITLQIEEPKVKIDLQVTMPHSYPYVALQLFGRSSELDRHQQLLLNKGLTSYIGTFDPGELCVCAAIQWLQDNSASYFLNRKLVYEPSTQAKPVKNTFLRMWIYSHHIYQQDLRKKILDVGKRLDVTGFCMTGKPGIICVEGFKEHCEEFWHTIRYPNWKHISCKHAESVETEGNGEDLRLFHSFEELLLEAHGDYGLRNDYHMNLGQFLEFLKKHKSEHVFQILFGIESKSSDS

SEQ ID NO: 4256 - protein, 238 aa, Homo sapiens
MLWYLNLFDFHFKVKIDLQVTMPHSYPYVALQLFGRSSELDRHQQLLLNKGLTSYIGTFDPGELCVCAAIQWLQDNSASYFLNRKLVYEPSTQAKPVKNTFLRMWIYSHHIYQQDLRKKILDVGKRLDVTGFCMTGKPGIICVEGFKEHCEEFWHTIRYPNWKHISCKHAESVETEGNGEDLRLFHSFEELLLEAHGDYGLRNDYHMNLGQFLEFLKKHKSEHVFQILFGIESKSSDS

SEQ ID NO: 4257 - protein, 242 aa, Homo sapiens
MRPLSMSGHFLLAPIPESSSDYLLPKDIKLAVLGAGRVGKSAMIVRFLTKRFIGDYEPNTGKLYSRLVYVEGDQLSLQIQDTPGGVQIQDSLPQVVDSLSKCVQWAEGFLLVYSITDYDSYLSIRPLYQHIRKVHPDSKAPVIIVGNKGDLLHARQVQTQDGIQLANELGSLFLEISTSENYEDVCDVFQHLCKEVSKMHGLSGERRRASIIPRPRSPNMQDLKRRFKQALSPKVKAPSALG

SEQ ID NO: 4258 - protein, 203 aa, Homo sapiens
MGGSLRVAVLGAPGVGKTAIIRQFLFGDYPERHRPTDGPRLYRPAVLLDGAVYDLSIRDGDVAGPGSSPGGPEEWPDAKDWSLQDTDAFVLVYDICSPDSFDYVKALRQRIAETRPAGAPEAPILVVGNKRDRQRLRFGPRRALAALVRRGWRCGYLECSAKYNWHVLRLFRELLRCALVRARPAHPALRLQGALHPARCSLM

SEQ ID NO: 4259 - protein, 115 aa, Homo sapiens
MGGSLRVAVLGAPGVGKTAIIRQFLFGDYPERHRPTDGPRLYRPAVLLDGAVYDLSIRDGDVAGPGSSPGGPEEWPDAKDWSLQDTDAFVLVYDICSPDSFDYVKALRQRIAETR

SEQ ID NO: 4260 - protein, 1219 aa, Homo sapiens
MPKIVLNGVTVDFPFQPYKCQQEYMTKVLECLQQKVNGILESPTGTGKTLCLLCTTLAWREHLRDGISARKIAERAQGELFPDRALSSWGNAAAAAGDPIACYTDIPKIIYASRTHSQLTQVINELRNTSYRPKVCVLGSREQLCIHPEVKKQESNHLQIHLCRKKVASRSCHFYNNVEEKSLEQELASPILDIEDLVKSGSKHRVCPYYLSRNLKQQADIIFMPYNYLLDAKSRRAHNIDLKGTVVIFDEAHNVEKMCEESASFDLTPHDLASGLDVIDQVLEEQTKAAQQGEPHPEFSADSPSPGLNMELEDIAKLKMILLRLEGAIDAVELPGDDSGVTKPGSYIFELFAEAQITFQTKGCILDSLDQIIQHLAGRAGVFTNTAGLQKLADIIQIVFSVDPSEGSPGSPAGLGALQSYKVHIHPDAGHRRTAQRSDAWSTTAARKRGKVLSYWCFSPGHSMHELVRQGVRSLILTSGTLAPVSSFALEMQIPFPVCLENPHIIDKHQIWVGVVPRGPDGAQLSSAFDRRFSEECLSSLGKALGNIARVVPYGLLIFFPSYPVMEKSLEFWRARDLARKMEALKPLFVEPRSKGSFSETISAYYARVAAPGSTGATFLAVCRGKASEGLDFSDTNGRGVIVTGLPYPPRMDPRVVLKMQFLDEMKGQGGAGGQFLSGQEWYRQQASRAVNQAIGRVIRHRQDYGAVFLCDHRFAFADARAQLPSWVRPHVRVYDNFGHVIRDVAQFFRVAERTMPAPAPRATAPSVRGEDAVSEAKSPGPFFSTRKAKSLDLHVPSLKQRSSGSPAAGDPESSLCVEYEQEPVPARQRPRGLLAALEHSEQRAGSPGEEQAHSCSTLSLLSEKRPAEEPRGGRKKIRLVSHPEEPVAGAQTDRAKLFMVAVKQELSQANFATFTQALQDYKGSDDFAALAACLGPLFAEDPKKHNLLQGFYQFVRPHHKQQFEEVCIQLTGRGCGYRPEHSIPRRQRAQPVLDPTGRTAPDPKLTVSTAAAQQLDPQEHLNQGRPHLSPRPPPTGDPGSQPQWGSGVPRAGKQGQHAVSAYLADARRALGSAGCSQLLAALTAYKQDDDLDKVLAVLAALTTAKPEDFPLLHRFSMFVRPHHKQRFSQTCTDLTGRPYPGMEPPGPQEERLAVPPVLTHRAPQPGPSRSEKTGKTQSKISSFLRQRPAGTVGAGGEDAGPSQSSGPPHGPAASEWGL

SEQ ID NO: 4261 - protein, 1400 aa, Homo sapiens
MPKIVLNGVTVDFPFQPYKCQQEYMTKVLECLQQKVNGILESPTGTGKTLCLLCTTLAWREHLRDGISARKIAERAQGELFPDRALSSWGNAAAAAGDPIACYTDIPKIIYASRTHSQLTQVINELRNTSYRPKVCVLGSREQLCIHPEVKKQESNHLQIHLCRKKVASRSCHFYNNVEEKSLEQELASPILDIEDLVKSGSKHRVCPYYLSRNLKQQADIIFMPYNYLLDAKSRRAHNIDLKGTVVIFDEAHNVEKMCEESASFDLTPHDLASGLDVIDQVLEEQTKAAQQGEPHPEFSADSPSPGLNMELEDIAKLKMILLRLEGAIDAVELPGDDSGVTKPGSYIFELFAEAQITFQTKGCILDSLDQIIQHLAGRAGVFTNTAGLQKLADIIQIVFSVDPSEGSPGSPAGLGALQSYKVHIHPDAGHRRTAQRSDAWSTTAARKRGKVLSYWCFSPGHSMHELVRQGVRSLILTSGTLAPVSSFALEMQIPFPVCLENPHIIDKHQIWVGVVPRGPDGAQLSSAFDRRFSEECLSSLGKALGNIARVVPYGLLIFFPSYPVMEKSLEFWRARDLARKMEALKPLFVEPRSKGSFSETISAYYARVAAPGSTGATFLAVCRGKASEGLDFSDTNGRGVIVTGLPYPPRMDPRVVLKMQFLDEMKGQGGAGGQFLSGQEWYRQQASRAVNQAIGRVIRHRQDYGAVFLCDHRFAFADARAQLPSWVRPHVRVYDNFGHVIRDVAQFFRVAERTMPAPAPRATAPSVRGEDAVSEAKSPGPFFSTRKAKSLDLHVPSLKQRSSGSPAAGDPESSLCVEYEQEPVPARQRPRGLLAALEHSEQRAGSPGEEQAHSCSTLSLLSEKRPAEEPRGGRKKIRLVSHPEEPVAGAQTDRAKLFMVAVKQELSQANFATFTQALQDYKGSDDFAALAACLGPLFAEDPKKHNLLQGFYQFVRPHHKQQFEEVCIQLTGRGCGYRPEHSIPRRQRAQPVLDPTGRTAPDPKLTVSTAAAQQLDPQEHLNQGRPHLSPRPPPTGDPGSQPQWGSGVPRAGKQGQHAVSAYLADARRALGSAGCSQLLAALTAYKQDDDLDKVLAVLAALTTAKPEDFPLLHRFSMFVRPHHKQRFSQTCTDLTGRPYPGMEPPGPQEERLAVPPVLTHRAPQPGPSRSEKTGKTQSKISSFLRQRPAGTVGAGGEDAGPSQSSGPPHGPAASEWGEPHGRDIAGQQATGAPGGPLSAGCVCQGCGAEDVVPFQCPACDFQRCQACWQRHLQASRMCPACHTASRKQSVMQVFWPEPHKDHEGAGGARPVAAVPGVGAACPAAGAGCTRSGRNTHLPLAGRRDRGAAGVCPVPPRHLCAAAVPPRQPHDVWPVSTAPLHAVLELPGALPLLQRPLRGA

SEQ ID NO: 4262 - protein, 1023 aa, Homo sapiens
MPKIVLNGVTVDFPFQPYKCQQEYMTKVLECLQQKVNGILESPTGTGKTLCLLCTTLAWREHLRDGISARKIAERAQGELFPDRALSSWGNAAAAAGDPIACYTDIPKIIYASRTHSQLTQVINELRNTSYRPKVCVLGSREQLCIHPEVKKQESNHLQIHLCRKKVASRSCHFYNNVEEKSLEQELASPILDIEDLVKSGSKHRVCPYYLSRNLKQQADIIFMPYNYLLDAKSRRAHNIDLKGTVVIFDEAHNVEKMCEESASFDLTPHDLASGLDVIDQVLEEQTKAAQQGEPHPEFSADSPSPGLNMELEDIAKLKMILLRLEGAIDAVELPGDDSGVTKPGSYIFELFAEAQITFQTKGCILDSLDQIIQHLAGRAGVFTNTAGLQKLADIIQIVFSVDPSEGSPGSPAGLGALQSYKVHIHPDAGHRRTAQRSDAWSTTAARKRGKVLSYWCFSPGHSMHELVRQGVRSLILTSGTLAPVSSFALEMQIPFPVCLENPHIIDKHQIWVGVVPRGPDGAQLSSAFDRRFSEECLSSLGKALGNIARVVPYGLLIFFPSYPVMEKSLEFWRARDLARKMEALKPLFVEPRSKGSFSETISAYYARVAAPGSTGATFLAVCRGKASEGLDFSDTNGRGVIVTGLPYPPRMDPRVVLKMQFLDEMKGQGGAGGQFLSGQEWYRQQASRAVNQAIGRVIRHRQDYGAVFLCDHRFAFADARAQLPSWVRPHVRVYDNFGHVIRDVAQFFRVAERTMPAPAPRATAPSVRGEDAVSEAKSPGPFFSTRKAKSLDLHVPSLKQRSSGSPAAGDPESSLCVEYEQEPVPARQRPRGLLAALEHSEQRAGSPGEEQAHSCSTLSLLSEKRPAEEPRGGRKKIRLVSHPEEPVAGAQTDRAKLFMVAVKQELSQANFATFTQALQDYKGSDDFAALAACLGPLFAEDPKKHNLLQGFYQFVRPHHKQQFEEVCIQLTGRGCGYRPEHSIPRRQRAQPVLDPTGNFPDALDQLCGSTSLHQEERRRIPS

SEQ ID NO: 4263 - protein, 545 aa, Homo sapiens
MPAPAPRATAPSVRGEDAVSEAKSPGPFFSTRKAKSLDLHVPSLKQRSSGSPAAGDPESSLCVEYEQEPVPARQRPRGLLAALEHSEQRAGSPGEEQAHSCSTLSLLSEKRPAEEPRGGRKKIRLVSHPEEPVAGAQTDRAKLFMVAVKQELSQANFATFTQALQDYKGSDDFAALAACLGPLFAEDPKKHNLLQGFYQFVRPHHKQQFEEVCIQLTGRGCGYRPEHSIPRRQRAQPVLDPTGRTAPDPKLTVSTAAAQQLDPQEHLNQGRPHLSPRPPPTGDPGSQPQWGSGVPRAGKQGQHAVSAYLADARRALGSAGCSQLLAALTAYKQDDDLDKVLAVLAALTTAKPEDFPLLHRFSMFVRPHHKQRFSQTCTDLTGRPYPGMEPPGPQEERLAVPPVLTHRAPQPGPSRSEKTGKTQSKISSFLRQRPAGTVGAGGEDAGPSQSSGPPHGPAASEWGEPHGRDIAGQQATGAPGGPLSAGCVCQGCGAEDVVPFQCPACDFQRCQACWQRHLQASRMCPACHTASRKQSVMQVFWPEPQ

SEQ ID NO: 4264 - protein, 1300 aa, Homo sapiens
MPKIVLNGVTVDFPFQPYKCQQEYMTKVLECLQQKVNGILESPTGTGKTLCLLCTTLAWREHLRDGISARKIAERAQGELFPDRALSSWGNAAAAAGDPIACYTDIPKIIYASRTHSQLTQVINELRNTSYRPKVCVLGSREQLCIHPEVKKQESNHLQIHLCRKKVASRSCHFYNNVEEKSLEQELASPILDIEDLVKSGSKHRVCPYYLSRNLKQQADIIFMPYNYLLDAKSRRAHNIDLKGTVVIFDEAHNVEKMCEESASFDLTPHDLASGLDVIDQVLEEQTKAAQQGEPHPEFSADSPSPGLNMELEDIAKLKMILLRLEGAIDAVELPGDDSGVTKPGSYIFELFAEAQITFQTKGCILDSLDQIIQHLAGRAGVFTNTAGLQKLADIIQIVFSVDPSEGSPGSPAGLGALQSYKVHIHPDAGHRRTAQRSDAWSTTAARKRGKVLSYWCFSPGHSMHELVRQGVRSLILTSGTLAPVSSFALEMQIPFPVCLENPHIIDKHQIWVGVVPRGPDGAQLSSAFDRRFSEECLSSLGKALGNIARVVPYGLLIFFPSYPVMEKSLEFWRARDLARKMEALKPLFVEPRSKGSFSETISAYYARVAAPGSTGATFLAVCRGKASEGLDFSDTNGRGVIVTGLPYPPRMDPRVVLKMQFLDEMKGQGGAGGQFLSGQEWYRQQASRAVNQAIGRVIRHRQDYGAVFLCDHRFAFADARAQLPSWVRPHVRVYDNFGHVIRDVAQFFRVAERTMPAPAPRATAPSVRGEDAVSEAKSPGPFFSTRKAKSLDLHVPSLKQRSSGSPAAGDPESSLCVEYEQEPVPARQRPRGLLAALEHSEQRAGSPGEEQAHSCSTLSLLSEKRPAEEPRGGRKKIRLVSHPEEPVAGAQTDRAKLFMVAVKQELSQANFATFTQALQDYKGSDDFAALAACLGPLFAEDPKKHNLLQGFYQFVRPHHKQQFEEVCIQLTGRGCGYRPEHSIPRRQRAQPVLDPTGRTAPDPKLTVSTAAAQQLDPQEHLNQGRPHLSPRPPPTGDPGSQPQWGSGVPRAGKQGQHAVSAYLADARRALGSAGCSQLLAALTAYKQDDDLDKVLAVLAALTTAKPEDFPLLHRFSMFVRPHHKQRFSQTCTDLTGRPYPGMEPPGPQEERLAVPPVLTHRAPQPGPSRSEKTGKTQSKISSFLRQRPAGTVGAGGEDAGPSQSSGPPHGPAASEWGEPHGRDIAGQQATGAPGGPLSAGCVCQGCGAEDVVPFQCPACDFQRCQACWQRHLQASRMCPACHTASRKQSVMQVFWPEPQ

SEQ ID NO: 4265 - protein, 1243 aa, Homo sapiens
MPKIVLNGVTVDFPFQPYKCQQEYMTKVLECLQQKVNGILESPTGTGKTLCLLCTTLAWREHLRDGISARKIAERAQGELFPDRALSSWGNAAAAAGDPIACYTDIPKIIYASRTHSQLTQVINELRNTSYRSRCRATLWVLETAPPRPTVLSPTRPKVCVLGSREQLCIHPEVKKQESNHLQIHLCRKKVASRSCHFYNNVEEKSLEQELASPILDIEDLVKSGSKHRVCPYYLSRNLKQQADIIFMPYNYLLDAKSRRAHNIDLKGTVVIFDEAHNVEKMCEESASFDLTPHDLASGLDVIDQVLEEQTKAAQQGEPHPEFSADSPSPGLNMELEDIAKLKMILLRLEGAIDAVELPGDDSGVTKPGSYIFELFAEAQITFQTKGCILDSLDQIIQHLAGRAGVFTNTAGLQKLADIIQIVFSVDPSEGSPGSPAGLGALQSYKVHIHPDAGHRRTAQRSDAWSTTAARKRGKVLSYWCFSPGHSMHELVRQGVRSLILTSGTLAPVSSFALEMQIPFPVCLENPHIIDKHQIWVGVVPRGPDGAQLSSAFDRRFSEECLSSLGKALGNIARVVPYGLLIFFPSYPVMEKSLEFWRARDLARKMEALKPLFVEPRSKGSFSETISAYYARVAAPGSTGATFLAVCRGKASEGLDFSDTNGRGVIVTGLPYPPRMDPRVVLKMQFLDEMKGQGGAGGQFLSGQEWYRQQASRAVNQAIGRVIRHRQDYGAVFLCDHRFAFADARAQLPSWVRPHVRVYDNFGHVIRDVAQFFRVAERTMPAPAPRATAPSVRGEDAVSEAKSPGPFFSTRKAKSLDLHVPSLKQRSSGSPAAGDPESSLCVEYEQEPVPARQRPRGLLAALEHSEQRAGSPGEEQAHSCSTLSLLSEKRPAEEPRGGRKKIRLVSHPEEPVAGAQTDRAKLFMVAVKQELSQANFATFTQALQDYKGSDDFAALAACLGPLFAEDPKKHNLLQGFYQFVRPHHKQQFEEVCIQLTGRGCGYRPEHSIPRRQRAQPVLDPTGRTAPDPKLTVSTAAAQQLDPQEHLNQGRPHLSPRPPPTGDPGSQPQWGSGVPRAGKQGQHAVSAYLADARRALGSAGCSQLLAALTAYKQDDDLDKVLAVLAALTTAKPEDFPLLHRFSMFVRPHHKQRFSQTCTDLTGRPYPGMEPPGPQEERLAVPPVLTHRAPQPGPSRSEKTGKTQSKISSFLRQRPAGTVGAGGEDAGPSQSSGPPHGPAASEWGL

SEQ ID NO: 4266 - protein, 1004 aa, Homo sapiens
MPKIVLNGVTVDFPFQPYKCQQEYMTKVLECLQQKVNGILESPTGTGKTLCLLCTTLAWREHLRDGISARKIAERAQGELFPDRALSSWGNAAAAAGDPIACYTDIPKIIYASRTHSQLTQVINELRNTSYRPKVCVLGSREQLCIHPEVKKQESNHLQIHLCRKKVASRSCHFYNNVEEKSLEQELASPILDIEDLVKSGSKHRVCPYYLSRNLKQQADIIFMPYNYLLDAKSRRAHNIDLKGTVVIFDEAHNVEKMCEESASFDLTPHDLASGLDVIDQVLEEQTKAAQQGEPHPEFSADSPSPGLNMELEDIAKLKMILLRLEGAIDAVELPGDDSGVTKPGSYIFELFAEAQITFQTKGCILDSLDQIIQHLAGRAGVFTNTAGLQKLADIIQIVFSVDPSEGSPGSPAGLGALQSYKVHIHPDAGHRRTAQRSDAWSTTAARKRGKVLSYWCFSPGHSMHELVRQGVRSLILTSGTLAPVSSFALEMQIPFPVCLENPHIIDKHQIWVGVVPRGPDGAQLSSAFDRRFSEECLSSLGKALGNIARVVPYGLLIFFPSYPVMEKSLEFWRARDLARKMEALKPLFVEPRSKGSFSETISAYYARVAAPGSTGATFLAVCRGKASEGLDFSDTNGRGVIVTGLPYPPRMDPRVVLKMQFLDEMKGQGGAGGQFLSGQEWYRQQASRAVNQAIGRVIRHRQDYGAVFLCDHRFAFADARAQLPSWVRPHVRVYDNFGHVIRDVAQFFRVAERTMPAPAPRATAPSVRGEDAVSEAKSPGPFFSTRKAKSLDLHVPSLKQRSSGSPAAGDPESSLCVEYEQEPVPARQRPRGLLAALEHSEQRAGSPGEEQAHSCSTLSLLSEKRPAEEPRGGRKKIRLVSHPEEPVAGAQTDRAKLFMVAVKQELSQANFATFTQALQDYKGSDDFAALAACLGPLFAEDPKKHNLLQGFYQFVRPHHKQQFEEVCIQLTGRGCGYRPEHSIPRRQRAQPVLDPTERRRIPS

SEQ ID NO: 4267 - protein, 996 aa, Homo sapiens
MPYNYLLDAKSRRAHNIDLKGTVVIFDEAHNVEKMCEESASFDLTPHDLASGLDVIDQVLEEQTKAAQQGEPHPEFSADSPSPGLNMELEDIAKLKMILLRLEGAIDAVELPGDDSGVTKPGSYIFELFAEAQITFQTKGCILDSLDQIIQHLAGRAGVFTNTAGLQKLADIIQIVFSVDPSEGSPGSPAGLGALQSYKVHIHPDAGHRRTAQRSDAWSTTAARKRGKVLSYWCFSPGHSMHELVRQGVRSLILTSGTLAPVSSFALEMQIPFPVCLENPHIIDKHQIWVGVVPRGPDGAQLSSAFDRRFSEECLSSLGKALGNIARVVPYGLLIFFPSYPVMEKSLEFWRARDLARKMEALKPLFVEPRSKGSFSETISAYYARVAAPGSTGATFLAVCRGKASEGLDFSDTNGRGVIVTGLPYPPRMDPRVVLKMQFLDEMKGQGGAGGQFLSGQEWYRQQASRAVNQAIGRVIRHRQDYGAVFLCDHRFAFADARAQLPSWVRPHVRVYDNFGHVIRDVAQFFRVAERTMPAPAPRATAPSVRGEDAVSEAKSPGPFFSTRKAKSLDLHVPSLKQRSSGSPAAGDPESSLCVEYEQEPVPARQRPRGLLAALEHSEQRAGSPGEEQAHSCSTLSLLSEKRPAEEPRGGRKKIRLVSHPEEPVAGAQTDRAKLFMVAVKQELSQANFATFTQALQDYKGSDDFAALAACLGPLFAEDPKKHNLLQGFYQFVRPHHKQQFEEVCIQLTGRGCGYRPEHSIPRRQRAQPVLDPTGRTAPDPKLTVSTAAAQQLDPQEHLNQGRPHLSPRPPPTGDPGSQPQWGSGVPRAGKQGQHAVSAYLADARRALGSAGCSQLLAALTAYKQDDDLDKVLAVLAALTTAKPEDFPLLHRFSMFVRPHHKQRFSQTCTDLTGRPYPGMEPPGPQEERLAVPPVLTHRAPQPGPSRSEKTGKTQSKISSFLRQRPAGTVGAGGEDAGPSQSSGPPHGPAASEWGL

SEQ ID NO: 4268 - protein, 310 aa, Homo sapiens
MEKCTKSSSTMQVEPSFLQAENLILRLQMQHPTTENTAKRGQVMPALATTVMPVPYSLEHLTQFHGDPANCSEFLTQVTTYLTALQISNPANDAQIKLFFDYLSQQLESCGIISGPDKSTLLKQYENLILEFQQSFGKPTKQEINPLMNAKFDKGDNSSQQDPATFHLLAQNLICNETNQSGQFEKALADPNQDEESVTDMMDNLPDLITQCIQLDKKHSDRPELLQSETQLPLLASLIQHQALFSPTDPPPKKGPIQLREGQLPLTPAKRARQQETQLCLYCSQSGHFTRDCLAKRSRAPATTNNTAHQ

SEQ ID NO: 4269 - protein, 626 aa, Homo sapiens
MGLLQGLLRVRKLLLVVCVPLLLLPLPVLHPSSEASCAYVLIVTAVYWVSEAVPLGAAALVPAFLYPFFGVLRSNEVAAEYFKNTTLLLVGVICVAAAVEKWNLHKRIALRMVLMAGAKPGMLLLCFMCCTTLLSMWLSNTSTTAMVMPIVEAVLQELVSAEDEQLVAGNSNTEEAEPISLDVKNSQPSLELIFVNEESNADLTTLMHNENLNGVPSITNPIKTANQHQGKKQHPSQEKPQVLTPSPRKQKLNRKYRSHHDQMICKCLSLSISYSATIGGLTTIIGTSTSLIFLEHFNNQYPAAEVVNFGTWFLFSFPISLIMLVVSWFWMHWLFLGCNFKETCSLSKKKKTKREQLSEKRIQEEYEKLGDISYPEMVTGFFFILMTVLWFTREPGFVPGWDSFFEKKGYRTDATVSVFLGFLLFLIPAKKPCFGKKNDGENQEHSLGTEPIITWKDFQKTMPWEIVILVGGGYALASGSKSSGLSTWIGNQMLSLSSLPPWAVTLLACILVSIVTEFVSNPATITIFLPILCSLSETLHINPLYTLIPVTMCISFAVMLPVGNPPNAIVFSYGHCQIKDMVKAGLGVNVIGLVIVMVAINTWGVSLFHLDTYPAWARVSNITDQA

SEQ ID NO: 4270 - protein, 125 aa, Homo sapiens
MPRYELALILKAMQRPETAATLKRTIEALMDRGAIVRDLENLGERALPYRISAHSQQHNRGGYFLVDFYAPTAAVESMVEHLSRDIDVIRGNIVKHPLTQELKECEGIVPVPLAEKLYSTKKRKK

SEQ ID NO: 4271 - protein, 568 aa, Homo sapiens [sequence omitted]

SEQ ID NO: 4272 - protein, 522 aa, Homo sapiens
MASALSYVSKFKSFVILFVTPLLLLPLVILMPAKFVRCAYVIILMAIYWCTEVIPLAVTSLMPVLLFPLFQILDSRQVCVQYMKDTNMLFLGGLIVAVAVERWNLHKRIALRTLLWVGAKPARLMLGFMGVTALLSMWISNTATTAMMVPIVEAILQQMEATSAATEAGLELVDKGKAKELPGSQVIFEGPTLGQQEDQERKRLCKAMTLCICYAASIGGTATLTGTGPNVVLLGQMNELFPDSKDLVNFASWFAFAFPNMLVMLLFAWLWLQFVYMRFNFKKSWGCGLESKKNEKAALKVLQEEYRKLGPLSFAEINVLICFFLLVILWFSRDPGFMPGWLTVAWVEGETKYVSDATVAIFVATLLFIVPSQKPKFNFRSQTEEERKTPFYPPPLLDWKVTQEKVPWGIVLLLGGGFALAKGSEASGLSVWMGKQMEPLHAVPPAAITLILSLLVAVFTECTSNVATTTLFLPIFASMVKTGVIMNIIGVFCVFLAVNTWGRAIFDLDHFPDWANVTHIET

SEQ ID NO: 4273 - protein, 551 aa, Homo sapiens
MASALSYVSKFKSFVILFVTPLLLLPLVILMPAKFVRCAYVIILMAIYWCTEVIPLAVTSLMPVLLFPLFQILDSRQVCVQYMKDTNMLFLGGLIVAVAVERWNLHKRIALRTLLWVGAKPARNTATTAMMVPIVEAILQQMEATSAATEAGLELVDKGKAKELPGSQVIFEGPTLGQQEDQERKRLCKAMTLCICYAASIGGTATLTGTGPNVVLLGQMNELFPDSKDLVNFASWFAFAFPNMLVMLLFAWLWLQFVYMRFNFKKSWGCGLESKKNEKAALKVLQEEYRKLGPLSFAEINVLICFFLLVILWFSRDPGFMPGWLTVAWVEGETKYVSDATVAIFVATLLFIVPSQKPKFNFRSQTEEERKTPFYPPPLLDWKVTQEKVPWGIVLLLGGGFALAKGSEASGLSVWMGKQMEPLHAVPPAAITLILSLLVAVFTECTSNVATTTLFLPIFASMSRSIGLNPLYIMLPCTLSASFAFMLPVATPPNAIVFTYGHLKVADMVKTGVIMNIIGVFCVFLAVNTWGRAIFDLDHFPDWANVTHIET

SEQ ID NO: 4274 - protein, 525 aa, Homo sapiens
MASALSYVSKFKSFVILFVTPLLLLPLVILMPAKVCVQYMKDTNMLFLGGLIVAVAVERWNLHKRIALRTLLWVGAKPARLMLGFMGVTALLSMWISNTATTAMMVPIVEAILQQMEATSAATEAGLELVDKGKAKELPGSQVIFEGPTLGQQEDQERKRLCKAMTLCICYAASIGGTATLTGTGPNVVLLGQMNELFPDSKDLVNFASWFAFAFPNMLVMLLFAWLWLQFVYMRFNFKKSWGCGLESKKNEKAALKVLQEEYRKLGPLSFAEINVLICFFLLVILWFSRDPGFMPGWLTVAWVEGETKYVSDATVAIFVATLLFIVPSQKPKFNFRSQTEEERKTPFYPPPLLDWKVTQEKVPWGIVLLLGGGFALAKGSEASGLSVWMGKQMEPLHAVPPAAITLILSLLVAVFTECTSNVATTTLFLPIFASMSRSIGLNPLYIMLPCTLSASFAFMLPVATPPNAIVFTYGHLKVADMVKTGVIMNIIGVFCVFLAVNTWGRAIFDLDHFPDWANVTHIET

SEQ ID NO: 4275 - protein, 263 aa, Homo sapiens
MRIFRPWRLRCPALHLPSLSVFSLRWKLPSLTTDETMCKSVTTDEWKKVFYEKMEEAKPADSWDLIIDPNLKHNVLSPGWKQYLELHASGRFHCSWCWHTWQSPYVVILFHMFLDRAQRAGSVRMRVFKQLCYECGTARLDESSMLEENIEGLVDNLITSLREQCYGERGGQYRIHVASRQDNRRHRGEFCEACQEGIVHWKPSEKLLEEEATTYTFSRAPSPTKSQDQTGSGWNFCSIPWCLFWATVLLLIIYLQFSFRSSV

SEQ ID NO: 4276 - protein, 232 aa, Homo sapiens
MAGDTEVWKQMFQELMREVKPWHRWTLRPDKGLLPNVLKPGWMQYQQWTFARFQCSSCSRNWASAQVLVLFHMNWSEEKSRGQVKMRVFTQRCKKCPQPLFEDPEFTQENISRILKNLVFRILKKCYRGRFQLIEEVPMIKDISLEGPHNSDNCEACLQGFCAGPIQVTSLPPSQTPRVHSIYKVEEVVKPWASGENVYSYACQNHICRNLSIFCCCVILIVIVVIVVKTAI

SEQ ID NO: 4277 - protein, 572 aa, Homo sapiens
MDRAGADMWASTFTLAMAERKPQDVWVLLPEHSLVPGCLDGGGVQYLLVGLSRLQCGHCPGTWDSAHVHVLFHLWWDRASHRGLVKMRIWGQRCRLCPAPGDCQVRPPGEQPFLSRLVLHILQDCYGDGPGPARHPREAYEGCCEACELGVCFLQKAPDPAWSANATKGNFPATAWGGTGTVSRGKPLSTPGDDLGKGGVVIAIPFSLVGTSNDQVPIAEGPAPPAGASLPVTGSCEALVIGQGSIFLSGDSVAMPGGKGFPVAIGDPLFHGPGLLGSSIQTFELKGFLFKGRGSLCSPVGVAQGWGPISLNNGLVPVGKHTPTVFYCVGLSASGEGSLTFPSSLTSIFTNTLSEPTDGPVATKEASITFPFIFTDVKDAVAEVAEGNGKEGGGQGLVPVGHDALPETNAGGLPSQVKGSLALPFPADVQGKDAFTDITEGKEKEGGLVTAGHDAPLEANAEGPITVSEGCITIPFAVFDVIKRKGGGHVAYGPQGNGCFSQGYYQKRQLRSRFHKARCGCRREEDERPGRACRRPHAEPYEDFWIWVSMTVCVFWLMCMCRLNPGIYPQQV

SEQ ID NO: 4278 - protein, 1441 aa, Homo sapiens
MATAAAAAAVMAPPGCPGSCPNFAVVCSFLERYGPLLDLPELPFPELERVLQAPPPDVGNGEVPKELVELHLKLMRKIGKSVTADRWEKYLIKICQEFNSTWAWEMEKKGYLEMSVECKLALLKYLCECQFDDNLKFKNIINEEDADTMRLQPIGRDKDGLMYWYQLDQDHNVRMYIEEQDDQDGSSWKCIVRNRNELAETLALLKAQIDPVLLKNSSQQDNSSRESPSLEDEETKKEEETPKQEEQKESEKMKSEEQPMDLENRSTANVLEETTVKKEKEDEKELVKLPVIVKLEKPLPENEEKKIIKEESDSFKENVKPIKVEVKECRADPKDTKSSMEKPVAQEPERIEFGGNIKSSHEITEKSTEETEKLKNDQQAKIPLKKREIKLSDDFDSPVKGPLCKSVTPTKEFLKDEIKQEEETCKRISTITALGHEGKQLVNGEVSDERVAPNFKTEPIETKFYETKEESYSPSKDRNIITEGNGTESLNSVITSMKTGELEKETAPLRKDADSSISVLEIHSQKAQIEEPDPPEMETSLDSSEMAKDLSSKTALSSTESCTMKGEEKSPKTKKDKRPPILECLEKLEKSKKTFLDKDAQRLSPIPEEVPKSTLESEKPGSPEAAETSPPSNIIDHCEKLASEKEVVECQSTSTVGGQSVKKVDLETLKEDSEFTKVEMDNLDNAQTSGIEEPSETKGSMQKSKFKYKLVPEEETTASENTEITSERQKEGIKLTIRISSRKKKPDSPPKVLEPENKQEKTEKEEEKTNVGRTLRRSPRISRPTAKVAEIRDQKADKKRGEGEDEVEEESTALQKTDKKEILKKSEKDTNSKVSKVKPKGKVRWTGSRTRGRWKYSSNDESEGSGSEKSSAASEEEEEKESEEAILADDDEPCKKCGLPNHPELILLCDSCDSGYHTACLRPPLMIIPDGEWFCPPCQHKLLCEKLEEQLQDLDVALKKKERAERRKERLVYVGISIENIIPPQEPDFSEDQEEKKKDSKKSKANLLERRSTRTRKCISYRFDEFDEAIDEAIEDDIKEADGGGVGRGKDISTITGHRGKDISTILDEERKENKRPQRAAAARRKKRRRLNDLDSDSNLDEEESEDEFKISDGSQDEFVVSDENPDESEEDPPSNDDSDTDFCSRRLRRHPSRPMRQSRRLRRKTPKKKYSDDDEEEESEENSRDSESDFSDDFSDDFVETRRRRSRRNQKRQINYKEDSESDGSQKSLRRGKEIRRVHKRRLSSSESEESYLSKNSEDDELAKESKRSVRKRGRSTDEYSEADEEEEEEEGKPSRKRLHRIETDEEESCDNAHGDANQPARDSQPRVLPSEQESTKKPYRIESDEEEDFENVGKVGSPLDYSLVDLPSTNGQSPGKAIENLIGKPTEKSQTPKDNSTASASLASNGTSGGQEAGAPEEEEDELLRVTDLVDYVCNSEQL

SEQ ID NO: 4279 - protein, 1410 aa, Homo sapiens
MATAAAAAAVMAPPGCPGSCPNFAVVCSFLERYGPLLDLPELPFPELERVLQAPPPDVGNGEVPKELVELHLKLMRKIGKSVTADRWEKYLIKYLCECQFDDNLKFKNIINEEDADTMRLQPIGRDKDGLMYWYQLDQDHNVRMYIEEQDDQDGSSWKCIVRNRNELAETLALLKAQIDPVLLKNSSQQDNSSRESPSLEDEETKKEEETPKQEEQKESEKMKSEEQPMDLENRSTANVLEETTVKKEKEDEKELVKLPVIVKLEKPLPENEEKKIIKEESDSFKENVKPIKVEVKECRADPKDTKSSMEKPVAQEPERIEFGGNIKSSHEITEKSTEETEKLKNDQQAKIPLKKREIKLSDDFDSPVKGPLCKSVTPTKEFLKDEIKQEEETCKRISTITALGHEGKQLVNGEVSDERVAPNFKTEPIETKFYETKEESYSPSKDRNIITEGNGTESLNSVITSMKTGELEKETAPLRKDADSSISVLEIHSQKAQIEEPDPPEMETSLDSSEMAKDLSSKTALSSTESCTMKGEEKSPKTKKDKRPPILECLEKLEKSKKTFLDKDAQRLSPIPEEVPKSTLESEKPGSPEAAETSPPSNIIDHCEKLASEKEVVECQSTSTVGGQSVKKVDLETLKEDSEFTKVEMDNLDNAQTSGIEEPSETKGSMQKSKFKYKLVPEEETTASENTEITSERQKEGIKLTIRISSRKKKPDSPPKVLEPENKQEKTEKEEEKTNVGRTLRRSPRISRPTAKVAEIRDQKADKKRGEGEDEVEEESTALQKTDKKEILKKSEKDTNSKVSKVKPKGKVRWTGSRTRGRWKYSSNDESEGSGSEKSSAASEEEEEKESEEAILADDDEPCKKCGLPNHPELILLCDSCDSGYHTACLRPPLMIIPDGEWFCPPCQHKLLCEKLEEQLQDLDVALKKKERAERRKERLVYVGISIENIIPPQEPDFSEDQEEKKKDSKKSKANLLERRSTRTRKCISYRFDEFDEAIDEAIEDDIKEADGGGVGRGKDISTITGHRGKDISTILDEERKENKRPQRAAAARRKKRRRLNDLDSDSNLDEEESEDEFKISDGSQDEFVVSDENPDESEEDPPSNDDSDTDFCSRRLRRHPSRPMRQSRRLRRKTPKKKYSDDDEEEESEENSRDSESDFSDDFSDDFVETRRRRSRRNQKRQINYKEDSESDGSQKSLRRGKEIRRVHKRRLSSSESEESYLSKNSEDDELAKESKRSVRKRGRSTDEYSEADEEEEEEEGKPSRKRLHRIETDEEESCDNAHGDANQPARDSQPRVLPSEQESTKKPYRIESDEEEDFENVGKVGSPLDYSLVDLPSTNGQSPGKAIENLIGKPTEKSQTPKDNSTASASLASNGTSGGQEAGAPEEEEDELLRVTDLVDYVCNSEQL

SEQ ID NO: 4280 - protein, 1189 aa, Homo sapiens
MKSEEQPMDLENRSTANVLEETTVKKEKEDEKELVKLPVIVKLEKPLPENEEKKIIKEESDSFKENVKPIKVEVKECRADPKDTKSSMEKPVAQEPERIEFGGNIKSSHEITEKSTEETEKLKNDQQAKIPLKKREIKLSDDFDSPVKGPLCKSVTPTKEFLKDEIKQEEETCKRISTITALGHEGKQLVNGEVSDERVAPNFKTEPIETKFYETKEESYSPSKDRNIITEGNGTESLNSVITSMKTGELEKETAPLRKDADSSISVLEIHSQKAQIEEPDPPEMETSLDSSEMAKDLSSKTALSSTESCTMKGEEKSPKTKKDKRPPILECLEKLEKSKKTFLDKDAQRLSPIPEEVPKSTLESEKPGSPEAAETSPPSNIIDHCEKLASEKEVVECQSTSTVGGQSVKKVDLETLKEDSEFTKVEMDNLDNAQTSGIEEPSETKGSMQKSKFKYKLVPEEETTASENTEITSERQKEGIKLTIRISSRKKKPDSPPKVLEPENKQEKTEKEEEKTNVGRTLRRSPRISRPTAKVAEIRDQKADKKRGEGEDEVEEESTALQKTDKKEILKKSEKDTNSKVSKVKPKGKVRWTGSRTRGRWKYSSNDESEGSGSEKSSAASEEEEEKESEEAILADDDEPCKKCGLPNHPELILLCDSCDSGYHTACLRPPLMIIPDGEWFCPPCQHKLLCEKLEEQLQDLDVALKKKERAERRKERLVYVGISIENIIPPQEPDFSEDQEEKKKDSKKSKANLLERRSTRTRKCISYRFDEFDEAIDEAIEDDIKEADGGGVGRGKDISTITGHRGKDISTILDEERKENKRPQRAAAARRKKRRRLNDLDSDSNLDEEESEDEFKISDGSQDEFVVSDENPDESEEDPPSNDDSDTDFCSRRLRRHPSRPMRQSRRLRRKTPKKKYSDDDEEEESEENSRDSESDFSDDFSDDFVETRRRRSRRNQKRQINYKEDSESDGSQKSLRRGKEIRRVHKRRLSSSESEESYLSKNSEDDELAKESKRSVRKRGRSTDEYSEADEEEEEEEGKPSRKRLHRIETDEEESCDNAHGDANQPARDSQPRVLPSEQESTKKPYRIESDEEEDFENVGKVGSPLDYSLVDLPSTNGQSPGKAIENLIGKPTEKSQTPKDNSTASASLASNGTSGGQEAGAPEEEEDELLRVTDLVDYVCNSEQL

SEQ ID NO: 4281 - protein, 708 aa, Homo sapiens
MGMSKSHSFFGYPLSIFFIVVNEFCERFSYYGMRAILILYFTNFISWDDNLSTAIYHTFVALCYLTPILGALIADSWLGKFKTIVSLSIVYTIGQAVTSVSSINDLTDHNHDGTPDSLPVHVVLSLIGLALIALGTGGIKPCVSAFGGDQFEEGQEKQRNRFFSIFYLAINAGSLLSTIITPMLRVQQCGIHSKQACYPLAFGVPAALMAVALIVFVLGSGMYKKFKPQGNIMGKVAKCIGFAIKNRFRHRSKAFPKREHWLDWAKEKYDERLISQIKMVTRVMFLYIPLPMFWALFDQQGSRWTLQATTMSGKIGALEIQPDQMQTVNAILIVIMVPIFDAVLYPLIAKCGFNFTSLKKMAVGMVLASMAFVVAAIVQVEIDKTLPVFPKGNEVQIKVLNIGNNTMNISLPGEMVTLGPMSQTNAFMTFDVNKLTRINISSPGSPVTAVTDDFKQGQRHTLLVWAPNHYQVVKDGLNQKPEKGENGIRFVNTFNELITITMSGKVYANISSYNASTYQFFPSGIKGFTISSTEIPPQCQPNFNTFYLEFGSAYTYIVQRKNDSCPEVKVFEDISANTVNMALQIPQYFLLTCGEVVFSVTGLEFSYSQAPSNMKSVLQAGWLLTVAVGNIIVLIVAGAGQFSKQWAEYILFAALLLVVCVIFAIMARFYTYINPAEIEAQFDEDEKKNRLEKSNPYFMSGANSQKQM

SEQ ID NO: 4282 - protein, 236 aa, Homo sapiens
MEPGGSENAAALWISEGGRGPGRGPGPEWTSRSLLPQSGPALQPTPYSQRKGPRETHPDALKGGGGWGWGNTQSLSGECRKGVGAGEEKDGAAVSLSTPHLLAASAGLQPAPSPLGTAVCPFSPHSSPSFSHHRTLSLFISPAPLSCPAPRAQVHRSTPMGRALLTRVLLEPLRPWACPRLPRSPPGGAQSGRGGALAQPTLRCAAAPLRAWAWRSSDPPPAFSVFCHPPRGFDIS

SEQ ID NO: 4283 - protein, 180 aa, Homo sapiens
MEPGGSENAAALWISEGGRGPGRGPGPEWTSRSLLPQSGPALQPTPYSQRKGPRETHPDALKGGGGWGWGNTQSLSGECRKGVGAGEEKDGAAVSLSTPHLLAASAGLQPAPSPLGTAGPTTLSQAPSGSGTVLEWPVADTEPPASCICCPGCQCQFCRSHWGPQRGQGTLQSCTLKPAR

SEQ ID NO: 4284 - protein, 104 aa, Homo sapiens
MGQCRSANAEDAQEFSDVERAIETLIKNFHQYSVEGGKETLTPSELRDLVTQQLPHLMPSNCGLEEKIANLGSCNDSKLEFRSFWELIGEAAKSVKLERPVRGH

SEQ ID NO: 4285 - protein, 1083 aa, Homo sapiens
MPTNFTVVPVEAHADGGGDETAERTEAPGTPEGPEPERPSPGDGNPRENSPFLNNVEVEQESFFEGKNMALFEEEMDSNPMVSSLLNKLANYTNLSQGVVEHEEDEESRRREAKAPRMGTFIGVYLPCLQNILGVILFLRLTWIVGVAGVLESFLIVAMCCTCTMLTAISMSAIATNGVVPAGGSYYMISRSLGPEFGGAVGLCFYLGTTFAGAMYILGTIEIFLTYISPGAAIFQAEAAGGEAAAMLHNMRVYGTCTLVLMALVVFVGVKYVNKLALVFLACVVLSILAIYAGVIKSAFDPPDIPVCLLGNRTLSRRSFDACVKAYGIHNNSATSALWGLFCNGSQPSAACDEYFIQNNVTEIQGIPGAASGVFLENLWSTYAHAGAFVEKKGVPSVPVAEESRASALPYVLTDIAASFTLLVGIYFPSVTGIMAGSNRSGDLKDAQKSIPTGTILAIVTTSFIYLSCIVLFGACIEGVVLRDKFGEALQGNLVIGMLAWPSPWVIVIGSFFSTCGAGLQSLTGAPRLLQAIARDGIVPFLQVFGHGKANGEPTWALLLTVLICETGILIASLDSVAPILSMFFLMCYLFVNLACAVQTLLRTPNWRPRFKFYHWTLSFLGMSLCLALMFICSWYYALSAMLIAGCIYKYIEYRGAEKEWGDGIRGLSLNAARYALLRVEHGPPHTKNWRPQVLVMLNLDAEQAVKHPRLLSFTSQLKAGKGLTIVGSVLEGTYLDKHMEAQRAEENIRSLMSTEKTKGFCQLVVSSSLRDGMSHLIQSAGLGGLKHNTVLMAWPASWKQEDNPFSWKNFVDTVRDTTAAHQALLVAKNVDSFPQNQERFGGGHIDVWWIVHDGGMLMLLPFLLRQHKVWRKCRMRIFTVAQVDDNSIQMKKDLQMFLYHLRISAEVEVVEMVENDISAFTYERTLMMEQRSQMLKQMQLSKNEQEREAQLIHDRNTASHTAAAARTQAPPTPDKVQMTWTREKLIAEKYRSRDTSLSGFKDLFSMKPDQSNVRRMHTAVKLNGVVLNKSQDAQLVLLNMPGPPKNRQGDENYMEFLEVLTEGLNRVLLVRGGGREVITIYS

SEQ ID NO: 4286 - protein, 266 aa, Homo sapiens
MPTNFTVVPVEAHADGGGDETAERTEAPGTPEGPEPERPSPGDGNPRENSPFLNNVEVEQESFFEGKNMALFEEEMDSNPMVSSLLNKLANYTNLSQGVVEHEEDEESRRREAKAPRMGTFIGVYLPCLQNILGVILFLRLTWIVGVAGVLESFLIVAMCCTCTMLTAISMSAIATNGVVPAGGSYYMISRSLGPEFGGAVGLCFYLGTTFAGAMYILGTIEIFLTGTEDGVGSLGLGLAQGNRRQTHLSPSDAAQAAHGASYGSF

SEQ ID NO: 4287 - protein, 714 aa, Homo sapiens
MTQMSQVQELFHEAAQQDALAQPQPWWKTQLFMWEPVLFGTWDGVFTSCMINIFGVVLFLRTGWLVGNTGVLLGMFLVSFVILVALVTVLSGIGVGERSSIGSGGVYSMISSVLGGQTGGTIGLLYVFGQCVAGAMYITGFAESISDLLGLGNIWAVRGISVAVLLALLGINLAGVKWIIRLQLLLLFLLAVSTLDFVVGSFTHLDPEHGFIGYSPELLQNNTLPDYSPGESFFTVFGVFFPAATGVMAGFNMGGDLREPAASIPLGSLAAVGISWFLYIIFVFLLGAICTREALRYDFLIAEKVSLMGFLFLLGLYISSLASCMGGLYGAPRILQCIAQEKVIPALACLGQGKGPNKTPVAAICLTSLVTMAFVFVGQVNVLAPIVTINFMLTYVAVDYSYFSLSMCSCSLTPVPEPVLREGAEGLHCSEHLLLEKAPSYGSEGPAQRVLEGTLLEFTKDMDQLLQLTRKLESSQPRQGEGNRTPESQKRKSKKATKQTLQDSFLLDLKSPPSFPVEISDRLPAASWEGQESCWNKQTSKSEGTQPEGTYGEQLVPELCNQSESSGEDFFLKSRLQEQDVWRRSTSFYTHMCNPWVSLLGAVGSLLIMFVIQWVYTLVNMGVAAIVYFYIGRASPGLHLGSASNFSFFRWMRSLLLPSCRSLRSPQEQIILAPSLAKVDMEMTQLTQENADFATRDRYHHSSLVNREQLMPHY

SEQ ID NO: 4288 - protein, 743 aa, Homo sapiens
MLPLERTITYRDMSSFIQVKNHFNVVNVTCVSYRSTCFRDMRRFILDALAQPQPWWKTQLFMWEPVLFGTWDGVFTSCMINIFGVVLFLRTGWLVGNTGVLLGMFLVSFVILVALVTVLSGIGVGERSSIGSGGVYSMISSVLGGQTGGTIGLLYVFGQCVAGAMYITGFAESISDLLGLGNIWAVRGISVAVLLALLGINLAGVKWIIRLQLLLLFLLAVSTLDFVVGSFTHLDPEHGFIGYSPELLQNNTLPDYSPGESFFTVFGVFFPAATGVMAGFNMGGDLREPAASIPLGSLAAVGISWFLYIIFVFLLGAICTREALRYDFLIAEKVSLMGFLFLLGLYISSLASCMGGLYGAPRILQCIAQEKVIPALACLGQGKGPNKTPVAAICLTSLVTMAFVFVGQVNVLAPIVTINFMLTYVAVDYSYFSLSMCSCSLTPVPEPVLREGAEGLHCSEHLLLEKAPSYGSEGPAQRVLEGTLLEFTKDMDQLLQLTRKLESSQPRQGEGNRTPESQKRKSKKATKQTLQDSFLLDLKSPPSFPVEISDRLPAASWEGQESCWNKQTSKSEGTQPEGTYGEQLVPELCNQSESSGEDFFLKSRLQEQDVWRRSTSFYTHMCNPWVSLLGAVGSLLIMFVIQWVYTLVNMGVAAIVYFYIGRASPGLHLGSASNFSFFRWMRSLLLPSCRSLRSPQEQIILAPSLAKVDMEMTQLTQENADFATRDRYHHSSLVNREQLMPHY

SEQ ID NO: 4289 - protein, 515 aa, Homo sapiens
MRRAAAGGLAVGQLPGEGPAGEEGAALGKAMRGGGCSPHSPSGCLSGVMAGFNMGGDLREPAASIPLGSLAAVGISWFLYIIFVFLLGAICTREALRYDFLIAEKVSLMGFLFLLGLYISSLASCMGGLYGAPRILQCIAQEKVIPALACLGQGKGPNKTPVAAICLTSLVTMAFVFVGQVNVLAPIVTINFMLTYVAVDYSYFSLSMCSCSLTPVPEPVLREGAEGLHCSEHLLLEKAPSYGSEGPAQRVLEGTLLEFTKDMDQLLQLTRKLESSQPRQGEGNRTPESQKRKSKKATKQTLQDSFLLDLKSPPSFPVEISDRLPAASWEGQESCWNKQTSKSEGTQPEGTYGEQLVPELCNQSESSGEDFFLKSRLQEQDVWRRSTSFYTHMCNPWVSLLGAVGSLLIMFVIQWVYTLVNMGVAAIVYFYIGRASPGLHLGSASNFSFFRWMRSLLLPSCRSLRSPQEQIILAPSLAKVDMEMTQLTQENADFATRDRYHHSSLVNREQLMPHY

SEQ ID NO: 4290 - protein, 375 aa, Homo sapiens
MAGFNMGGDLREPAASIPLGSLAAVGISWFLYIIFVFLLGAICTREALRYDFLIAEKVSLMGFLFLLGLYISSLASCMGGLYGAPRILQCIAQEKVIPALACLGQGKGPNKTPVAAICLTSLVTMAFVFVGQVNVLAPIVTINFMLTYVAVDYSYFSLSMCSCSLTPVPEPVLREGAEGLHCSEHLLLEKAPSYGSEGPAQRVLEGTLLEFTKDMDQLLQLTRKLESSQPRQGEGNRTPESQKRKSKKATKQTLQDSFLLDLKSPPSFPVEISDRLPAASWEGQESCWNKQTSKSEGTQPEGTYGEQLVPELCNQSESSGEGSLRSPQEQIILAPSLAKVDMEMTQLTQENADFATRDRYHHSSLVNREQLMPHY

SEQ ID NO: 4291 - protein, 308 aa, Homo sapiens
MCSCSLTPVPEPVLREGAEGLHCSEHLLLEKAPSYGSEGPAQRVLEGTLLEFTKDMDQLLQLTRKLESSQPRQGEGNRTPESQKRKSKKATKQTLQDSFLLDLKSPPSFPVEISDRLPAASWEGQESCWNKQTSKSEGTQPEGTYGEQLVPELCNQSESSGEDFFLKSRLQEQDVWRRSTSFYTHMCNPWVSLLGAVGSLLIMFVIQWVYTLVNMGVAAIVYFYIGRASPGLHLGSASNFSFFRWMRSLLLPSCRSLRSPQEQIILAPSLAKVDMEMTQLTQENADFATRDRYHHSSLVNREQLMPHY

SEQ ID NO: 4292 - protein, 587 aa, Homo sapiens
MATAAYEQLKLHITPEKFYVEACDDGADDVLTIDRVSTEVTLAVKKDVPPSAVTRPIFGILGTIHLVAGNYLIVITKKIKVGEFFSHVVWKATDFDVLSYKKTMLHLTDIQLQDNKTFLAMLNHVLNVDGFYFSTTYDLTHTLQRLSNTSPEFQEMSLLERADQRFVWNGHLLRELSAQPEVHRFALPVLHGFITMHSCSINGKYFDWILISRRSCFRAGVRYYVRGIDSEGHAANFVETEQIVHYNGSKASFVQTRGSIPVFWSQRPNLKYKPLPQISKVANHMDGFQRHFDSQVIIYGKQVIINLINQKGSEKPLEQTFATMVSSLGSGMMRYIAFDFHKECKNMRWDRLSILLDQVAEMQDELSYFLVDSAGQVVANQEGVFRSNCMDCLDRTNVIQSLLARRSLQAQLQRLGVLHVGQKLEEQDEFEKIYKNAWADNANACAKQYAGTGALKTDFTRTGKRTHLGLIMDGWNSMIRYYKNNFSDGFRQDSIDLFLGNYSVDELESHSPLSVPRDWKFLALPIIMVVAFSMCIICLLMAGDTWTETLAYVLFWGVASIGTFFIILYNGKDFVDAPRLVQKEKID

SEQ ID NO: 4293 - protein, 526 aa, Homo sapiens
MWKLVMMEQMTYLPLTVCPQRLPLQSRKMFLLQLSQDQYLVYWAQSIWWQLQDNKTFLAMLNHVLNVDGFYFSTTYDLTHTLQRLSNTSPEFQEMSLLERADQRFVWNGHLLRELSAQPEVHRFALPVLHGFITMHSCSINGKYFDWILISRRSCFRAGVRYYVRGIDSEGHAANFVETEQIVHYNGSKASFVQTRGSIPVFWSQRPNLKYKPLPQISKVANHMDGFQRHFDSQVIIYGKQVIINLINQKGSEKPLEQTFATMVSSLGSGMMRYIAFDFHKECKNMRWDRLSILLDQVAEMQDELSYFLVDSAGQVVANQEGVFRSNCMDCLDRTNVIQSLLARRSLQAQLQRLGVLHVGQKLEEQDEFEKIYKNAWADNANACAKQYAGTGALKTDFTRTGKRTHLGLIMDGWNSMIRYYKNNFSDGFRQDSIDLFLGNYSVDELESHSPLSVPRDWKFLALPIIMVVAFSMCIICLLMAGDTWTETLAYVLFWGVASIGTFFIILYNGKDFVDAPRLVQKEKID

SEQ ID NO: 4294 - protein, 688 aa, Homo sapiens
MAAEIDFLREQNRRLNEDFRRYQMESFSKYSSVQKAVCQGEGDDTFENLVFDQSFLAPLVTEYDKHLGELNGQLKYYQKQVGEMKLQLENVIKENERLHSELKDAVEKKLEAFPLGTEVGTDIYADDETVRNLQEQLQLANQEKTQAVELWQTVSQELDRLHKLYQEHMTEAQIHVFESQKQKDQLFDFQQLTKQLHVTNENMEVTNQQFLKTVTEQSVIIEQLRKKLRQAKLELRVAVAKVEELTNVTEDLQGQMKKKEKDVVSAHGREEASDRRLQQLQSSIKQLEIRLCVTIQEANQLRTENTHLEKQTRELQAKCNELENERYEAIVRARNSMQLLEEANLQKSQALLEEKQKEEDIEKMKETVSRFVQDATIRTKKEVANTKKQCNIQISRLTEELSALQMECAEKQGQIERVIKEKKAVEEELEKIYREGRGNESDYRKLEEMHQRFLVSERSKDDLQLRLTRAENRIKQLETDSSEEISRYQEMIQKLQNVLESERENCGLVSEQRLKLQQENKQLRKETESLRKIALEAQKKAKVKISTMEHEFSIKERGFEVQLREMEDSNRNSIVELRHLLATQQKAANRWKEETKKLTESAEIRINNLKSELSRQKLHTQELLSQLEMANEKVAENEKLILEHQEKANRLQRRLSQAEERAASASQQLSVITVQRRKAASLMNLENI

SEQ ID NO: 4295 - protein, 307 aa, Homo sapiens
MAAEIDFLREQNRRLNEDFRRYQMESFSKYSSVQKAVCQGEGDDTFENLVFDQSFLAPLVTEYDKHLGELNGQLKYYQKQVGEMKLQLENVIKENERLHSELKDAVEKKLEAFPLGTEVGTDIYADDETVRNLQEQLQLANQEKTQAVELWQTVSQELDRLHKLYQEHMTEAQIHVFESQKQKDQLFDFQQLTKQLHVTNENMEVTNQQFLKTVTEQSVIIEQLRKKLRSELSRQKLHTQELLSQLEMANEKVAENEKLILEHQEKANRLQRRLSQAEERAASASQQLSVITVQRRKAASLMNLENI

SEQ ID NO: 4296 - protein, 175 aa, Homo sapiens
MAAEIDFLREQNRRLNEDFRRYQMESFSKYSSVQKAVCQGEGDDTFENLVFDQSFLAPLVTEYDKHLGELNGQLKYYQKQVGEMKLQLENVIKENERSELSRQKLHTQELLSQLEMANEKVAENEKLILEHQEKANRLQRRLSQAEERAASASQQLSVITVQRRKAASLMNLENI

SEQ ID NO: 4297 - protein, 79 aa, Homo sapiens
MAAEIDFLREQNRRLNEDFRRYQMESFSKYSSVQKAVCQGEGDDTFENLVFDQSFLAPLVTEYDKHLGELNGQLKYYQA

SEQ ID NO: 4298 - protein, 229 aa, Homo sapiens
MSEKENNFPPLPKFIPVKPCFYQNFSDEIPVEHQVLVKRIYRLWMFYCATLGVNLIACLAWWIGGGSGTNFGLAFVWLLLFTPCGYVCWFRPVYKAFRADSSFNFMAFFFIFGAQFVLTVIQAIGFSGWGACGWLSAIGFFQYSPGAAVVMLLPAIMFSVSAAMMAIAIMKVHRIYRGAGGSFQKAQTEWNTGTWRNPPSREAQYNNFSGNSLPEYPTVPSYPGSGQWP

SEQ ID NO: 4299 - protein, 195 aa, Homo sapiens
MSEKENNFPPLPKFIPVKPCFYQNFSDEIPVEHQVLVKRIYRLWMFYCATLGVNLIACLAWWIGGGSGTNFGLAFVWLLLFTPCGYVCWFRPVYKAFRGWLSAIGFFQYSPGAAVVMLLPAIMFSVSAAMMAIAIMKVHRIYRGAGGSFQKAQTEWNTGTWRNPPSREAQYNNFSGNSLPEYPTVPSYPGSGQWP

SEQ ID NO: 4300 - protein, 132 aa, Homo sapiens
MSEKENNFPPLPKFIPVKPCFYQNFSDEIPVEHQVLVKRIYRLWMFYCATLGVNLIACLAWWIGGGSGTNFGLAFVWLLLFTPCGYVCWFRPVYKAFRADSSFNFMAFFFIFGAQFVLTVIQAIGFSGWGAG

SEQ ID NO: 4301 - protein, 657 aa, Homo sapiens
MSQVLFHQLVPLQVKCKDCEERRVSIRMSIELQSVSNPVHRKDLVIRLTDDTDPFFLYNLVISEEDFQSLKFQQGLLVDFLAFPQKFIDLLQQCTQEHAKEIPRFLLQLVSPAAILDNSPAFLNVVETNPFKHLTHLSLKLLPGNDVEIKKFLAGCLKCSKEEKLSLMQSLDDATKQLDFTRKTLAEKKQELDKLRNEWASHTAALTNKHSQELTNEKEKALQAQVQYQQQHEQQKKDLEILHQQNIHQLQNRLSELEAANKDLTERKYKGDSTIRELKAKLSGVEEELQRTKQEVLSLRRENSTLDVECHEKEKHVNQLQTKVAVLEQEIKDKDQLVLRTKEAFDTIQEQKVVLEENGEKNQVQLGKLEATIKSLSAELLKANEIIKKLQGDLKTLMGKLKLKNTVTIQQEKLLAEKEEKLQKEQKELQDVGQSLRIKEQEVCKLQEQLEATVKKLEESKQLLKNNEKLITWLNKELNENQLVRKQDVLGPSTTPPAHSSSNTIRSGISPNLNVVDGRLTYPTCGIGYPVSSAFAFQNTFPHSISAKNTSHPGSGTKVQFNLQFTKPNASLGDVQSGATISMPCSTDKENGENVGLESKYLKKREDSIPLRGLSQNLFSNSDHQRDGTLGALHTSSKPTALPSASSAYFPGQLPNS

SEQ ID NO: 4302 - protein, 1366 aa, Homo sapiens
MLAVGPAMDRDYPQHEPPPAGSLLYSPPPLQSAMLHCPYWNTFSLPPYPAFSSDSRPFMSSASFLGSQPCPDTSYAPVATASSLPPKTCDFAQDSSYFEDFSNISIFSSSVDSLSDIVDTPDFLPADSLNQVSTIWDDNPAPSTHDKLFQLSRPFAGFEDFLPSHSTPLLVSYQEQSVQSQPEEEDEAEEEEAEELGHTETYADYVPSKSKIGKQHPDRVVETSTLSSVPPPDITYTLALPSDSGALSALQLEAITYACQQHEVLLPSGQRAGFLIGDGAGVGKGRTVAGVILENHLRGRKKALWFSVSNDLKYDAERDLRDIEATGIAVHALSKIKYGDTTTSEGVLFATYSALIGESQAGGQHRTRLRQILDWCGEAFEGVIVFDECHKAKNAGSTKMGKAVLDLQNKLPLARVVYASATGASEPRNMIYMSRLGIWGEGTPFRNFEEFLHAIEKRGVGAMEIVAMDMKVSGMYIARQLSFSGVTFRIEEIPLAPAFECVYNRAALLWAEALNVFQQAADWIGLESRKSLWGQFWSAHQRFFKYLCIAAKVRRLVELAREELARDKCVVIGLQSTGEARTREVLGENDGHLNCFVSAAEGVFLSLIQKHFPSTKRKRDRGAGSKRKRRPRGRGAKAPRLACETAGVIRISDDSSTESDPGLDSDFNSSPESLVDDDVVIVDAVGLPSDDRGPLCLLQRDPHGPGVLERVERLKQDLLDKVRRLGRELPVNTLDELIDQLGGPQRVAEMTGRKGRVVSRPDGTVAFESRAEQGLSIDHVNLREKQRFMSGEKLVAIISEASSSGVSLQADRRVQNQRRRVHMTLELPWSADRAIQQFGRTHRSNQVSAPEYVFLISELAGERRFASIVAKRLESLGALTHGDRRATESRDLSKYNFENKYGTRALHCVLTTILSQTENKVPVPQGYPGGVPTFFRDMKQGLLSVGIGGRESRNGCLDVEKDCSITKFLNRILGLEVHKQNALFQYFSDTFDHLIEMDKREGKYDMGILDLAPGIEEIYEESQQVFLAPGHPQDGQVVFYKISVDRGLKWEDAFAKSLALTGPYDGFYLSYKVRGNKPSCLLAEQNRGQFFTVYKPNIGRQSQLEALDSLRRKFHRVTAEEAKEPWESGYALSLTHCSHSAWNRHCRLAQEGKDCLQGLRLRHHYMLCGALLRVWGRIAAVMADVSSSSYLQIVRLKTKDRKKQVGIKIPEGCVRRVLQELRLMDADVKRRQAPALGCPAPPAPRPLALPCGPGEVLDLTYSPPAEAFPPPPHFSFPAPLSLDAGPGVVPLGTPDAQADPAALAHQGCDINFKEVLEDMLRSLHAGPPSEGALGEGAGAGGAAGGGPERQSVIQFSPPFPGAQAPL

SEQ ID NO: 4303 - protein, 1309 aa, Homo sapiens
MREPLPGSASWGTPGPPSAGTMSQLQLWLQFEALNKDSSYFEDFSNISIFSSSVDSLSDIVDTPDFLPADSLNQVSTIWDDNPAPSTHDKLFQLSRPFAGFEDFLPSHSTPLLVSYQEQSVQSQPEEEDEAEEEEAEELGHTETYADYVPSKSKIGKQHPDRVVETSTLSSVPPPDITYTLALPSDSGALSALQLEAITYACQQHEVLLPSGQRAGFLIGDGAGVGKGRTVAGVILENHLRGRKKALWFSVSNDLKYDAERDLRDIEATGIAVHALSKIKYGDTTTSEGVLFATYSALIGESQAGGQHRTRLRQILDWCGEAFEGVIVFDECHKAKNAGSTKMGKAVLDLQNKLPLARVVYASATGASEPRNMIYMSRLGIWGEGTPFRNFEEFLHAIEKRGVGAMEIVAMDMKVSGMYIARQLSFSGVTFRIEEIPLAPAFECVYNRAALLWAEALNVFQQAADWIGLESRKSLWGQFWSAHQRFFKYLCIAAKVRRLVELAREELARDKCVVIGLQSTGEARTREVLGENDGHLNCFVSAAEGVFLSLIQKHFPSTKRKRDRGAGSKRKRRPRGRGAKAPRLACETAGVIRISDDSSTESDPGLDSDFNSSPESLVDDDVVIVDAVGLPSDDRGPLCLLQRDPHGPGVLERVERLKQDLLDKVRRLGRELPVNTLDELIDQLGGPQRVAEMTGRKGRVVSRPDGTVAFESRAEQGLSIDHVNLREKQRFMSGEKLVAIISEASSSGVSLQADRRVQNQRRRVHMTLELPWSADRAIQQFGRTHRSNQVSAPEYVFLISELAGERRFASIVAKRLESLGALTHGDRRATESRDLSKYNFENKYGTRALHCVLTTILSQTENKVPVPQGYPGGVPTFFRDMKQGLLSVGIGGRESRNGCLDVEKDCSITKFLNRILGLEVHKQNALFQYFSDTFDHLIEMDKREGKYDMGILDLAPGIEEIYEESQQVFLAPGHPQDGQVVFYKISVDRGLKWEDAFAKSLALTGPYDGFYLSYKVRGNKPSCLLAEQNRGQFFTVYKPNIGRQSQLEALDSLRRKFHRVTAEEAKEPWESGYALSLTHCSHSAWNRHCRLAQEGKDCLQGLRLRHHYMLCGALLRVWGRIAAVMADVSSSSYLQIVRLKTKDRKKQVGIKIPEGCVRRVLQELRLMDADVKRRQAPALGCPAPPAPRPLALPCGPGEVLDLTYSPPAEAFPPPPHFSFPAPLSLDAGPGVVPLGTPDAQADPAALAHQGCDINFKEVLEDMLRSLHAGPPSEGALGEGAGAGGAAGGGPERQSVIQFSPPFPGAQAPL

SEQ ID NO: 4304 - protein, 472 aa, Homo sapiens
MATKCGNCGPGYSTPLEAMKGPREEIVYLPCIYRNTGTEAPDYLATVDVDPKSPQYCQVIHRLPMPNLKDELHHSGWNTCSSCFGDSTKSRTKLVLPSLISSRIYVVDVGSEPRAPKLHKVIEPKDIHAKCELAFLHTSHCLASGEVMISSLGDVKGNGKGGFVLLDGETFEVKGTWERPGGAAPLGYDFWYQPRHNVMISTEWAAPNVLRDGFNPADVEAGLYGSHLYVWDWQRHEIVQTLSLKDGLIPLEIRFLHNPDAAQGFVGCALSSTIQRFYKNEGGTWSVEKVIQVPPKKVKGWLLPEMPGLITDILLSLDDRFLYFSNWLHGDLRQYDISDPQRPRLTGQLFLGGSIVKGGPVQVLEDEELKSQPEPLVVKGKRVAGGPQMIQLSLDGKRLYITTSLYSAWDKQFYPDLIREGSVMLQVDVDTVKGGLKLNPNFLVDFGKEPLGPALAHELRYPGGDCSSDIWI

SEQ ID NO: 4305 - protein, 408 aa, Homo sapiens
MPNLKDELHHSGWNTCSSCFGDSTKSRTKLVLPSLISSRIYVVDVGSEPRAPKLHKVIEPKDIHAKCELAFLHTSHCLASGEVMISSLGDVKGNGKGGFVLLDGETFEVKGTWERPGGAAPLGYDFWYQPRHNVMISTEWAAPNVLRDGFNPADVEAGLYGSHLYVWDWQRHEIVQTLSLKDGLIPLEIRFLHNPDAAQGFVGCALSSTIQRFYKNEGGTWSVEKVIQVPPKKVKGWLLPEMPGLITDILLSLDDRFLYFSNWLHGDLRQYDISDPQRPRLTGQLFLGGSIVKGGPVQVLEDEELKSQPEPLVVKGKRVAGGPQMIQLSLDGKRLYITTSLYSAWDKQFYPDLIREGSVMLQVDVDTVKGGLKLNPNFLVDFGKEPLGPALAHELRYPGGDCSSDIWI

SEQ ID NO: 4306 - protein, 410 aa, Homo sapiens
MATKCGNCGPGYSTPLEAMKGPREEIVYLPCIYRNTGTEAPDYLATVDVDPKSPQYCQVIEPKDIHAKCELAFLHTSHCLASGEVMISSLGDVKGNGKGGFVLLDGETFEVKGTWERPGGAAPLGYDFWYQPRHNVMISTEWAAPNVLRDGFNPADVEAGLYGSHLYVWDWQRHEIVQTLSLKDGLIPLEIRFLHNPDAAQGFVGCALSSTIQRFYKNEGGTWSVEKVIQVPPKKVKGWLLPEMPGLITDILLSLDDRFLYFSNWLHGDLRQYDISDPQRPRLTGQLFLGGSIVKGGPVQVLEDEELKSQPEPLVVKGKRVAGGPQMIQLSLDGKRLYITTSLYSAWDKQFYPDLIREGSVMLQVDVDTVKGGLKLNPNFLVDFGKEPLGPALAHELRYPGGDCSSDIWI

SEQ ID NO: 4307 - protein, 514 aa, Homo sapiens
MRLEWGPRPAALPWPAGMCAAERAEGAFTLQSVAQPMRPIASTATKCGNCGPGYSTPLEAMKGPREEIVYLPCIYRNTGTEAPDYLATVDVDPKSPQYCQVIHRLPMPNLKDELHHSGWNTCSSCFGDSTKSRTKLVLPSLISSRIYVVDVGSEPRAPKLHKVIEPKDIHAKCELAFLHTSHCLASGEVMISSLGDVKGNGKGGFVLLDGETFEVKGTWERPGGAAPLGYDFWYQPRHNVMISTEWAAPNVLRDGFNPADVEAGLYGSHLYVWDWQRHEIVQTLSLKDGLIPLEIRFLHNPDAAQGFVGCALSSTIQRFYKNEGGTWSVEKVIQVPPKKVKGWLLPEMPGLITDILLSLDDRFLYFSNWLHGDLRQYDISDPQRPRLTGQLFLGGSIVKGGPVQVLEDEELKSQPEPLVVKGKRVAGGPQMIQLSLDGKRLYITTSLYSAWDKQFYPDLIREGSVMLQVDVDTVKGGLKLNPNFLVDFGKEPLGPALAHELRYPGGDCSSDIWI

SEQ ID NO: 4308 - protein, 1247 aa, Homo sapiens
MEDAGAAGPGPEPEPEPEPEPEPAPEPEPEPKPGAGTSEAFSRLWTDVMGILDGSLGNIDDLAQQYADYYNTCFSDVCERMEELRKRRVSQDLEVEKPDASPTSLQLRSQIEESLGFCSAVSTPEVERKNPLHKSNSEDSSVGKGDWKKKNKYFWQNFRKNQKGIMRQTSKGEDVGYVASEITMSDEERIQLMMMVKEKMITIEEALARLKEYEAQHRQSAALDPADWPDGSYPTFDGSSNCNSREQSDDETEESVKFKRLHKLVNSTRRVRKKLIRVEEMKKPSTEGGEEHVFENSPVLDERSALYSGVHKKPLFFDGSPEKPPEDDSDSLTTSPSSSSLDTWGAGRKLVKTFSKGESRGLIKPPKKMGTFFSYPEEEKAQKVSRSLTEGEMKKGLGSLSHGRTCSFGGFDLTNRSLHVGSNNSDPMGKEGDFVYKEVIKSPTASRISLGKKVKSVKETMRKRMSKKYSSSVSEQDSGLDGMPGSPPPSQPDPEHLDKPKLKAGGSVESLRSSLSGQSSMSGQTVSTTDSSTSNRESVKSEDGDDEEPPYRGPFCGRARVHTDFTPSPYDTDSLKLKKGDIIDIISKPPMGTWMGLLNNKVGTFKFIYVDVLSEDEEKPKRPTRRRRKGRPPQPKSVEDLLDRINLKEHMPTFLFNGYEDLDTFKLLEEEDLDELNIRDPEHRAVLLTAVELLQEYDSNSDQSGSQEKLLVDSQGLSGCSPRDSGCYESSENLENGKTRKASLLSAKSSTEPSLKSFSRNQLGNYPTLPLMKSGDALKQGQEEGRLGGGLAPDTSKSCDPPGVTGLNKNRRSLPVSICRSCETLEGPQTVDTWPRSHSLDDLQVEPGAEQDVPTEVTEPPPQIVPEVPQKTTASSTKAQPLEQDSAVDNALLLTQSKRFSEPQKLTTKKLEGSIAASGRGLSPPQCLPRNYDAQPPGAKHGLARTPLEGHRKGHEFEGTHHPLGTKEGVDAEQRMQPKIPSQPPPVPAKKSRERLANGLHPVPMGPSGALPSPDAPCLPVKRGSPASPTSPSDCPPALAPRPLSGQAPGSPPSTRPPPWLSELPENTSLQEHGVKLGPALTRKVSCARGVDLETLTENKLHAEGIDLTEEPYSDKHGRCGIPEALVQRYAEDLDQPERDVAANMDQIRVKQLRKQHRMAIPSGGLTEICRKPVSPGCISSVSDWLISIGLPMYAGTLSTAGFSTLSQVPSLSHTCLQEAGITEERHIRKLLSAARLFKLPPGPEAM

SEQ ID NO: 4309 - protein, 469 aa, Homo sapiens
MLCLCLYVPVIGEAQTEFQYFESKGLPAELKSIFKLSVFIPSQEFSTYRQWKQKIVQAGDKDLDGQLDFEEFVHYLQDHEKKLRLVFKSLDKKNDGRIDAQEIMQSLRDLGVKISEQQAEKILKSMDKNGTMTIDWNEWRDYHLLHPVENIPEIILYWKHSTIFDVGENLTVPDEFTVEERQTGMWWRHLVAGGGAGAVSRTCTAPLDRLKVLMQVHASRSNNMGIVGGFTQMIREGGARSLWRGNGINVLKIAPESAIKFMAYEQIKRLVGSDQETLRIHERLVAGSLAGAIAQSSIYPMEVLKTRMALRKTGQYSGMLDCARRILAREGVAAFYKGYVPNMLGIIPYAGIDLAVYETLKNAWLQHYAVNSADPGVFVLLACGTMSSTCGQLASYPLALVRTRMQAQASIEGAPEVTMSSLFKHILRTEGAFGLYRGLAPNFMKVIPAVSISYVVYENLKITLGVQSR

SEQ ID NO: 4310 - protein, 503 aa, Homo sapiens
MVSSVLCRCVASPPPDAAATAASSSASSPASVGDPCGGAICGGPDHRLRLWRLFQTLDVNRDGGLCVNDLAVGLRRLGLHRTEGELQKIVQAGDKDLDGQLDFEEFVHYLQDHEKKLRLVFKSLDKKNDGRIDAQEIMQSLRDLGVKISEQQAEKILKSMDKNGTMTIDWNEWRDYHLLHPVENIPEIILYWKHSTIFDVGENLTVPDEFTVEERQTGMWWRHLVAGGGAGAVSRTCTAPLDRLKVLMQVHASRSNNMGIVGGFTQMIREGGARSLWRGNGINVLKIAPESAIKFMAYEQIKRLVGSDQETLRIHERLVAGSLAGAIAQSSIYPMEVLKTRMALRKTGQYSGMLDCARRILAREGVAAFYKGYVPNMLGIIPYAGIDLAVYETLKNAWLQHYAVNSADPGVFVLLACGTMSSTCGQLASYPLALVRTRMQAQASIEGAPEVTMSSLFKHILRTEGAFGLYRGLAPNFMKVIPAVSISYVVYENLKITLGVQSR

SEQ ID NO: 4311 - protein, 515 aa, Homo sapiens
MVSSVLCRCVASPPPDAAATAASSSASSPASVGDPCGGAICGGPDHRLRLWRLFQTLDVNRDGGLCVNDLAVGLRRLGLHRTEGELQKIVQAGDKDLDGQLDFEEFVHYLQDHEKKLRLVFKSLDKKNDGRIDAQEIMQSLRDLGVKISEQQAEKILKRIRTGHFWGPVTYMDKNGTMTIDWNEWRDYHLLHPVENIPEIILYWKHSTIFDVGENLTVPDEFTVEERQTGMWWRHLVAGGGAGAVSRTCTAPLDRLKVLMQVHASRSNNMGIVGGFTQMIREGGARSLWRGNGINVLKIAPESAIKFMAYEQIKRLVGSDQETLRIHERLVAGSLAGAIAQSSIYPMEVLKTRMALRKTGQYSGMLDCARRILAREGVAAFYKGYVPNMLGIIPYAGIDLAVYETLKNAWLQHYAVNSADPGVFVLLACGTMSSTCGQLASYPLALVRTRMQAQASIEGAPEVTMSSLFKHILRTEGAFGLYRGLAPNFMKVIPAVSISYVVYENLKITLGVQSR

SEQ ID NO: 4312 - protein, 489 aa, Homo sapiens
MLQMLWHFLASFFPRAGCHGSREGDDREVRGTPAPAWRDQMASFLGKQDGRAEATEKRPTILLVVGPAEQFPKKIVQAGDKDLDGQLDFEEFVHYLQDHEKKLRLVFKSLDKKNDGRIDAQEIMQSLRDLGVKISEQQAEKILKSMDKNGTMTIDWNEWRDYHLLHPVENIPEIILYWKHSTIFDVGENLTVPDEFTVEERQTGMWWRHLVAGGGAGAVSRTCTAPLDRLKVLMQVHASRSNNMGIVGGFTQMIREGGARSLWRGNGINVLKIAPESAIKFMAYEQIKRLVGSDQETLRIHERLVAGSLAGAIAQSSIYPMEVLKTRMALRKTGQYSGMLDCARRILAREGVAAFYKGYVPNMLGIIPYAGIDLAVYETLKNAWLQHYAVNSADPGVFVLLACGTMSSTCGQLASYPLALVRTRMQAQASIEGAPEVTMSSLFKHILRTEGAFGLYRGLAPNFMKVIPAVSISYVVYENLKITLGVQSR

SEQ ID NO: 4313 - protein, 501 aa, Homo sapiens
MLQMLWHFLASFFPRAGCHGSREGDDREVRGTPAPAWRDQMASFLGKQDGRAEATEKRPTILLVVGPAEQFPKKIVQAGDKDLDGQLDFEEFVHYLQDHEKKLRLVFKSLDKKNDGRIDAQEIMQSLRDLGVKISEQQAEKILKRIRTGHFWGPVTYMDKNGTMTIDWNEWRDYHLLHPVENIPEIILYWKHSTIFDVGENLTVPDEFTVEERQTGMWWRHLVAGGGAGAVSRTCTAPLDRLKVLMQVHASRSNNMGIVGGFTQMIREGGARSLWRGNGINVLKIAPESAIKFMAYEQIKRLVGSDQETLRIHERLVAGSLAGAIAQSSIYPMEVLKTRMALRKTGQYSGMLDCARRILAREGVAAFYKGYVPNMLGIIPYAGIDLAVYETLKNAWLQHYAVNSADPGVFVLLACGTMSSTCGQLASYPLALVRTRMQAQASIEGAPEVTMSSLFKHILRTEGAFGLYRGLAPNFMKVIPAVSISYVVYENLKITLGVQSR

SEQ ID NO: 4314 - protein, 366 aa, Homo sapiens
MQSLRDLGVKISEQQAEKILKSMDKNGTMTIDWNEWRDYHLLHPVENIPEIILYWKHSTIFDVGENLTVPDEFTVEERQTGMWWRHLVAGGGAGAVSRTCTAPLDRLKVLMQVHASRSNNMGIVGGFTQMIREGGARSLWRGNGINVLKIAPESAIKFMAYEQIKRLVGSDQETLRIHERLVAGSLAGAIAQSSIYPMEVLKTRMALRKTGQYSGMLDCARRILAREGVAAFYKGYVPNMLGIIPYAGIDLAVYETLKNAWLQHYAVNSADPGVFVLLACGTMSSTCGQLASYPLALVRTRMQAQASIEGAPEVTMSSLFKHILRTEGAFGLYRGLAPNFMKVIPAVSISYVVYENLKITLGVQSR

SEQ ID NO: 4315 - protein, 204 aa, Homo sapiens
MGAVTDDEVIRKRLLIDGDGAGDDRRINLLVKSFIKWCNSGSQEEGYSQYQRMLSTLSQCEFSMGKTLLVYDMNLREMENYEKIYKEIECSIAGAHEKIAECKKQILQAKRIRKNRQEYDALAKVIQHHPDRHETLKELEALGKELEHLSHIKESVEDKLELRRKQFHVLLSTIHELQQTLENDEKLSEVEEAQEASMETDPKP

SEQ ID NO: 4316 - protein, 684 aa, Homo sapiens
MMDASKELQVLHIDFLNQDNAVSHHTWEFQTSSPVFRRGQVFHLRLVLNQPLQSYHQLKLEFSTGPNPSIAKHTLVVLDPRTPSDHYNWQATLQNESGKEVTVAVTSSPNAILGKYQLNVKTGNHILKSEENILYLLFNPWCKEDMVFMPDEDERKEYILNDTGCHYVGAARSIKCKPWNFGQFEKNVLDCCISLLTESSLKPTDRRDPVLVCRAMCAMMSFEKGQGVLIGNWTGDYEGGTAPYKWTGSAPILQQYYNTKQAVCFGQCWVFAGILTTVLRALGIPARSVTGFDSAHDTERNLTVDTYVNENGEKITSMTHDSVWNFHVWTDAWMKRPDLPKGYDGWQAVDATPQERSQGVFCCGPSPLTAIRKGDIFIVYDTRFVFSEVNGDRLIWLVKMVNGQEELHVISMETTSIGKNISTKAVGQDRRRDITYEYKYPEGSSEERQVMDHAFLLLSSEREHRRPVKENFLHMSVQSDDVLLGNSVNFTVILKRKTAALQNVNILGSFELQLYTGKKMAKLCDLNKTSQIQGQVSEVTLTLDSKTYINSLAILDDEPVIRGFIIAEIVESKEIMASEVFTSFQYPEFSIELPNTGRIGQLLVCNCIFKNTLAIPLTDVKFSLESLGISSLQTSDHGTVQPGETIQSQIKCTPIKTGPKKFIVKLSSKQVKEINAQKIVLITK

SEQ ID NO: 4317 - protein, 127 aa, Homo sapiens
MPKSKELVSSSSSGSDSDSEVDKKLKRKKQVAPEKPVKKQKTGETSRALSSSKQSSSSRDDNMFQIGKMRYVSVRDFKGKVLIDIREYWMDPEGEMKPGRKGISLNPEQWSQLKEQISDIDDAVRKL

SEQ ID NO: 4318 - protein, 720 aa, Homo sapiens
MAQGLEVALTDLQSSRNNVRHHTEEITVDHLLVRRGQAFNLTLYFRNRSFQPGLDNIIFVVETGPLPDLALGTRAVFSLARHHSPSPWIAWLETNGATSTEVSLCAPPTAAVGRYLLKIHIDSFQGSVTAYQLGEFILLFNPWCPEDAVYLDSEPQRQEYVMNDYGFIYQGSKNWIRPCPWNYGQFEDKIIDICLKLLDKSLHFQTDPATDCALRGSPVYVSRVVCAMINSNDDNGVLNGNWSENYTDGANPAEWTGSVAILKQWNATGCQPVRYGQCWVFAAVMCTVMRCLGIPTRVITNFDSGHDTDGNLIIDEYYDNTGRILGNKKKDTIWNFHVWNECWMARKDLPPAYGGWQVLDATPQEMSNGVYCCGPASVRAIKEGEVDLNYDTPFVFSMVNADCMSWLVQGGKEQKLHQDTSSVGNFISTKSIQSDERDDITENYKYEEGSLQERQVFLKALQKLKARSFHGSQRGAELQPSRPTSLSQDSPRSLHTPSLRPSDVVQVSLKFKLLDPPNMGQDICFVLLALNMSSQFKDLKVNLSAQSLLHDGSPLSPFWQDTAFITLSPKEAKTYPCKISYSQYSQYLSTDKLIRISALGEEKSSPEKILVNKIITLSYPSITINVLGAAVVNQPLSIQVIFSNPLSEQVEDCVLTVEGSGLFKKQQKVFLGVLKPQHQASIILETVPFKSGQRQIQANMRSNKFKDIKGYRNVYVDFAL

SEQ ID NO: 4319 - protein, 638 aa, Homo sapiens
MAQGLEVALTDLQSSRNNVRHHTEEITVDHLLVRRGQAFNLTLYFRNRSFQPGLDNIIFVVETEDAVYLDSEPQRQEYVMNDYGFIYQGSKNWIRPCPWNYGQFEDKIIDICLKLLDKSLHFQTDPATDCALRGSPVYVSRVVCAMINSNDDNGVLNGNWSENYTDGANPAEWTGSVAILKQWNATGCQPVRYGQCWVFAAVMCTVMRCLGIPTRVITNFDSGHDTDGNLIIDEYYDNTGRILGNKKKDTIWNFHVWNECWMARKDLPPAYGGWQVLDATPQEMSNGVYCCGPASVRAIKEGEVDLNYDTPFVFSMVNADCMSWLVQGGKEQKLHQDTSSVGNFISTKSIQSDERDDITENYKYEEGSLQERQVFLKALQKLKARSFHGSQRGAELQPSRPTSLSQDSPRSLHTPSLRPSDVVQVSLKFKLLDPPNMGQDICFVLLALNMSSQFKDLKVNLSAQSLLHDGSPLSPFWQDTAFITLSPKEAKTYPCKISYSQYSQYLSTDKLIRISALGEEKSSPEKILVNKIITLSYPSITINVLGAAVVNQPLSIQVIFSNPLSEQVEDCVLTVEGSGLFKKQQKVFLGVLKPQHQASIILETVPFKSGQRQIQANMRSNKFKDIKGYRNVYVDFAL

SEQ ID NO: 4320 - protein, 689 aa, Homo sapiens
MKPPAACAGDMADAASPCSVVNDLRWDLSAQQIEERTRELIEQTKRVYDQVGTQEFEDVSYESTLKALADVEVTYTVQRNILDFPQHVSPSKDIRTASTEADKKLSEFDVEMSMREDVYQRIVWLQEKVQKDSLRPEAARYLERLIKLGRRNGLHLPRETQENIKRIKKKLSLLCIDFNKNLNEDTTFLPFTLQELGGLPEDFLNSLEKMEDGKLKVTLKYPHYFPLLKKCHVPETRRKVEEAFNCRCKEENCAILKELVTLRAQKSRLLGFHTHADYVLEMNMAKTSQTVATFLDELAQKLKPLGEQERAVILELKRAECERRGLPFDGRIRAWDMRYYMNQVEETRYCVDQNLLKEYFPVQVVTHGLLGIYQELLGLAFHHEEGASAWHEDVRLYTARDAASGEVVGKFYLDLYPREGKYGHAACFGLQPGCLRQDGSRQIAIAAMVANFTKPTADAPSLLQHDEVETYFHEFGHVMHQLCSQAEFAMFSGTHVERDFVEAPSQMLENWVWEQEPLLRMSRHYRTGSAVPRELLEKLIESRQANTGLFNLRQIVLAKVDQALHTQTDADPAEEYARLCQEILGVPATPGTNMPATFGHLAGGYDAQYYGYLWSEVYSMDMFHTRFKQEGVLNSKVGMDYRSCILRPGGSEDASAMLRRFLGRDPKQDAFLLSKGLQVGGCEPEPQVC

SEQ ID NO: 4321 - protein, 258 aa, Homo sapiens
MFSGTHVERDFVEAPSQMLENWVWEQEPLLRMSRHYRTGSAVPRELLEKLIESRQANTGLFNLRQIVLAKVDQALHTQTDADPAEEYARLCQEILGVPATPGTNMPATFGHLAGGYDAQYYGYLWSEVYSMDMFHTRFKQEGVLNSKFPHYEVRPLRHVSLCLPLTWCDPGSGQPPESLTRNRWLPALRAGPALPGCNIALGSLQVGMDYRSCILRPGGSEDASAMLRRFLGRDPKQDAFLLSKGLQVGGCEPEPQVC

SEQ ID NO: 4322 - protein, 710 aa, Homo sapiens
MDQVATLRLESVDLQSSRNNKEHHTQEMGVKRLTVRRGQPFYLRLSFSRPFQSQNDHITFVAETGPKPSELLGTRATFFLTRVQPGNVWSASDFTIDSNSLQVSLFTPANAVIGHYTLKIEISQGQGHSVTYPLGTFILLFNPWSPEDDVYLPSEILLQEYIMRDYGFVYKGHERFITSWPWNYGQFEEDIIDICFEILNKSLYHLKNPAKDCSQRNDVVYVCRVVSAMINSNDDNGVLQGNWGEDYSKGVSPLEWKGSVAILQQWSARGGQPVKYGQCWVFASVMCTVMRCLGVPTRVVSNFRSAHNVDRNLTIDTYYDRNAEMLSTQKRDKIWNFHVWNECWMIRKDLPPGYNGWQVLDPTPQQTSSGLFCCGPASVKAIREGDVHLAYDTPFVYAEVNADEVIWLLGDGQAQEILAHNTSSIGKEISTKMVGSDQRQSITSSYKYPEGSPEERAVFMKASRKMLGPQRASLPFLDLLESGGLRDQPAQLQLHLARIPEWGQDLQLLLRIQRVPDSTHPRGPIGLVVRFCAQALLHGGGTQKPFWRHTVRMNLDFGKETQWPLLLPYSNYRNKLTDEKLIRVSGIAEVEETGRSMLVLKDICLEPPHLSIEVSERAEVGKALRVHVTLTNTLMVALSSCTMVLEGSGLINGQIAKDLGTLVAGHTLQIQLDLYPTKAGPRQLQVLISSNEVKEIKGYKDIFVTVAGAP

SEQ ID NO: 4323 - protein, 1907 aa, Homo sapiens
MAAAPGLLVWLLVLRLPWRVPGQLDPSTGRRFSEHKLCADDECSMLMYRGEALEDFTGPDCRFVNFKKGDPVYVYYKLARGWPEVWAGSVGRTFGYFPKDLIQVVHEYTKEELQVPTDETDFVCFDGGRDDFHNYNVEELLGFLELYNSAATDSEKAVEKTLQDMEKNPELSKEREPEPEPVEANSEESDSVFSENTEDLQEQFTTQKHHSHANSQANHAQGEQASFESFEEMLQDKLKVPESENNKTSNSSQVSNEQDKIDAYKLLKKEMTLDLKTKFGSTADALVSDDETTRLVTSLEDDFDEELDTEYYAVGKEDEENQEDFDELPLLTFTDGEDMKTPAKSGVEKYPTDKEQNSNEEDKVQLTVPPGIKNDDKNILTTWGDTIFSIVTGGEETRDTMDLESSSSEEEKEDDDDALVPDSKQGKPQSATDYSDPDNVDDGLFIVDIPKTNNDKEVNAEHHIKGKGRGVQESKRGLVQDKTELEDENQEGMTVHSSVHSNNLNSMPAAEKGKDTLKSAYDDTENDLKGAAIHISKGMLHEEKPGEQILEGGSESESAQKAAGNQMNDRKIQQESLGSAPLMGDDHPNASRDSVEGDALVNGAKLHTLSVEHQREELKEELVLKTQNQPRFSSPDEIDLPRELEDEVPILGRNLPWQQERDVAATASKQMSEKIRLSEGEAKEDSLDEEFFHHKAMQGTEVGQTDQTDSTGGPAFLSKVEEDDYPSEELLEDENAINAKRSKEKNPGNQGRQFDVNLQVPDRAVLGTIHPDPEIEESKQETSMILDSEKTSETAAKGVNTGGREPNTMVEKERPLADKKAQRPFERSDFSDSIKIQTPELGEVFQNKDSDYLKNDNPEEHLKTSGLAGEPEGELSKEDHENTEKYMGTESQGSAAAEPEDDSFHWTPHTSVEPGHSDKREDLLIISSFFKEQQSLQRFQKYFNVHELEALLQEMSSKLKSAQQESLPYNMEKVLDKVFRASESQILSIAEKMLDTRVAENRDLGMNENNIFEEAAVLDDIQDLIYFVRYKHSTAEETATLVMAPPLEEGLGGAMEEMQPLHEDNFSREKTAELNVQVPEEPTHLDQRVIGDTHASEVSQKPNTEKDLDPGPVTTEDTPMDAIDANKQPETAAEEPASVTPLENAILLIYSFMFYLTKSLVATLPDDVQPGPDFYGLPWKPVFITAFLGIASFAIFLWRTVLVVKDRVYQVTEQQISEKLKTIMKENTELVQKLSNYEQKIKESKKHVQETRKQNMILSDEAIKYKDKIKTLEKNQEILDDTAKNLRVMLESEREQNVKNQDLISENKKSIEKLKDVISMNASEFSEVQIALNEAKLSEEKVKSECHRVQEENARLKKKKEQLQQEIEDWSKLHAELSEQIKSFEKSQKDLEVALTHKDDNINALTNCITQLNLLECESESEGQNKGGNDSDELANGEVGGDRNEKMKNQIKQMMDVSRTQTAISVVEEDLKLLQLKLRASVSTKCNLEDQVKKLEDDRNSLQAAKAGLEDECKTLRQKVEILNELYQQKEMALQKKLSQEEYERQEREHRLSAADEKAVSAAEEVKTYKRRIEEMEDELQKTERSFKNQIATHEKKAHENWLKARAAERAIAEEKREAANLRHKLLELTQKMAMLQEEPVIVKPMPGKPNTQNPPRRGPLSQNGSFGPSPVSGGECSPPLTVEPPVRPLSATLNRRDMPRSEFGSVDGPLPHPRWSAEASGKPSPSDPGSGTATMMNSSSRGSSPTRVLDEGKVNMAPKGPPPFPGVPLMSTPMGGPVPPPIRYGPPPQLCGPFGPRPLPPPFGPGMRPPLGLREFAPGVPPGRRDLPLHPRGFLPGHAPFRPLGSLGPREYFIPGTRLPPPTHGPQEYPPPPAVRDLLPSGSRDEPPPASQSTSQDCSQALKQSP

SEQ ID NO: 4324 - protein, 1848 aa, Homo sapiens
MAAAPGLLVWLLVLRLPWRVPGQLDPSTGRRFSEHKLCADDECSMLMYRGEALEDFTGPDCRFVNFKKGDPVYVYYKLARGWPEVWAGSVGRTFGYFPKDLIQVVHEYTKEELQVPTDETDFVCFDGGRDDFHNYNVEELLGFLELYNSAATDSEKAVEKTLQDMEKNPELSKEREPEPEPVEANSEESDSVFSENTEDLQEQFTTQKHHSHANSQANHAQGEQASFESFEEMLQDKLKVPESENNKTSNSSQVSNEQDKIDAYKLLKKEMTLDLKTKFGSTADALVSDDETTRLVTSLEDDFDEELDTEYYAVGKEDEENQEDFDELPLLTFTDGEDMKTPAKSGVEKYPTDKEQNSNEEDKVQLTVPPGIKNDDKNILTTWGDTIFSIVTGGEETRDTMDLESSSSEEEKEDDDDALVPDSKQGKPQSATDYSDPDNVDDGLFIVDIPKTNNDKEVNAEHHIKGKGRGVQESKRGLVQDKTELEDENQEGMTVHSSVHSNNLNSMPAAEKGKDTLKSAYDDTENDLKGAAIHISKGMLHEEKPGEQILEGGSESESAQKAAGNQMNDRKIQQESLGSAPLMGDDHPNASRDSVEGDALVNGAKLHTLSVEHQREELKEELVLKTQNQPRFSSPDEIDLPRELEDEVPILGRNLPWQQERDVAATASKQMSEKIRLSEGEAKEDSLDEEFFHHKAMQGTEVGQTDQTDSTGGPAFLSKVEEDDYPSEELLEDENAINAKRSKEKNPGNQGRQFDVNLQVPDRAVLGTIHPDPEIEESKQETSMILDSEKTSETAAKGVNTGGREPNTMVEKERPLADKKAQRPFERSDFSDSIKIQTPELGEVFQNKDSDYLKNDNPEEHLKTSGLAGEPEGELSKEDHENTEKYMGTESQGSAAAEPEDDSFHWTPHTSVEPGHSDKREDLLIISSFFKEQQSLQRFQKYFNVHELEALLQEMSSKLKSAQQESLPYNMEKVLDKVFRASESQILSIAEKMLDTRVAENRDLGMNENNIFEEAAVLDDIQDLIYFVRYKHSTAEETATLVMAPPLEEGLGGAMEEMQPLHEDNFSREKTAELNVQVPEEPTHLDQRVIGDTHASEVSQKPNTEKDLDPGPVTTEDTPMDAIDANKQPETAAEEPASVTPLENAILLIYSFMFYLTKSLVATLPDDVQPGPDFYGLPWKPVFITAFLGIASFAIFLWRTVLVVKDRVYQVTEQQISEKLKTIMKENTELVQKLSNYEQKIKESKKHVQETRKQNMILSDEAIKYKDKIKTLEKNQEILDDTAKNLRVMLESEREQNVKNQDLLQQEIEDWSKLHAELSEQIKSFEKSQKDLEVALTHKDDNINALTNCITQLNLLECESESEGQNKGGNDSDELANGEVGGDRNEKMKNQIKQMMDVSRTQTAISVVEEDLKLLQLKLRASVSTKCNLEDQVKKLEDDRNSLQAAKAGLEDECKTLRQKVEILNELYQQKEMALQKKLSQEEYERQEREHRLSAADEKAVSAAEEVKTYKRRIEEMEDELQKTERSFKNQIATHEKKAHENWLKARAAERAIAEEKREAANLRHKLLELTQKMAMLQEEPVIVKPMPGKPNTQNPPRRGPLSQNGSFGPSPVSGGECSPPLTVEPPVRPLSATLNRRDMPRSEFGSVDGPLPHPRWSAEASGKPSPSDPGSGTATMMNSSSRGSSPTRVLDEGKVNMAPKGPPPFPGVPLMSTPMGGPVPPPIRYGPPPQLCGPFGPRPLPPPFGPGMRPPLGLREFAPGVPPGRRDLPLHPRGFLPGHAPFRPLGSLGPREYFIPGTRLPPPTHGPQEYPPPPAVRDLLPSGSRDEPPPASQSTSQDCSQALKQSP

SEQ ID NO: 4325 - protein, 500 aa, Homo sapiens
MAAAPGLLVWLLVLRLPWRVPGQLDPSTGRRFSEHKLCADDECSMLMYRGEALEDFTGPDCRFVNFKKGDPVYVYYKLARGWPEVWAGSVGRTFGYFPKDLIQVVHEYTKEELQVPTDETDFVCFDGGRDDFHNYNVEELLGFLELYNSAATDSEKAVEKTLQDMEKNPELSKEREPEPEPVEANSEESDSVFSENTEDLQEQFTTQKHHSHANSQANHAQGEQASFESFEEMLQDKLKVPESENNKTSNSSQVSNEQDKIDAYKLLKKEMTLDLKTKFGSTADALVSDDETTRLVTSLEDDFDEELDTEYYAVGKEDEENQEDFDELPLLTFTDGEDMKTPAKSGVEKYPTDKEQNSNEEDKVQLTVPPGIKNDDKNILTTWGDTIFSIVTGGEETRDTMDLESSSSEEEKEDDDDALVPDSKQGKPQSATDYSDPDNVDDGLFIVDIPKTNNDKEVNAEHHIKGKGRGVQESKRGLVQDKTELEDENQEGFKTEPIKL

SEQ ID NO: 4326 - protein, 785 aa, Homo sapiens
MDSVPATVPSIAATPGDPELVGPLSVLYAAFIAKLLELVATLPDDVQPGPDFYGLPWKPVFITAFLGIASFAIFLWRTVLVVKDRVYQVTEQQISEKLKTIMKENTELVQKLSNYEQKIKESKKHVQETRKQNMILSDEAIKYKDKIKTLEKNQEILDDTAKNLRVMLESEREQNVKNQDLISENKKSIEKLKDVISMNASEFSEVQIALNEAKLSEEKVKSECHRVQEENARLKKKKEQLQQEIEDWSKLHAELSEQIKSFEKSQKDLEVALTHKDDNINALTNCITQLNLLECESESEGQNKGGNDSDELANGEVGGDRNEKMKNQIKQMMDVSRTQTAISVVEEDLKLLQLKLRASVSTKCNLEDQVKKLEDDRNSLQAAKAGLEDECKTLRQKVEILNELYQQKEMALQKKLSQEEYERQEREHRLSAADEKAVSAAEEVKTYKRRIEEMEDELQKTERSFKNQIATHEKKAHENWLKARAAERAIAEEKREAANLRHKLLELTQKMAMLQEEPVIVKPMPGKPNTQNPPRRGPLSQNGSFGPSPVSGGECSPPLTVEPPVRPLSATLNRRDMPRSEFGSVDGPLPHPRWSAEASGKPSPSDPGSGTATMMNSSSRGSSPTRVLDEGKVNMAPKGPPPFPGVPLMSTPMGGPVPPPIRYGPPPQLCGPFGPRPLPPPFGPGMRPPLGLREFAPGVPPGRRDLPLHPRGFLPGHAPFRPLGSLGPREYFIPGTRLPPPTHGPQEYPPPPAVRDLLPSGSRDEPPPASQSTSQDCSQALKQSP

SEQ ID NO: 4327 - protein, 556 aa, Homo sapiens
MEGPLSVFGDRSTGETIRSQNVMAAASIANIVKSSLGPVGLDKMLVDDIGDVTITNDGATILKLLEVEHPAAKVLCELADLQDKEVGDGTTSVVIIAAELLKNADELVKQKIHPTSVISGYRLACKEAVRYINENLIVNTDELGRDCLINAAKTSMSSKIIGINGDFFANMVVDAVLAIKYTDIRGQPRYPVNSVNILKAHGRSQMESMLISGYALNCVVGSQGMPKRIVNAKIACLDFSLQKTKMKLGVQVVITDPEKLDQIRQRESDITKERIQKILATGANVILTTGGIDDMCLKYFVEAGAMAVRRVLKRDLKRIAKASGATILSTLANLEGEETFEAAMLGQAEEVVQERICDDELILIKNTKARTSASIILRGANDFMCDEMERSLHDALCVVKRVLESKSVVPGGGAVEAALSIYLENYATSMGSREQLAIAEFARSLLVIPNTLAVNAAQDSTDLVAKLRAFHNEAQVNPERKNLKWIGLDLSNGKPRDNKQAGVFEPTIVKVKSLKFATEAAITILRIDDLIKLHPESKDDKHGSYEDAVHSGALND

SEQ ID NO: 4328 - protein, 437 aa, Homo sapiens
MRFVVALVLLNVAAAGAVPLLATESVKQEEAGVRPSAGNVSTHPSLSQRPGGSTKSHPEPQTPKDSPSKSSAEAQTPEDTPNKSGAEAKTQKDSSNKSGAEAKTQKGSTSKSGSEAQTTKDSTSKSHPELQTPKDSTGKSGAEAQTPEDSPNRSGAEAKTQKDSPSKSGSEAQTTKDVPNKSGADGQTPKDGSSKSGAEDQTPKDVPNKSGAEKQTPKDGSNKSGAEEQGPIDGPSKSGAEEQTSKDSPNKVVPEQPSRKDHSKPISNPSDNKELPKADTNQLADKGKLSPHAFKTESGEETDLISPPQEEVKSSEPTEDVEPKEAEDDDTGPEEGSPPKEEKEKMSGSASSENREGTLSDSTGSEKDDLYPNGSGNGSAESSHFFAYLVTAAILVAVLYIAHHNKRKIIAFVLEGKRSKVTRRPKASDYQRLDQKS

SEQ ID NO: 4329 - protein, 453 aa, Homo sapiens
MRFVVALVLLNVAAAGAVPLLATESVKQEEAGVRPSAGNVSTHPSLSQRPGGSTKSHPEPQTPKDSPSKSSAEAQTPEDTPNKSGAEAKTQKDSSNKSGAEAKTQKGSTSKSGSEAQTTKDSTSKSHPELQTPKDSTGKSGAEAQTPEDSPNRSGAEAKTQKDSPSKSGSEAQTTKDVPNKSGADGQTPKDGSSKSGAEDQTPKDVPNKSGAEKQTPKDGSNKSGAEEQGPIDGPSKSGAEEQTSKDSPNKVVPEQPSRKDHSKPISNPSDNKELPKADTNQLADKGKLSPHAFKTESGEETDLISPPQEEVKSSEPTEDVEPKEAEDDDTGPEEGSPPKEEKEKMSGSASSENREGTLSDSTGSEKDDLYPNGSGNGSAESSHFFAYLVTAAILVAVLYIAHHNKRKIIAFVLEGKRSKVTRRPKASDYQRLDQKIFSPPSPNRMVYSSGKR

SEQ ID NO: 4330 - protein, 379 aa, Homo sapiens
MRFVVALVLLNVAAAGAVPLLATESVKQEEAGVRPSAGNVSTHPSLSQRPGGSTKSHPEPQTPKDSPSKSSAEAQTPEDTPNKSGAEAKTQKDSSNKSGAEAKTQKGSTSKSGSEAQTTKDSTSKSHPELQTPKDSTGKSGAEAQTPEDSPNRSGAEAKTQKDSPSKSGSEAQTTKDVPNKSGADGQTPKDGSSKSGAEDQTPKDVPNKSGAEKQTPKDGSNKSGAEEQGPIDGPSKSGAEEQTSKDSPNKEEVKSSEPTEDVEPKEAEDDDTGPEEGSPPKEEKEKMSGSASSENREGTLSDSTGSEKDDLYPNGSGNGSAESSHFFAYLVTAAILVAVLYIAHHNKRKIIAFVLEGKRSKVTRRPKASDYQRLDQKS

SEQ ID NO: 4331 - protein, 447 aa, Homo sapiens
MRFVVALVLLNVAAAGAVPLLATESVKQEEAGVRPSAGNVSTHPSLSQRPGGSTKSHPEPQTPKDSPSKSSAEAQTPEDTPNKSGAEAKTQKDSSNKSGAEAKTQKGSTSKSGSEAQTTKDSTSKSHPELQTPKDSTGKSGAEAQTPEDSPNRSGAEAKTQKDSPSKSGSEAQTTKDVPNKSGADGQTPKDGSSKSGAEDQTPKDVPNKSGAEKQTPKDGSNKSGAEEQGPIDGPSKSGAEEQTSKDSPNKVVPEQPSRKDHSKPISNPSDNKELPKADTNQLADKGKLSPHAFKTESGEETDLISPPQEEVKSSEPTEDVEPKEAEDDDTGPEEGSPPKEEKEKMSGSASSENREGTLSDSTGSEKDDLYPNGSGNGSAESSHFFAYLVTAAILVAVLYIAHHNKRKIIAFVLEGKRSKVTRRPKASDYQRLDQKVRKEEPGPWEG

SEQ ID NO: 4332 - protein, 281 aa, Homo sapiens
MRFVVALVLLNVAAAGAVPLLATESVKQEEAGVRPSAGNVSTHPSLSQRPGGSTKSHPEPQTPKDSPSKSGSEAQTTKDVPNKSGADGQTPKDGSSKSGAEDQTPKDVPNKSGAEKQTPKDGSNKSGAEEQGPIDGPSKSGAEEQTSKDSPNKEEVKSSEPTEDVEPKEAEDDDTGPEEGSPPKEEKEKMSGSASSENREGTLSDSTGSEKDDLYPNGSGNGSAESSHFFAYLVTAAILVAVLYIAHHNKRKIIAFVLEGKRSKVTRRPKASDYQRLDQKS

SEQ ID NO: 4333 - protein, 454 aa, Homo sapiens
MRFVVALVLLNVAAAGAVPLLATESVKQEEAGVRPSAGNVSTHPSLSQRPGGSTKSHPEPQTPKDSPSKSSAEAQTPEDTPNKSGAEAKTQKDSSNKSGAEAKTQKGSTSKSGSEAQTTKDSTSKSHPELQTPKDSTGKSGAEAQTPEDSPNRSGAEAKTQKDSPSKSGSEAQTTKDVPNKSGADGQTPKDGSSKSGAEDQTPKDVPNKSGAEKQTPKDGSNKSGAEEQGPIDGPSKSGAEEQTSKDSPNKVVPEQPSRKDHSKPISNPSDNKELPKADTNQLADKGKLSPHAFKTESGEETDLISPPQEEVKSSEPTEDVEPKEAEDDDTGPEEGSPPKEEKEKMSGSASSENREGTLSDSTGSEKDDLYPNGSGNGSAESSHFFAYLVTAAILVAVLYIAHHNKRKIIAFVLEGKRSKVTRRPKASDYQRLDQKYVLILNVFPAPPKRSFFP

SEQ ID NO: 4334 - protein, 427 aa, Homo sapiens
MAVLAALLRSGARSRSPLLRRLVQEIRYVERSYVSKPTLKEVVIVSATRTPIGSFLGSLSLLPATKLGSIAIQGAIEKAGIPKEEVKEAYMGNVLQGGEGQAPTRQAVLGAGLPISTPCTTINKVCASGMKAIMMASQSLMCGHQDVMVAGGMESMSNVPYVMNRGSTPYGGVKLEDLIVKDGLTDVYNKIHMGSCAENTAKKLNIARNEQDAYAINSYTRSKAAWEAGKFGNEVIPVTVTVKGQPDVVVKEDEEYKRVDFSKVPKLKTVFQKENGTVTAANASTLNDGAAALVLMTADAAKRLNVTPLARIVAFADAAVEPIDFPIAPVYAASMVLKDVGLKKEDIAMWEVNEAFSLVVLANIKMLEIDPQKVNINGGAVSLGHPIGMSGARIVGHLTHALKQGEYGLASICNGGGGASAMLIQKL

SEQ ID NO: 4335 - protein, 162 aa, Homo sapiens
MAVLAALLRSGARSRSPLLRRLVQEIRYVERSYVSKPTLKEVVIVSATRTPIGSFLGSLSLLPATKLGSIAIQGAIEKAGIPKEEVKEAYMGNVLQGGEGQAPTRQAVLGAGLPISTPCTTINKVCASGMKAIMMASQSLMCGHQIKQETGSLAKICCHVRR

SEQ ID NO: 4336 - protein, 316 aa, Homo sapiens
MGESAAATASLFQRRRRGRGGRVTFPGGLKGSARFLSFGPPFPAPPAPPFPAAPGPWLRRPLFSLKLSDTEDVFPRRAGPLEVPADSRVFVQAALARPSPRWGLALHRCSVTPSSRPAPGPALALLREGCPADTSVAFPPPPPPSPGAARPARFSFRLRPVFNASVQFLHCQLSRCRRLRGVRRAPAPLTPPPPPPPSRCLPQDEACADTGSGSAEGLAADGPHLHTLTQPIVVTVPRPPPRPPKSVPGRAVRPEPPAPAPAALEPAPVVALVLAAFVLGAALAAGLGLVCAHSAPHAPGPPARASPSGPQPRRSQ

SEQ ID NO: 4337 - protein, 1132 aa, Homo sapiens
MPRAPRCRAVRSLLRSHYREVLPLATFVRRLGPQGWRLVQRGDPAAFRALVAQCLVCVPWDARPPPAAPSFRQVSCLKELVARVLQRLCERGAKNVLAFGFALLDGARGGPPEAFTTSVRSYLPNTVTDALRGSGAWGLLLRRVGDDVLVHLLARCALFVLVAPSCAYQVCGPPLYQLGAATQARPPPHASGPRRRLGCERAWNHSVREAGVPLGLPAPGARRRGGSASRSLPLPKRPRRGAAPEPERTPVGQGSWAHPGRTRGPSDRGFCVVSPARPAEEATSLEGALSGTRHSHPSVGRQHHAGPPSTSRPPRPWDTPCPPVYAETKHFLYSSGDKEQLRPSFLLSSLRPSLTGARRLVETIFLGSRPWMPGTPRRLPRLPQRYWQMRPLFLELLGNHAQCPYGVLLKTHCPLRAAVTPAAGVCAREKPQGSVAAPEEEDTDPRRLVQLLRQHSSPWQVYGFVRACLRRLVPPGLWGSRHNERRFLRNTKKFISLGKHAKLSLQELTWKMSVRDCAWLRRSPGVGCVPAAEHRLREEILAKFLHWLMSVYVVELLRSFFYVTETTFQKNRLFFYRKSVWSKLQSIGIRQHLKRVQLRELSEAEVRQHREARPALLTSRLRFIPKPDGLRPIVNMDYVVGARTFRREKRAERLTSRVKALFSVLNYERARRPGLLGASVLGLDDIHRAWRTFVLRVRAQDPPPELYFVKVDVTGAYDTIPQDRLTEVIASIIKPQNTYCVRRYAVVQKAAHGHVRKAFKSHVSTLTDLQPYMRQFVAHLQETSPLRDAVVIEQSSSLNEASSGLFDVFLRFMCHHAVRIRGKSYVQCQGIPQGSILSTLLCSLCYGDMENKLFAGIRRDGLLLRLVDDFLLVTPHLTHAKTFLRTLVRGVPEYGCVVNLRKTVVNFPVEDEALGGTAFVQMPAHGLFPWCGLLLDTRTLEVQSDYSSYARTSIRASLTFNRGFKAGRNMRRKLFGVLRLKCHSLFLDLQVNSLQTVCTNIYKILLLQAYRFHACVLQLPFHQQVWKNPTFFLRVISDTASLCYSILKAKNAGMSLGAKGAAGPLPSEAVQWLCHQAFLLKLTRHRVTYVPLLGSLRTAQTQLSRKLPGTTLTALEAAANPALPSDFKTILD

SEQ ID NO: 4338 - protein, 807 aa, Homo sapiens
MPRAPRCRAVRSLLRSHYREVLPLATFVRRLGPQGWRLVQRGDPAAFRALVAQCLVCVPWDARPPPAAPSFRQVSCLKELVARVLQRLCERGAKNVLAFGFALLDGARGGPPEAFTTSVRSYLPNTVTDALRGSGAWGLLLRRVGDDVLVHLLARCALFVLVAPSCAYQVCGPPLYQLGAATQARPPPHASGPRRRLGCERAWNHSVREAGVPLGLPAPGARRRGGSASRSLPLPKRPRRGAAPEPERTPVGQGSWAHPGRTRGPSDRGFCVVSPARPAEEATSLEGALSGTRHSHPSVGRQHHAGPPSTSRPPRPWDTPCPPVYAETKHFLYSSGDKEQLRPSFLLSSLRPSLTGARRLVETIFLGSRPWMPGTPRRLPRLPQRYWQMRPLFLELLGNHAQCPYGVLLKTHCPLRAAVTPAAGVCAREKPQGSVAAPEEEDTDPRRLVQLLRQHSSPWQVYGFVRACLRRLVPPGLWGSRHNERRFLRNTKKFISLGKHAKLSLQELTWKMSVRDCAWLRRSPGVGCVPAAEHRLREEILAKFLHWLMSVYVVELLRSFFYVTETTFQKNRLFFYRKSVWSKLQSIGIRQHLKRVQLRELSEAEVRQHREARPALLTSRLRFIPKPDGLRPIVNMDYVVGARTFRREKRAERLTSRVKALFSVLNYERARRPGLLGASVLGLDDIHRAWRTFVLRVRAQDPPPELYFVKVDVTGAYDTIPQDRLTEVIASIIKPQNTYCVRRYAVVQKAAHGHVRKAFKSHVLRPVPGDPAGLHPLHAALQPVLRRHGEQAVCGDSAGRAAPAFGG

SEQ ID NO: 4339 - protein, 1069 aa, Homo sapiens
MPRAPRCRAVRSLLRSHYREVLPLATFVRRLGPQGWRLVQRGDPAAFRALVAQCLVCVPWDARPPPAAPSFRQVSCLKELVARVLQRLCERGAKNVLAFGFALLDGARGGPPEAFTTSVRSYLPNTVTDALRGSGAWGLLLRRVGDDVLVHLLARCALFVLVAPSCAYQVCGPPLYQLGAATQARPPPHASGPRRRLGCERAWNHSVREAGVPLGLPAPGARRRGGSASRSLPLPKRPRRGAAPEPERTPVGQGSWAHPGRTRGPSDRGFCVVSPARPAEEATSLEGALSGTRHSHPSVGRQHHAGPPSTSRPPRPWDTPCPPVYAETKHFLYSSGDKEQLRPSFLLSSLRPSLTGARRLVETIFLGSRPWMPGTPRRLPRLPQRYWQMRPLFLELLGNHAQCPYGVLLKTHCPLRAAVTPAAGVCAREKPQGSVAAPEEEDTDPRRLVQLLRQHSSPWQVYGFVRACLRRLVPPGLWGSRHNERRFLRNTKKFISLGKHAKLSLQELTWKMSVRDCAWLRRSPGVGCVPAAEHRLREEILAKFLHWLMSVYVVELLRSFFYVTETTFQKNRLFFYRKSVWSKLQSIGIRQHLKRVQLRELSEAEVRQHREARPALLTSRLRFIPKPDGLRPIVNMDYVVGARTFRREKRAERLTSRVKALFSVLNYERARRPGLLGASVLGLDDIHRAWRTFVLRVRAQDPPPELYFVKVDVTGAYDTIPQDRLTEVIASIIKPQNTYCVRRYAVVQKAAHGHVRKAFKSHVSTLTDLQPYMRQFVAHLQETSPLRDAVVIEQSSSLNEASSGLFDVFLRFMCHHAVRIRGKSYVQCQGIPQGSILSTLLCSLCYGDMENKLFAGIRRDGLLLRLVDDFLLVTPHLTHAKTFLSYARTSIRASLTFNRGFKAGRNMRRKLFGVLRLKCHSLFLDLQVNSLQTVCTNIYKILLLQAYRFHACVLQLPFHQQVWKNPTFFLRVISDTASLCYSILKAKNAGMSLGAKGAAGPLPSEAVQWLCHQAFLLKLTRHRVTYVPLLGSLRTAQTQLSRKLPGTTLTALEAAANPALPSDFKTILD

SEQ ID NO: 4340 - protein, 795 aa, Homo sapiens
MPRAPRCRAVRSLLRSHYREVLPLATFVRRLGPQGWRLVQRGDPAAFRALVAQCLVCVPWDARPPPAAPSFRQVSCLKELVARVLQRLCERGAKNVLAFGFALLDGARGGPPEAFTTSVRSYLPNTVTDALRGSGAWGLLLRRVGDDVLVHLLARCALFVLVAPSCAYQVCGPPLYQLGAATQARPPPHASGPRRRLGCERAWNHSVREAGVPLGLPAPGARRRGGSASRSLPLPKRPRRGAAPEPERTPVGQGSWAHPGRTRGPSDRGFCVVSPARPAEEATSLEGALSGTRHSHPSVGRQHHAGPPSTSRPPRPWDTPCPPVYAETKHFLYSSGDKEQLRPSFLLSSLRPSLTGARRLVETIFLGSRPWMPGTPRRLPRLPQRYWQMRPLFLELLGNHAQCPYGVLLKTHCPLRAAVTPAAGVCAREKPQGSVAAPEEEDTDPRRLVQLLRQHSSPWQVYGFVRACLRRLVPPGLWGSRHNERRFLRNTKKFISLGKHAKLSLQELTWKMSVRDCAWLRRSPGVGCVPAAEHRLREEILAKFLHWLMSVYVVELLRSFFYVTETTFQKNRLFFYRKSVWSKLQSIGIRQHLKRVQLRELSEAEVRQHREARPALLTSRLRFIPKPDGLRPIVNMDYVVGARTFRREKRAERLTSRVKALFSVLNYERARRPGLLGASVLGLDDIHRAWRTFVLRVRAQDPPPELYFVKDRLTEVIASIIKPQNTYCVRRYAVVQKAAHGHVRKAFKSHVLRPVPGDPAGLHPLHAALQPVLRRHGEQAVCGDSAGRAAPAFGG

SEQ ID NO: 4341 - protein, 535 aa, Homo sapiens
MASLSLAPVNIFKAGADEERAETARLTSFIGAIAIGDLVKSTLGPKGMDKILLSSGRDASLMVTNDGATILKNIGVDNPAAKVLVDMSRVQDDEVGDGTTSVTVLAAELLREAESLIAKKIHPQTIIAGWREATKAAREALLSSAVDHGSDEVKFRQDLMNIAGTTLSSKLLTHHKDHFTKLAVEAVLRLKGSGNLEAIHIIKKLGGSLADSYLDEGFLLDKKIGVNQPKRIENAKILIANTGMDTDKIKIFGSRVRVDSTAKVAEIEHAEKEKMKEKVERILKHGINCFINRQLIYNYPEQLFGAAGVMAIEHADFAGVERLALVTGGEIASTFDHPELVKLGSCKLIEEVMIGEDKLIHFSGVALGEACTIVLRGATQQILDEAERSLHDALCVLAQTVKDSRTVYGGGCSEMLMAHAVTQLANRTPGKEAVAMESYAKALRMLPTIIADNAGYDSADLVAQLRAAHSEGNTTAGLDMREGTIGDMAILGITESFQVKRQVLLSAAEAAEVILRVDNIIKAAPRKRVPDHHPC

SEQ ID NO: 4342 - protein, 488 aa, Homo sapiens
MDKILLSSGRDASLMVTNDGATILKNIGVDNPAAKVLVDMSRVQDDEVGDGTTSVTVLAAELLREAESLIAKKIHPQTIIAGWREATKAAREALLSSAVDHGSDEVKFRQDLMNIAGTTLSSKLLTHHKDHFTKLAVEAVLRLKGSGNLEAIHIIKKLGGSLADSYLDEGFLLDKKIGVNQPKRIENAKILIANTGMDTDKIKIFGSRVRVDSTAKVAEIEHAEKEKMKEKVERILKHGINCFINRQLIYNYPEQLFGAAGVMAIEHADFAGVERLALVTGGEIASTFDHPELVKLGSCKLIEEVMIGEDKLIHFSGVALGEACTIVLRGATQQILDEAERSLHDALCVLAQTVKDSRTVYGGGCSEMLMAHAVTQLANRTPGKEAVAMESYAKALRMLPTIIADNAGYDSADLVAQLRAAHSEGNTTAGLDMREGTIGDMAILGITESFQVKRQVLLSAAEAAEVILRVDNIIKAAPRKRVPDHHPC

SEQ ID NO: 4343 - protein, 170 aa, Homo sapiens
MASVRIREAKEGDCGDILRLIRELAEFEKLSDQVKISEEALRADGFGDNPFYHCLVAEILPAPGKLLGPCVVGYGIYYFIYSTWKGRTIYLEDIYVMPEYRGQGIGSKIIKKVAEVALDKGCSQFRLAVLDWNQRAMDLYKALGAQDLTEAEGWHFFCFQGEATRKLAGK

SEQ ID NO: 4344 - protein, 749 aa, Homo sapiens
MGRAGAAAVIPGLALLWAVGLGSAAPSPPRLRLSFQELQAWHGLQTFSLERTCCYQALLVDEERGRLFVGAENHVASLNLDNISKRAKKLAWPAPVEWREECNWAGKDIGTECMNFVKLLHAYNRTHLLACGTGAFHPTCAFVEVGHRAEEPVLRLDPGRIEDGKGKSPYDPRHRAASVLVGEELYSGVAADLMGRDFTIFRSLGQRPSLRTEPHDSRWLNEPKFVKVFWIPESENPDDDKIYFFFRETAVEAAPALGRLSVSRVGQICRNDVGGQRSLVNKWTTFLKARLVCSVPGVEGDTHFDQLQDVFLLSSRDHRTPLLYAVFSTSSSIFQGSAVCVYSMNDVRRAFLGPFAHKEGPMHQWVSYQGRVPYPRPGMCPSKTFGTFSSTKDFPDDVIQFARNHPLMYNSVLPTGGRPLFLQVGANYTFTQIAADRVAAADGHYDVLFIGTDVGTVLKVISVPKGSRPSAEGLLLEELHVFEDSAAVTSMQISSKRHQLYVASRSAVAQIALHRCAAHGRVCTECCLARDPYCAWDGVACTRFQPSAKRRFRRQDVRNGDPSTLCSGDSSRPALLEHKVFGVEGSSAFLECEPRSLQARVEWTFQRAGVTAHTQVLAEERTERTARGLLLRRLRRRDSGVYLCAAVEQGFTQPLRRLSLHVLSATQAERLARAEEAAPAAPPGPKLWYRDFLQLVEPGGGGSANSLRMCRPQPALQSLPLESRRKGRNRRTHAPEPRAERGPRSATHW

SEQ ID NO: 4345 - protein, 748 aa, Homo sapiens
MGRAGAAAVIPGLALLWAVGLGSAAPSPPRLRLSFQELQAWHGLQTFSLERTCCYQALLVDEERGRLFVGAENHVASLNLDNISKRAKKLAWPAPVEWREECNWAGKDIGTECMNFVKLLHAYNRTHLLACGTGAFHPTCAFVEVGHRAEEPVLRLDPGRIEDGKGKSPYDPRHRAASVLVGEELYSGVAADLMGRDFTIFRSLGQRPSLRTEPHDSRWLNEPKFVKVFWIPESENPDDDKIYFFFRETAVEAAPALGRLSVSRVGQICRNDVGGQRSLVNKWTTFLKARLVCSVPGVEGDTHFDQLQDVFLLSSRDHRTPLLYAVFSTSSIFQGSAVCVYSMNDVRRAFLGPFAHKEGPMHQWVSYQGRVPYPRPGMCPSKTFGTFSSTKDFPDDVIQFARNHPLMYNSVLPTGGRPLFLQVGANYTFTQIAADRVAAADGHYDVLFIGTDVGTVLKVISVPKGSRPSAEGLLLEELHVFEDSAAVTSMQISSKRHQLYVASRSAVAQIALHRCAAHGRVCTECCLARDPYCAWDGVACTRFQPSAKRRFRRQDVRNGDPSTLCSGDSSRPALLEHKVFGVEGSSAFLECEPRSLQARVEWTFQRAGVTAHTQVLAEERTERTARGLLLRRLRRRDSGVYLCAAVEQGFTQPLRRLSLHVLSATQAERLARAEEAAPAAPPGPKLWYRDFLQLVEPGGGGSANSLRMCRPQPALQSLPLESRRKGRNRRTHAPEPRAERGPRSATHW

SEQ ID NO: 4346 - protein, 771 aa, Homo sapiens [sequence omitted]

SEQ ID NO: 4347 - protein, 2005 aa, Homo sapiens
MAQSVLVPPGPDSFRFFTRESLAAIEQRIAEEKAKRPKQERKDEDDENGPKPNSDLEAGKSLPFIYGDIPPEMVSVPLEDLDPYYINKKTFIVLNKGKAISRFSATPALYILTPFNPIRKLAIKILVHSLFNMLIMCTILTNCVFMTMSNPPDWTKNVEYTFTGIYTFESLIKILARGFCLEDFTFLRDPWNWLDFTVITFAYVTEFVDLGNVSALRTFRVLRALKTISVIPGLKTIVGALIQSVKKLSDVMILTVFCLSVFALIGLQLFMGNLRNKCLQWPPDNSSFEINITSFFNNSLDGNGTTFNRTVSIFNWDEYIEDKSHFYFLEGQNDALLCGNSSDAGQCPEGYICVKAGRNPNYGYTSFDTFSWAFLSLFRLMTQDFWENLYQLTLRAAGKTYMIFFVLVIFLGSFYLINLILAVVAMAYEEQNQATLEEAEQKEAEFQQMLEQLKKQQEEAQAAAAAASAESRDFSGAGGIGVFSESSSVASKLSSKSEKELKNRRKKKKQKEQSGEEEKNDRVRKSESEDSIRRKGFRFSLEGSRLTYEKRFSSPHQSLLSIRGSLFSPRRNSRASLFSFRGRAKDIGSENDFADDEHSTFEDNDSRRDSLFVPHRHGERRHSNVSQASRASRVLPILPMNGKMHSAVDCNGVVSLVGGPSTLTSAGQLLPEGTTTETEIRKRRSSSYHVSMDLLEDPTSRQRAMSIASILTNTMEELEESRQKCPPCWYKFANMCLIWDCCKPWLKVKHLVNLVVMDPFVDLAITICIVLNTLFMAMEHYPMTEQFSSVLSVGNLVFTGIFTAEMFLKIIAMDPYYYFQEGWNIFDGFIVSLSLMELGLANVEGLSVLRSFRLLRVFKLAKSWPTLNMLIKIIGNSVGALGNLTLVLAIIVFIFAVVGMQLFGKSYKECVCKISNDCELPRWHMHDFFHSFLIVFRVLCGEWIETMWDCMEVAGQTMCLTVFMMVMVIGNLVVLNLFLALLLSSFSSDNLAATDDDNEMNNLQIAVGRMQKGIDFVKRKIREFIQKAFVRKQKALDEIKPLEDLNNKKDSCISNHTTIEIGKDLNYLKDGNGTTSGIGSSVEKYVVDESDYMSFINNPSLTVTVPIAVGESDFENLNTEEFSSESDMEESKEKLNATSSSEGSTVDIGAPAEGEQPEVEPEESLEPEACFTEDCVRKFKCCQISIEEGKGKLWWNLRKTCYKIVEHNWFETFIVFMILLSSGALAFEDIYIEQRKTIKTMLEYADKVFTYIFILEMLLKWVAYGFQVYFTNAWCWLDFLIVDVSLVSLTANALGYSELGAIKSLRTLRALRPLRALSRFEGMRVVVNALLGAIPSIMNVLLVCLIFWLIFSIMGVNLFAGKFYHCINYTTGEMFDVSVVNNYSECKALIESNQTARWKNVKVNFDNVGLGYLSLLQVATFKGWMDIMYAAVDSRNVELQPKYEDNLYMYLYFVIFIIFGSFFTLNLFIGVIIDNFNQQKKKFGGQDIFMTEEQKKYYNAMKKLGSKKPQKPIPRPANKFQGMVFDFVTKQVFDISIMILICLNMVTMMVETDDQSQEMTNILYWINLVFIVLFTGECVLKLISLRYYYFTIGWNIFDFVVVILSIVGMFLAELIEKYFVSPTLFRVIRLARIGRILRLIKGAKGIRTLLFALMMSLPALFNIGLLLFLVMFIYAIFGMSNFAYVKREVGIDDMFNFETFGNSMICLFQITTSAGWDGLLAPILNSGPPDCDPDKDHPGSSVKGDCGNPSVGIFFFVSYIIISFLVVVNMYIAVILENFSVATEESAEPLSEDDFEMFYEVWEKFDPDATQFIEFAKLSDFADALDPPLLIAKPNKVQLIAMDLPMVSGDRIHCLDILFAFTKRVLGESGEMDALRIQMEERFMASNPSKVSYEPITTTLKRKQEEVSAIIIQRAYRRYLLKQKVKKVSSIYKKDKGKECDGTPIKEDTLIDKLNENSTPEKTDMTPSTTSPPSYDSVTKPEKEKFEKDKSEKEDKGKDIRESKK

SEQ ID NO: 4348 - protein, 2005 aa, Homo sapiens
MAQSVLVPPGPDSFRFFTRESLAAIEQRIAEEKAKRPKQERKDEDDENGPKPNSDLEAGKSLPFIYGDIPPEMVSVPLEDLDPYYINKKTFIVLNKGKAISRFSATPALYILTPFNPIRKLAIKILVHSLFNMLIMCTILTNCVFMTMSNPPDWTKNVEYTFTGIYTFESLIKILARGFCLEDFTFLRDPWNWLDFTVITFAYVTEFVNLGNVSALRTFRVLRALKTISVIPGLKTIVGALIQSVKKLSDVMILTVFCLSVFALIGLQLFMGNLRNKCLQWPPDNSSFEINITSFFNNSLDGNGTTFNRTVSIFNWDEYIEDKSHFYFLEGQNDALLCGNSSDAGQCPEGYICVKAGRNPNYGYTSFDTFSWAFLSLFRLMTQDFWENLYQLTLRAAGKTYMIFFVLVIFLGSFYLINLILAVVAMAYEEQNQATLEEAEQKEAEFQQMLEQLKKQQEEAQAAAAAASAESRDFSGAGGIGVFSESSSVASKLSSKSEKELKNRRKKKKQKEQSGEEEKNDRVRKSESEDSIRRKGFRFSLEGSRLTYEKRFSSPHQSLLSIRGSLFSPRRNSRASLFSFRGRAKDIGSENDFADDEHSTFEDNDSRRDSLFVPHRHGERRHSNVSQASRASRVLPILPMNGKMHSAVDCNGVVSLVGGPSTLTSAGQLLPEGTTTETEIRKRRSSSYHVSMDLLEDPTSRQRAMSIASILTNTMEELEESRQKCPPCWYKFANMCLIWDCCKPWLKVKHLVNLVVMDPFVDLAITICIVLNTLFMAMEHYPMTEQFSSVLSVGNLVFTGIFTAEMFLKIIAMDPYYYFQEGWNIFDGFIVSLSLMELGLANVEGLSVLRSFRLLRVFKLAKSWPTLNMLIKIIGNSVGALGNLTLVLAIIVFIFAVVGMQLFGKSYKECVCKISNDCELPRWHMHDFFHSFLIVFRVLCGEWIETMWDCMEVAGQTMCLTVFMMVMVIGNLVVLNLFLALLLSSFSSDNLAATDDDNEMNNLQIAVGRMQKGIDFVKRKIREFIQKAFVRKQKALDEIKPLEDLNNKKDSCISNHTTIEIGKDLNYLKDGNGTTSGIGSSVEKYVVDESDYMSFINNPSLTVTVPIAVGESDFENLNTEEFSSESDMEESKEKLNATSSSEGSTVDIGAPAEGEQPEVEPEESLEPEACFTEDCVRKFKCCQISIEEGKGKLWWNLRKTCYKIVEHNWFETFIVFMILLSSGALAFEDIYIEQRKTIKTMLEYADKVFTYIFILEMLLKWVAYGFQVYFTNAWCWLDFLIVDVSLVSLTANALGYSELGAIKSLRTLRALRPLRALSRFEGMRVVVNALLGAIPSIMNVLLVCLIFWLIFSIMGVNLFAGKFYHCINYTTGEMFDVSVVNNYSECKALIESNQTARWKNVKVNFDNVGLGYLSLLQVATFKGWMDIMYAAVDSRNVELQPKYEDNLYMYLYFVIFIIFGSFFTLNLFIGVIIDNFNQQKKKFGGQDIFMTEEQKKYYNAMKKLGSKKPQKPIPRPANKFQGMVFDFVTKQVFDISIMILICLNMVTMMVETDDQSQEMTNILYWINLVFIVLFTGECVLKLISLRYYYFTIGWNIFDFVVVILSIVGMFLAELIEKYFVSPTLFRVIRLARIGRILRLIKGAKGIRTLLFALMMSLPALFNIGLLLFLVMFIYAIFGMSNFAYVKREVGIDDMFNFETFGNSMICLFQITTSAGWDGLLAPILNSGPPDCDPDKDHPGSSVKGDCGNPSVGIFFFVSYIIISFLVVVNMYIAVILENFSVATEESAEPLSEDDFEMFYEVWEKFDPDATQFIEFAKLSDFADALDPPLLIAKPNKVQLIAMDLPMVSGDRIHCLDILFAFTKRVLGESGEMDALRIQMEERFMASNPSKVSYEPITTTLKRKQEEVSAIIIQRAYRRYLLKQKVKKVSSIYKKDKGKECDGTPIKEDTLIDKLNENSTPEKTDMTPSTTSPPSYDSVTKPEKEKFEKDKSEKEDKGKDIRESKK

SEQ ID NO: 4349 - protein, 1007 aa, Homo sapiens
MSRRKQRKPQQLISDCEGPSASENGDASEEDHPQVCAKCCAQFTDPTEFLAHQNACSTDPPVMVIIGGQENPNNSSASSEPRPEGHNNPQVMDTEHSNPPDSGSSVPTDPTWGPERRGEESPGHFLVAATGTAAGGGGGLILASPKLGATPLPPESTPAPPPPPPPPPPPGVGSGHLNIPLILEELRVLQQRQIHQMQMTEQICRQVLLLGSLGQTVGAPASPSELPGTGTASSTKPLLPLFSPIKPVQTSKTLASSSSSSSSSSGAETPKQAFFHLYHPLGSQHPFSAGGVGRSHKPTPAPSPALPGSTDQLIASPHLAFPSTTGLLAAQCLGAARGLEATASPGLLKPKNGSGELSYGEVMGPLEKPGGRHKCRFCAKVFGSDSALQIHLRSHTGERPYKCNVCGNRFTTRGNLKVHFHRHREKYPHVQMNPHPVPEHLDYVITSSGLPYGMSVPPEKAEEEAATPGGGVERKPLVASTTALSATESLTLLSTSAGTATAPGLPAFNKFVLMKAVEPKNKADENTPPGSEGSAISGVAESSTATRMQLSKLVTSLPSWALLTNHFKSTGSFPFPYVLEPLGASPSETSKLQQLVEKIDRQGAVAVTSAASGAPTTSAPAPSSSASSGPNQCVICLRVLSCPRALRLHYGQHGGERPFKCKVCGRAFSTRGNLRAHFVGHKASPAARAQNSCPICQKKFTNAVTLQQHVRMHLGGQIPNGGTALPEGGGAAQENGSEQSTVSGAGSFPQQQSQQPSPEEELSEEEEEEDEEEEEDVTDEDSLAGRGSESGGEKAISVRGDSEEASGAEEEVGTVAAAATAGKEMDSNEKTTQQSSLPPPPPPDSLDQPQPMEQGSSGVLGGKEEGGKPERSSSPASALTPEGEATSVTLVEELSLQEAMRKEPGESSSRKACEVCGQAFPSQAALEEHQKTHPKEGPLFTCVFCRQGFLERATLKKHMLLAHHQVQPFAPHGPQNIAALSLVPGCSPSITSTGLSPFPRKDDPTIP

SEQ ID NO: 4350 - protein, 198 aa, Homo sapiens
MAHESERSSRLGVPCGEPAELGGDASEEDHPQVCAKCCAQFTDPTEFLAHQNACSTDPPVMVIIGGQENPNNSSASSEPRPEGHNNPQVMDTEHSNPPDSGSSVPTDPTWGPERRGEESPGHFLVAATEPVCGIPVKWPAHEALEFQLHLHYHSKPGPTSAVWPRNCGWEGASNNGIQGSQGEDSPPPISASCTQGSA

SEQ ID NO: 4351 - protein, 451 aa, Homo sapiens
MAEAAALVWIRGPGFGCKAVRCASGRCTVRDFIHRHCQDQNVPVENFFVKCNGALINTSDTVQHGAVYSLEPRLCGGKGGFGSMLRALGAQIEKTTNREACRDLSGRRLRDVNHEKAMAEWVKQQAEREAEKEQKRLERLQRKLVEPKHCFTSPDYQQQCHEMAERLEDSVLKGMQAASSKMVSAEISENRKRQWPTKSQTDRGASAGKRRCFWLGMEGLETAEGSNSESSDDDSEEAPSTSGMGFHAPKIGSNGVEMAAKFPSGSQRARVVNTDHGSPEQLQIPVTDSGRHILEDSCAELGESKEHMESRMVTETEETQEKKAESKEPIEEEPTGAGLNKDKETEERTDGERVAEVAPEERENVAVAKLQESQPGNAVIDKETIDLLAFTSVAELELLGLEKLKCELMALGLKCGGTLQERAARLFSVRGLAKEQIDPALFAKPLKGKKK

SEQ ID NO: 4352 - protein, 439 aa, Homo sapiens
MAEAAALVWIRGPGFGCKAVRCASGRCTVRDFIHRHCQDQNVPVENFFVKCNGAVYSLEPRLCGGKGGFGSMLRALGAQIEKTTNREACRDLSGRRLRDVNHEKAMAEWVKQQAEREAEKEQKRLERLQRKLVEPKHCFTSPDYQQQCHEMAERLEDSVLKGMQAASSKMVSAEISENRKRQWPTKSQTDRGASAGKRRCFWLGMEGLETAEGSNSESSDDDSEEAPSTSGMGFHAPKIGSNGVEMAAKFPSGSQRARVVNTDHGSPEQLQIPVTDSGRHILEDSCAELGESKEHMESRMVTETEETQEKKAESKEPIEEEPTGAGLNKDKETEERTDGERVAEVAPEERENVAVAKLQESQPGNAVIDKETIDLLAFTSVAELELLGLEKLKCELMALGLKCGGTLQERAARLFSVRGLAKEQIDPALFAKPLKGKKK

SEQ ID NO: 4353 - protein, 356 aa, Homo sapiens
MEHSLTPVTQCSMELFIVWNPDFAVEKEVLDLCSEHLVLRLRRQPIEKLVEPKHCFTSPDYQQQCHEMAERLEDSVLKGMQAASSKMVSAEISENRKRQWPTKSQTDRGASAGKRRCFWLGMEGLETAEGSNSESSDDDSEEAPSTSGMGFHAPKIGSNGVEMAAKFPSGSQRARVVNTDHGSPEQLQIPVTDSGRHILEDSCAELGESKEHMESRMVTETEETQEKKAESKEPIEEEPTGAGLNKDKETEERTDGERVAEVAPEERENVAVAKLQESQPGNAVIDKETIDLLAFTSVAELELLGLEKLKCELMALGLKCGGTLQERAARLFSVRGLAKEQIDPALFAKPLKGKKK

SEQ ID NO: 4354 - protein, 785 aa, Homo sapiens
MLVAGLLLWASLLTGAWPSFPTQDHLPATPRVRLSFKELKATGTAHFFNFLLNTTDYRILLKDEDHDRMYVGSKDYVLSLDLHDINREPLIIHWAASPQRIEECVLSGKDVNGECGNFVRLIQPWNRTHLYVCGTGAYNPMCTYVNRGRRAQATPWTQTQAVRGRGSRATDGALRPMPTAPRQDYIFYLEPERLESGKGKCPYDPKLDTASALINEELYAGVYIDFMGTDAAIFRTLGKQTAMRTDQYNSRWLNDPSFIHAELIPDSAERNDDKLYFFFRERSAEAPQSPAVYARIGRICLNDDGGHCCLVNKWSTFLKARLVCSVPGEDGIETHFDELQDVFVQQTQDVRNPVIYAVFTSSGSVFRGSAVCVYSMADIRMVFNGPFAHKEGPNYQWMPFSGKMPYPRPGTCPGGTFTPSMKSTKDYPDEVINFMRSHPLMYQAVYPLQRRPLVVRTGAPYRLTTIAVDQVDAADGRYEVLFLGTDRGTVQKVIVLPKDDQELEELMLEEVEVFKDPAPVKTMTISSKRQQLYVASAVGVTHLSLHRCQAYGAACADCCLARDPYCAWDGQACSRYTASSKRRSRRQDVRHGNPIRQCRGFNSNANKNAVESVQYGVAGSAAFLECQPRSPQATVKWLFQRDPGDRRREIRAEDRFLRTEQGLLLRALQLSDRGLYSCTATENNFKHVVTRVQLHVLGRDAVHAALFPPLSMSAPPPPGAGPPTPPYQELAQLLAQPEVGLIHQYCQGYWRHVPPSPREAPGAPRSPEPQDQKKPRNRRHHPPDT

SEQ ID NO: 4355 - protein, 754 aa, Homo sapiens
MLVAGLLLWASLLTGAWPSFPTQDHLPATPRVRLSFKELKATGTAHFFNFLLNTTDYRILLKDEDHDRMYVGSKDYVLSLDLHDINREPLIIHWAASPQRIEECVLSGKDVNGECGNFVRLIQPWNRTHLYVCGTGAYNPMCTYVNRGRRAQDYIFYLEPERLESGKGKCPYDPKLDTASALINEELYAGVYIDFMGTDAAIFRTLGKQTAMRTDQYNSRWLNDPSFIHAELIPDSAERNDDKLYFFFRERSAEAPQSPAVYARIGRICLNDDGGHCCLVNKWSTFLKARLVCSVPGEDGIETHFDELQDVFVQQTQDVRNPVIYAVFTSSGSVFRGSAVCVYSMADIRMVFNGPFAHKEGPNYQWMPFSGKMPYPRPGTCPGGTFTPSMKSTKDYPDEVINFMRSHPLMYQAVYPLQRRPLVVRTGAPYRLTTIAVDQVDAADGRYEVLFLGTDRGTVQKVIVLPKDDQELEELMLEEVEVFKDPAPVKTMTISSKRQQLYVASAVGVTHLSLHRCQAYGAACADCCLARDPYCAWDGQACSRYTASSKRRSRRQDVRHGNPIRQCRGFNSNANKNAVESVQYGVAGSAAFLECQPRSPQATVKWLFQRDPGDRRREIRAEDRFLRTEQGLLLRALQLSDRGLYSCTATENNFKHVVTRVQLHVLGRDAVHAALFPPLSMSAPPPPGAGPPTPPYQELAQLLAQPEVGLIHQYCQGYWRHVPPSPREAPGAPRSPEPQDQKKPRNRRHHPPDT

SEQ ID NO: 4356 - protein, 761 aa, Homo sapiens
MALPALGLDPWSLLGLFLFQLLQLLLPTTTAGGGGQGPMPRVRYYAGDERRALSFFHQKGLQDFDTLLLSGDGNTLYVGAREAILALDIQDPGVPRLKNMIPWPASDRKKSECAFKKKSNETQCFNFIRVLVSYNVTHLYTCGTFAFSPACTFIELQDSYLLPISEDKVMEGKGQSPFDPAHKHTAVLVDGMLYSGTMNNFLGSEPILMRTLGSQPVLKTDNFLRWLHHDASFVAAIPSTQVVYFFFEETASEFDFFERLHTSRVARVCKNDVGGEKLLQKKWTTFLKAQLLCTQPGQLPFNVIRHAVLLPADSPTAPHIYAVFTSQWQVGGTRSSAVCAFSLLDIERVFKGKYKELNKETSRWTTYRGPETNPRPGSCSVGPSSDKALTFMKDHFLMDEQVVGTPLLVKSGVEYTRLAVETAQGLDGHSHLVMYLGTTTGSLHKAVVSGDSSAHLVEEIQLFPDPEPVRNLQLAPTQGAVFVGFSGGVWRVPRANCSVYESCVDCVLARDPHCAWDPESRTCCLLSAPNLNSWKQDMERGNPEWACASGPMSRSLRPQSRPQIIKEVLAVPNSILELPCPHLSALASYYWSHGPAAVPEASSTVYNGSLLLIVQDGVGGLYQCWATENGFSYPVISYWVDSQDQTLALDPELAGIPREHVKVPLTRVSGGAALAAQQSYWPHFVTVTVLFALVLSGALIILVASPLRALRARGKVQGCETLRPGEKAPLSREQHLQSPKECRTSASDVDADNNCLGTEVA

SEQ ID NO: 4357 - protein, 629 aa, Homo sapiens
MIPWPASDRKKSECAFKKKSNEELQDSYLLPISEDKVMEGKGQSPFDPAHKHTAVLVDGMLYSGTMNNFLGSEPILMRTLGSQPVLKTDNFLRWLHHDASFVAAIPSTQVVYFFFEETASEFDFFERLHTSRVARVCKNDVGGEKLLQKKWTTFLKAQLLCTQPGQLPFNVIRHAVLLPADSPTAPHIYAVFTSQWQVGGTRSSAVCAFSLLDIERVFKGKYKELNKETSRWTTYRGPETNPRPGSCSVGPSSDKALTFMKDHFLMDEQVVGTPLLVKSGVEYTRLAVETAQGLDGHSHLVMYLGTTTGSLHKAVVSGDSSAHLVEEIQLFPDPEPVRNLQLAPTQGAVFVGFSGGVWRVPRANCSVYESCVDCVLARDPHCAWDPESRTCCLLSAPNLNSWKQDMERGNPEWACASGPMSRSLRPQSRPQIIKEVLAVPNSILELPCPHLSALASYYWSHGPAAVPEASSTVYNGSLLLIVQDGVGGLYQCWATENGFSYPVISYWVDSQDQTLALDPELAGIPREHVKVPLTRVSGGAALAAQQSYWPHFVTVTVLFALVLSGALIILVASPLRALRARGKVQGCETLRPGEKAPLSREQHLQSPKECRTSASDVDADNNCLGTEVA

SEQ ID NO: 4358 - protein, 1074 aa, Homo sapiens
MKGTCVIAWLFSSLGLWRLAHPEAQGTTQCQRTEHPVISYKEIGPWLREFRAKNAVDFSQLTFDPGQKELVVGARNYLFRLQLEDLSLIQAVEWECDEATKKACYSKGKSKEECQNYIRVLLVGGDRLFTCGTNAFTPVCTNRSLSNLTEIHDQISGMARCPYSPQHNSTALLTAGGELYAATAMDFPGRDPAIYRSLGILPPLRTAQYNSKWLNEPNFVSSYDIGNFTYFFFRENAVEHDCGKTVFSRAARVCKNDIGGRFLLEDTWTTFMKARLNCSRPGEVPFYYNELQSTFFLPELDLIYGIFTTNVNSIAASAVCVFNLSAIAQAFSGPFKYQENSRSAWLPYPNPNPHFQCGTVDQGLYVNLTERNLQDAQKFILMHEVVQPVTTVPSFMEDNSRFSHVAVDVVQGREALVHIIYLATDYGTIKKVRVPLNQTSSSCLLEEIELFPERRREPIRSLQILHSQSVLFVGLREHVVKIPLKRCQFYRTRSTCIGAQDPYCGWDVVMKKCTSLEESLSMTQWEQSISACPTRNLTVDGHFGVWSPWTPCTHTDGSAVGSCLCRTRSCDSPAPQCGGWQCEGPGMEIANCSRNGGWTPWTSWSPCSTTCGIGFQVRQRSCSNPTPRHGGRVCVGQNREERYCNEHLLCPPHMFWTGWGPWERCTAQCGGGIQARRRICENGPDCAGCNVEYQSCNTNPCPELKKTTPWTPWTPVNISDNGGHYEQRFRYTCKARLADPNLLEVGRQRIEMRYCSSDGTSGCSTDGLSGDFLRAGRYSAHTVNGAWSAWTSWSQCSRDCSRGIRNRKRVCNNPEPKYGGMPCLGPSLEYQECNILPCPVDGVWSCWSPWTKCSATCGGGHYMRTRSCSNPAPAYGGDICLGLHTEEALCNTQPCPESWSEWSDWSECEASGVQVRARQCILLFPMGSQCSGNTTESRPCVFDSNFIPEVSVARSSSVEEKRCGEFNMFHMIAVGLSSSILGCLLTLLVYTYCQRYQQQSHDATVIHPVSPAPLNTSITNHINKLDKYDSVEAIKAFNKNNLILEERNKYFNPHLTGKTYSNAYFTDLNNYDEY

SEQ ID NO: 4359 - protein, 201 aa, Homo sapiens
MAVEALHCGLNPRGIDHPAHAEGIKLQIEGEGVESQSIKNKNFQKVPDQKGTPKRLQAEAETAKSATVKLSKPVALWTQQDVCKWLKKHCPNQYQIYSESFKQHDITGRALLRLTDKKLERMGIAQENLRQHILQQVLQLKVREEVRNLQLLTQGTLLLPDGWMDGEIRRKTTLLLGQTGVRENLLLFLHRISIIENSIQI

SEQ ID NO: 4360 - protein, 469 aa, Homo sapiens
MGTVHARSLEPLPSSGPDFGGLGEEAEFVEVEPEAKQEILENKDVVVQHVHFDGLGRTKDDIIICEIGDVFKAKNLIEVMRKSHEAREKLLRLGIFRQVDVLIDTCQGDDALPNGLDVTFEVTELRRLTGSYNTMVGNNEGSMVLGLKLPNLLGRAEKVTFQFSYGTKETSYGLSFFKPRPGNFERNFSVNLYKVTGQFPWSSLRETDRGMSAEYSFPIWKTSHTVKWEGVWRELGCLSRTASFAVRKESGHSLKSSLSHAMVIDSRNSSILPRRGALLKVNQELAGYTGGDVSFIKEDFELQLNKQLIFDSVFSASFWGGMLVPIGDKPSSIADRFYLGGPTSIRGFSMHSIGPQSEGDYLGGEAYWAGGLHLYTPLPFRPGQGGFGELFRTHFFLNAGNLCNLNYGEGPKAHIRKLAECIRWSYGAGIVLRLGNIARLELNYCVPMGVQTGDRICDGVQFGAGIRFL

SEQ ID NO: 4361 - protein, 1701 aa, Homo sapiens
MGNSDSQYTLQGSKNHSNTITGAKQIPCSLKIRGIHAKEEKSLHGWGHGSNGAGYKSRSLARSCLSHFKSNQPYASRLGGPTCKVSRGVAYSTHRTNAPGKDFQGISAAFSTENGFHSVGHELADNHITSRDCNGHLLNCYGRNESIASTPPGEDRKSPRVLIKTLGKLDGCLRVEFHNGGNPSKVPAEDCSEPVQLLRYSPTLASETSPVPEARRGSSADSLPSHRPSPTDSRLRSSKGSSLSSESSWYDSPWGNAGELSEAEGSFLAPGMPDPSLHASFPPGDAKKPFNQSSSLSSLRELYKDANLGSLSPSGIRLSDEYMGTHASLSNRVSFASDIDVPSRVAHGDPIQYSSFTLPCRKPKAFVEDTAKKDSLKARMRRISDWTGSLSRKKRKLQEPRSKEGSDYFDSRSDGLNTDVQGSSQASAFLWSGGSTQILSQRSESTHAIGSDPLRQNIYENFMRELEMSRTNTENIETSTETAESSSESLSSLEQLDLLFEKEQGVVRKAGWLFFKPLVTVQKERKLELVARRKWKQYWVTLKGCTLLFYETYGKNSMDQSSAPRCALFAEDSIVQSVPEHPKKENVFCLSNSFGDVYLFQATSQTDLENWVTAVHSACASLFAKKHGKEDTLRLLKNQTKNLLQKIDMDSKMKKMAELQLSVVSDPKNRKAIENQIQQWEQNLEKFHMDLFRMRCYLASLQGGELPNPKSLLAAASRPSKLALGRLGILSVSSFHALVCSRDDSALRKRTLSLTQRGRNKKGIFSSLKGLDTLARKGKEKRPSITQVDELLHIYGSTVDGVPRDNAWEIQTYVHFQDNHGVTVGIKPEHRVEDILTLACKMRQLEPSHYGLQLRKLVDDNVEYCIPAPYEYMQQQVYDEIEVFPLNVYDVQLTKTGSVCDFGFAVTAQVDERQHLSRIFISDVLPDGLAYGEGLRKGNEIMTLNGEAVSDLDLKQMEALFSEKSVGLTLIARPPDTKATLCTSWSDSDLFSRDQKSLLPPPNQSQLLEEFLDNFKKNTANDFSNVPDITTGLKRSQTDGTLDQVSHREKMEQTFRSAEQITALCRSFNDSQANGMEGPRENQDPPPRSLARHLSDADRLRKVIQELVDTEKSYVKDLSCLFELYLEPLQNETFLTQDEMESLFGSLPEMLEFQKVFLETLEDGISASSDFNTLETPSQFRKLLFSLGGSFLYYADHFKLYSGFCANHIKVQKVLERAKTDKAFKAFLDARNPTKQHSSTLESYLIKPVQRVLKYPLLLKELVSLTDQESEEHYHLTEALKAMEKVASHINEMQKIYEDYGTVFDQLVAEQSGTEKEVTELSMGELLMHSTVSWLNPFLSLGKARKDLELTVFVFKRAVILVYKENCKLKKKLPSNSRPAHNSTDLDPFKFRWLIPISALQVRLGNPAGTENNSIWELIHTKSEIEGRPETIFQLCCSDSESKTNIVKVIRSILRENFRRHIKCELPLEKTCKDRLVPLKNRVPVSAKLASSRSLKVLKNSSSNEWTGETGKGTLLDSDEGSLSSGTQSSGCPTAEGRQDSKSTSPGKYPHPGLADFADNLIKESDILSDEDDDHRQTVKQGSPTKDIEIQFQRLRISEDPDVHPEAEQQPGPESGEGQKGGEQPKLVRGHFCPIKRKANSTKRDRGTLLKAQIRHQSLDSQSENATIDLNSVLEREFSVQSLTSVVSEECFYETESHGKS

SEQ ID NO: 4362 - protein, 1730 aa, Homo sapiens
MGNSDSQYTLQGSKNHSNTITGAKQIPCSLKIRGIHAKEEKSLHGWGHGSNGAGYKSRSLARSCLSHFKSNQPYASRLGGPTCKVSRGVAYSTHRTNAPGKDFQGISAAFSTENGFHSVGHELADNHITSRDCNGHLLNCYGRNESIASTPPGEDRKSPRVLIKTLGKLDGCLRVEFHNGGNPSKVPAEDCSEPVQLLRYSPTLASETSPVPEARRGSSADSLPSHRPSPTDSRLRSSKGSSLSSESSWYDSPWGNAGELSEAEGSFLAPGMPDPSLHASFPPGDAKKPFNQSSSLSSLRELYKDANLGSLSPSGIRLSDEYMGTHASLSNRVSFASDIDVPSRVAHGDPIQYSSFTLPCRKPKAFVEDTAKKDSLKARMRRISDWTGSLSRKKRKLQEPRSKEGSDYFDSRSDGLNTDVQGSSQASAFLWSGGSTQILSQRSESTHAIGSDPLRQNIYENFMRELEMSRTNTENIETSTETAESSSESLSSLEQLDLLFEKEQGVVRKAGWLFFKPLVTVQKERKLELVARRKWKQYWVTLKGCTLLFYETYGKNSMDQSSAPRCALFAEDSIVQSVPEHPKKENVFCLSNSFGDVYLFQATSQTDLENWVTAVHSACASLFAKKHGKEDTLRLLKNQTKNLLQKIDMDSKMKKMAELQLSVVSDPKNRKAIENQIQQWEQNLEKFHMDLFRMRCYLASLQGGELPNPKSLLAAASRPSKLALGRLGILSVSSFHALVCSRDDSALRKRTLSLTQRGRNKKGIFSSLKGLDTLARKGKEKRPSITQVDELLHIYGSTVDGVPRDNAWEIQTYVHFQDNHGVTVGIKPEHRVEDILTLACKMRQLEPSHYGLQLRKLVDDNVEYCIPAPYEYMQQQVYDEIEVFPLNVYDVQLTKTGSVCDFGFAVTAQVDERQHLSRIFISDVLPDGLAYGEGLRKGNEIMTLNGEAVSDLDLKQMEALFSEKSVGLTLIARPPDTKATLCTSWSDSDLFSRDQKSLLPPPNQSQLLEEFLDNFKKNTANDFSNVPDITTGLKRSQTDGTLDQVSHREKMEQTFRSAEQITALCRSFNDSQANGMEGPRENQDPPPRSLARHLSDADRLRKVIQELVDTEKSYVKDLSCLFELYLEPLQNETFLTQDEMESLFGSLPEMLEFQKVFLETLEDGISASSDFNTLETPSQFRKLLFSLGGSFLYYADHFKLYSGFCANHIKVQKVLERAKTDKAFKAFLDARNPTKQHSSTLESYLIKPVQRVLKYPLLLKELVSLTDQESEEHYHLTEALKAMEKVASHINEMQKIYEDYGTVFDQLVAEQSGTEKEQPEWSSEVMDVLDPRGKLTKGTLEEPRTLVTELSMGELLMHSTVSWLNPFLSLGKARKDLELTVFVFKRAVILVYKENCKLKKKLPSNSRPAHNSTDLDPFKFRWLIPISALQVRLGNPAGTENNSIWELIHTKSEIEGRPETIFQLCCSDSESKTNIVKVIRSILRENFRRHIKCELPLEKTCKDRLVPLKNRVPVSAKLASSRSLKVLKNSSSNEWTGETGKGTLLDSDEGSLSSGTQSSGCPTAEGRQDSKSTSPGKYPHPGLADFADNLIKESDILSDEDDDHRQTVKQGSPTKDIEIQFQRLRISEDPDVHPEAEQQPGPESGEGQKGGEQPKLVRGHFCPIKRKANSTKRDRGTLLKAQIRHQSLDSQSENATIDLNSVLEREFSVQSLTSVVSEECFYETESHGKS

SEQ ID NO: 4363 - protein, 626 aa, Homo sapiens
MEGPRENQDPPPRSLARHLSDADRLRKVIQELVDTEKSYVKDLSCLFELYLEPLQNETFLTQDEMESLFGSLPEMLEFQKVFLETLEDGISASSDFNTLETPSQFRKLLFSLGGSFLYYADHFKLYSGFCANHIKVQKVLERAKTDKAFKAFLDARNPTKQHSSTLESYLIKPVQRVLKYPLLLKELVSLTDQESEEHYHLTEALKAMEKVASHINEMQKIYEDYGTVFDQLVAEQSGTEKEVTELSMGELLMHSTVSWLNPFLSLGKARKDLELTVFVFKRAVILVYKENCKLKKKLPSNSRPAHNSTDLDPFKFRWLIPISALQVRLGNPAGTENNSIWELIHTKSEIEGRPETIFQLCCSDSESKTNIVKVIRSILRENFRRHIKCELPLEKTCKDRLVPLKNRVPVSAKLASSRSLKVLKNSSSNEWTGETGKGTLLDSDEGSLSSGTQSSGCPTAEGRQDSKSTSPGKYPHPGLADFADNLIKESDILSDEDDDHRQTVKQGSPTKDIEIQFQRLRISEDPDVHPEAEQQPGPESGEGQKGGEQPKLVRGHFCPIKRKANSTKRDRGTLLKAQIRHQSLDSQSENATIDLNSVLEREFSVQSLTSVVSEECFYETESHGKS

SEQ ID NO: 4364 - protein, 1013 aa, Homo sapiens
MDLFRMRCYLASLQGGELPNPKSLLAAASRPSKLALGRLGILSVSSFHALVCSRDDSALRKRTLSLTQRGRNKKGIFSSLKGLDTLARKGKEKRPSITQVDELLHIYGSTVDGVPRDNAWEIQTYVHFQDNHGVTVGIKPEHRVEDILTLACKMRQLEPSHYGLQLRKLVDDNVEYCIPAPYEYMQQQVYDEIEVFPLNVYDVQLTKTGSVCDFGFAVTAQVDERQHLSRIFISDVLPDGLAYGEGLRKGNEIMTLNGEAVSDLDLKQMEALFSEKSVGLTLIARPPDTKATLCTSWSDSDLFSRDQKSLLPPPNQSQLLEEFLDNFKKNTANDFSNVPDITTGLKRSQTDGTLDQVSHREKMEQTFRSAEQITALCRSFNDSQANGMEGPRENQDPPPRSLARHLSDADRLRKVIQELVDTEKSYVKDLSCLFELYLEPLQNETFLTQDEMESLFGSLPEMLEFQKVFLETLEDGISASSDFNTLETPSQFRKLLFSLGGSFLYYADHFKLYSGFCANHIKVQKVLERAKTDKAFKAFLDARNPTKQHSSTLESYLIKPVQRVLKYPLLLKELVSLTDQESEEHYHLTEALKAMEKVASHINEMQKIYEDYGTVFDQLVAEQSGTEKEVTELSMGELLMHSTVSWLNPFLSLGKARKDLELTVFVFKRAVILVYKENCKLKKKLPSNSRPAHNSTDLDPFKFRWLIPISALQVRLGNPAGTENNSIWELIHTKSEIEGRPETIFQLCCSDSESKTNIVKVIRSILRENFRRHIKCELPLEKTCKDRLVPLKNRVPVSAKLASSRSLKVLKNSSSNEWTGETGKGTLLDSDEGSLSSGTQSSGCPTAEGRQDSKSTSPGKYPHPGLADFADNLIKESDILSDEDDDHRQTVKQGSPTKDIEIQFQRLRISEDPDVHPEAEQQPGPESGEGQKGGEQPKLVRGHFCPIKRKANSTKRDRGTLLKAQIRHQSLDSQSENATIDLNSVLEREFSVQSLTSVVSEECFYETESHGKS

SEQ ID NO: 4365 - protein, 1725 aa, Homo sapiens
MGNSDSQYTLQGSKNHSNTITGAKQIPCSLKIRGIHAKEEKSLHGWGHGSNGAGYKSRSLARSCLSHFKSNQPYASRLGGPTCKVSRGVAYSTHRTNAPGKDFQGISAAFSTENGFHSVGHELADNHITSRDCNGHLLNCYGRNESIASTPPGEDRKSPRVLIKTLGKLDGCLRVEFHNGGNPSKVPAEDCSEPVQLLRYSPTLASETSPVPEARRGSSADSLPSHRPSPTDSRLRSSKGSSLSSESSWYDSPWGNAGELSEAEGSFLAPGMPDPSLHASFPPGDAKKPFNQSSSLSSLRELYKDANLGSLSPSGIRLSDEYMGTHASLSNRVSFASDIDVPSRVAHGDPIQYSSFTLPCRKPKAFVEDTAKKDSLKARMRRISDWTGSLSRKKRKLQEPRSKEGSDYFDSRSDGLNTDVQGSSQASAFLWSGGSTQILSQRSESTHAIGSDPLRQNIYENFMRELEMSRTNTENIETSTETAESSSESLSSLEQLDLLFEKEQGVVRKAGWLFFKPLVTVQKERKLELVARRKWKQYWVTLKGCTLLFYETYGKNSMDQSSAPRCALFAEDSIVQSVPEHPKKENVFCLSNSFGDVYLFQATSQTDLENWVTAVHSACASLFAKKHGKEDTLRLLKNQTKNLLQKIDMDSKMKKMAELQLSVVSDPKNRKAIENQIQQWEQNLEKFHMDLFRMRCYLASLQGGELPNPKSLLAAASRPSKLALGRLGILSVSSFHALVCSRDDSALRKRTLSLTQRGRNKKGIFSSLKGLDTLARKGKEKRPSITQIFDSSGSHGFSGTQLPQNSSNSSEVDELLHIYGSTVDGVPRDNAWEIQTYVHFQDNHGVTVGIKPEHRVEDILTLACKMRQLEPSHYGLQLRKLVDDNVEYCIPAPYEYMQQQVYDEIEVFPLNVYDVQLTKTGSVCDFGFAVTAQVDERQHLSRIFISDVLPDGLAYGEGLRKGNEIMTLNGEAVSDLDLKQMEALFSEKSVGLTLIARPPDTKATLCTSWSDSDLFSRDQKSLLPPPNQSQLLEEFLDNFKKNTANDFSNVPDITTGLKRSQTDGTLDQVSHREKMEQTFRSAEQITALCRSFNDSQANGMEGPRENQDPPPRSLARHLSDADRLRKVIQELVDTEKSYVKDLSCLFELYLEPLQNETFLTQDEMESLFGSLPEMLEFQKVFLETLEDGISASSDFNTLETPSQFRKLLFSLGGSFLYYADHFKLYSGFCANHIKVQKVLERAKTDKAFKAFLDARNPTKQHSSTLESYLIKPVQRVLKYPLLLKELVSLTDQESEEHYHLTEALKAMEKVASHINEMQKIYEDYGTVFDQLVAEQSGTEKEVTELSMGELLMHSTVSWLNPFLSLGKARKDLELTVFVFKRAVILVYKENCKLKKKLPSNSRPAHNSTDLDPFKFRWLIPISALQVRLGNPAGTENNSIWELIHTKSEIEGRPETIFQLCCSDSESKTNIVKVIRSILRENFRRHIKCELPLEKTCKDRLVPLKNRVPVSAKLASSRSLKVLKNSSSNEWTGETGKGTLLDSDEGSLSSGTQSSGCPTAEGRQDSKSTSPGKYPHPGLADFADNLIKESDILSDEDDDHRQTVKQGSPTKDIEIQFQRLRISEDPDVHPEAEQQPGPESGEGQKGGEQPKLVRGHFCPIKRKANSTKRDRGTLLKAQIRHQSLDSQSENATIDLNSVLEREFSVQSLTSVVSEECFYETESHGKS

SEQ ID NO: 4366 - protein, 96 aa, Homo sapiens
MRVTSATCALLLALICSVQLGDACLDIDKLLANVVFDVSQDLLKEELARYNPSPLTEESFLNVQQCFANVSVTERFAHSVVIKKILQSNDCIEAAF

SEQ ID NO: 4367 - protein, 429 aa, Homo sapiens
MATEQRPFHLVVFGASGFTGQFVTEEVAREQVDPERSSRLPWAVAGRSREKLQRVLEKAALKLGRPTLSSEVGIIICDIANPASLDEMAKQATVVLNCVGPYRFYGEPVIKACIENGASCIDISGEPQFLELMQLKYHEKAADKGVYIIGSSGFDSIPADLGVIYTRNKMNGTLTAVESFLTIHSGPEGLSIHDGTWKSAIYGFGDQSNLRKLRNVSNLKPVPLIGPKLKRRWPISYCRELKGYSIPFMGSDVSVVRRTQRYLYENLEESPVQYAAYVTVGGITSVIKLMFAGLFFLFFVRFGIGRQLLIKFPWFFSFGYFSKQGPTQKQIDAASFTLTFFGQGYSQGTGTDKNKPNIKICTQVKGPEAGYVATPIAMVQAAMTLLSDASHLPKAGGVFTPGAAFSKTKLIDRLNKHGIEFSVISSSEV

SEQ ID NO: 4368 - protein, 421 aa, Homo sapiens
MKKHSARVAPLSACNSPVLTLTKVEGEERPRDSPGPAEAQAPAGVEAGGRASRRCWTCSRAQLKKIFWGVAVVLCVCSSWAGSTQLAKLTFRKFDAPFTLTWFATNWNFLFFPLYYVGHVCKSTEKQSVKQRYRECCRFFGDNGLTLKVFFTKAAPFGVLWTLTNYLYLHAIKKINTTDVSVLFCCNKAFVFLLSWIVLRDRFMGVRIVAAILAIAGIVMMTYADGFHSHSVIGIALVVASASMSALYKVLFKLLLGSAKFGEAALFLSILGVFNILFITCIPIILYFTKVEYWSSFDDIPWGNLCGFSVLLLTFNIVLNFGIAVTYPTLMSLGIVLSIPVNAVIDHYTSQIVFNGVRVIAIIIIGLGFLLLLLPEEWDVWLIKLLTRLKVRKKEEPAEGAADLSSGPQSKNRRARPSFAR

SEQ ID NO: 4369 - protein, 490 aa, Homo sapiens
MGIREFPSGAPRGKSIAVGMRRSPDVSPRRLSDISPQLRQLKYLVVDEAIKEDLKWSRSVEDLTSGPVGLTSIEERILRITGYYGYQPWAASCKREERPRDSPGPAEAQAPAGVEAGGRASRRCWTCSRAQLKKIFWGVAVVLCVCSSWAGSTQLAKLTFRKFDAPFTLTWFATNWNFLFFPLYYVGHVCKSTEKQSVKQRYRECCRFFGDNGLTLKVFFTKAAPFGVLWTLTNYLYLHAIKKINTTDVSVLFCCNKAFVFLLSWIVLRDRFMGVRIVAAILAIAGIVMMTYADGFHSHSVIGIALVVASASMSALYKVLFKLLLGSAKFGEAALFLSILGVFNILFITCIPIILYFTKVEYWSSFDDIPWGNLCGFSVLLLTFNIVLNFGIAVTYPTLMSLGIVLSIPVNAVIDHYTSQIVFNGVRVIAIIIIGLGFLLLLLPEEWDVWLIKLLTRLKVRKKEEPAEGAADLSSGPQSKNRRARPSFAR

SEQ ID NO: 4370 - protein, 1268 aa, Homo sapiens
MSAPAGSSHPAASARIPPKFGGAAVSGAAAPAGPGAGPAPHQQNGPAQNQMQVPSGYGLHHQNYIAPSGHYSQGPGKMTSLPLDTQCGDYYSALYTVPTQNVTPNTVNQQPGAQQLYSRGPPAPHIVGSTLGSFQGAASSASHLHTSASQPYSSFVNHYNSPAMYSASSSVASQGFPSTCGHYAMSTVSNAAYPSVSYPSLPAGDTYGQMFTSQNAPTVRPVKDNSFSGQNTAISHPSPLPPLPSQQHHQQQSLSGYSTLTWSSPGLPSTQDNLIRNHTGSLAVANNNPTITVADSLSCPVMQNVQPPKSSPVVSTVLSGSSGSSSTRTPPTANHPVEPVTSVTQPSELLQQKGVQYGEYVNNQASSAPTPLSSTSDDEEEEEEDEEAGVDSSSTTSSASPMPNSYDALEGGSYPDMLSSSASSPAPDPAPEPDPASAPAPASAPAPVVPQPSKMAKPFGYGYPTLQPGYQNATAPLISGVQPSNPVYSGFQQYPQQYPGVNQLSSSIGGLSLQSSPQPESLRPVNLTQERNILPMTPVWAPVPNLNADLKKLNCSPDSFRCTLTNIPQTQALLNKAKLPLGLLLHPFRDLTQLPVITSNTIVRCRSCRTYINPFVSFIDQRRWKCNLCYRVNDVPEEFMYNPLTRSYGEPHKRPEVQNSTVEFIASSDYMLRPPQPAVYLFVLDVSHNAVEAGYLTILCQSLLENLDKLPGDSRTRIGFMTFDSTIHFYNLQEGLSQPQMLIVSDIDDVFLPTPDSLLVNLYESKELIKDLLNALPNMFTNTRETHSALGPALQAAFKLMSPTGGRVSVFQTQLPSLGAGLLQSREDPNQRSSTKVVQHLGPATDFYKKLALDCSGQQTAVDLFLLSSQYSDLASLACMSKYSAGCIYYYPSFHYTHNPSQAEKLQKDLKRYLTRKIGFEAVMRIRCTKGLSMHTFHGNFFVRSTDLLSLANINPDAGFAVQLSIEESLTDTSLVCFQTALLYTSSKGERRIRVHTLCLPVVSSLADVYAGVDVQAAICLLANMAVDRSVSSSLSDARDALVNAVVDSLSAYGSTVSNLQHSALMAPSSLKLFPLYVLALLKQKAFRTGTSTRLDDRVYAMCQIKSQPLVHLMKMIHPNLYRIDRLTDEGAVHVNDRIVPQPPLQKLSAEKLTREGAFLMDCGSVFYIWVGKGCDNNFIEDVLGYTNFASIPQKMTHLPELDTLSSERARSFITWLRDSRPLSPILHIVKDESPAKAEFFQHLIEDRTEAAFSYYEFLLHVQQQICK

SEQ ID NO: 4371 - protein, 1233 aa, Homo sapiens
MSAPAGSSHPAASARIPPKFGGAAVSGAAAPAGPGAGPAPHQQNGPAQNQMQVPSGYGLHHQNYIAPSGHYSQGPGKMTSLPLDTQCGDYYSALYTVPTQNVTPNTVNQQPGAQQLYSRGPPAPHIVGSTLGSFQGAASSASHLHTSASQPYSSFVNHYNSPAMYSASSSVASQGFPSTCGHYAMSTVSNAAYPSVSYPSLPAGDTYGQMFTSQNAPTVRPVKDNSFSGQNTAISHPSPLPPLPSQQHHQQQSLSGYSTLTWSSPGLPSTQDNLIRNHTGSLAVANNNPTITVADSLSCPVMQNVQPPKSSPVVSTVLSGSSGSSSTRTPPTANHPVEPVTSVTQPSELLQQKGVDSSSTTSSASPMPNSYDALEGGSYPDMLSSSASSPAPDPAPEPDPASAPAPASAPAPVVPQPSKMAKPFGYGYPTLQPGYQNATAPLISGVQPSNPVYSGFQQYPQQYPGVNQLSSSIGGLSLQSSPQPESLRPVNLTQERNILPMTPVWAPVPNLNADLKKLNCSPDSFRCTLTNIPQTQALLNKAKLPLGLLLHPFRDLTQLPVITSNTIVRCRSCRTYINPFVSFIDQRRWKCNLCYRVNDVPEEFMYNPLTRSYGEPHKRPEVQNSTVEFIASSDYMLRPPQPAVYLFVLDVSHNAVEAGYLTILCQSLLENLDKLPGDSRTRIGFMTFDSTIHFYNLQEGLSQPQMLIVSDIDDVFLPTPDSLLVNLYESKELIKDLLNALPNMFTNTRETHSALGPALQAAFKLMSPTGGRVSVFQTQLPSLGAGLLQSREDPNQRSSTKVVQHLGPATDFYKKLALDCSGQQTAVDLFLLSSQYSDLASLACMSKYSAGCIYYYPSFHYTHNPSQAEKLQKDLKRYLTRKIGFEAVMRIRCTKGLSMHTFHGNFFVRSTDLLSLANINPDAGFAVQLSIEESLTDTSLVCFQTALLYTSSKGERRIRVHTLCLPVVSSLADVYAGVDVQAAICLLANMAVDRSVSSSLSDARDALVNAVVDSLSAYGSTVSNLQHSALMAPSSLKLFPLYVLALLKQKAFRTGTSTRLDDRVYAMCQIKSQPLVHLMKMIHPNLYRIDRLTDEGAVHVNDRIVPQPPLQKLSAEKLTREGAFLMDCGSVFYIWVGKGCDNNFIEDVLGYTNFASIPQKMTHLPELDTLSSERARSFITWLRDSRPLSPILHIVKDESPAKAEFFQHLIEDRTEAAFSYYEFLLHVQQQICK

SEQ ID NO: 4372 - protein, 1298 aa, Homo sapiens
MSAPAGSSHPAASARIPPKFGGAAVSGAAAPAGPGAGPAPHQQNETGFHHVAQASLELLDPSNLPASASQIAGSTGPAQNQMQVPSGYGLHHQNYIAPSGHYSQGPGKMTSLPLDTQCGDYYSALYTVPTQNVTPNTVNQQPGAQQLYSRGPPAPHIVGSTLGSFQGAASSASHLHTSASQPYSSFVNHYNSPAMYSASSSVASQGFPSTCGHYAMSTVSNAAYPSVSYPSLPAGDTYGQMFTSQNAPTVRPVKDNSFSGQNTAISHPSPLPPLPSQQHHQQQSLSGYSTLTWSSPGLPSTQDNLIRNHTGSLAVANNNPTITVADSLSCPVMQNVQPPKSSPVVSTVLSGSSGSSSTRTPPTANHPVEPVTSVTQPSELLQQKGVQYGEYVNNQASSAPTPLSSTSDDEEEEEEDEEAGVDSSSTTSSASPMPNSYDALEGGSYPDMLSSSASSPAPDPAPEPDPASAPAPASAPAPVVPQPSKMAKPFGYGYPTLQPGYQNATAPLISGVQPSNPVYSGFQQYPQYPGVNQLSSSIGGLSLQSSPQPESLRPVNLTQERNILPMTPVWAPVPNLNADLKKLNCSPDSFRCTLTNIPQTQALLNKAKLPLGLLLHPFRDLTQLPVITSNTIVRCRSCRTYINPFVSFIDQRRWKCNLCYRVNDVPEEFMYNPLTRSYGEPHKRPEVQNSTVEFIASSDYMLRPPQPAVYLFVLDVSHNAVEAGYLTILCQSLLENLDKLPGDSRTRIGFMTFDSTIHFYNLQEGLSQPQMLIVSDIDDVFLPTPDSLLVNLYESKELIKDLLNALPNMFTNTRETHSALGPALQAAFKLMSPTGGRVSVFQTQLPSLGAGLLQSREDPNQRSSTKVVQHLGPATDFYKKLALDCSGQQTAVDLFLLSSQYSDLASLACMSKYSAGCIYYYPSFHYTHNPSQAEKLQKDLKRYLTRKIGFEAVMRIRCTKGLSMHTFHGNFFVRSTDLLSLANINPDAGFAVQLSIEESLTDTSLVCFQTALLYTSSKGERRIRVHTLCLPVVSSLADVYAGVDVQAAICLLANMAVDRSVSSSLSDARDALVNAVVDSLSAYGSTVSNLQHSALMAPSSLKLFPLYVLALLKQKAFRTGTSTRLDDRVYAMCQIKSQPLVHLMKMIHPNLYRIDRLTDEGAVHVNDRIVPQPPLQKLSAEKLTREGAFLMDCGSVFYIWVGKGCDNNFIEDVLGYTNFASIPQKMTHLPELDTLSSERARSFITWLRDSRPLSPILHIVKDESPAKAEFFQHLIEDRTEAAFSYYEFLLHVQQQICK

SEQ ID NO: 4373 - protein, 596 aa, Homo sapiens
MAGRRVNVNVGVLGHIDSGKTALARALSTTASTAAFDKQPQSRERGITLDLGFSCFSVPLPARLRSSLPEFQAAPEAEPEPGEPLLQVTLVDCPGHASLIRTIIGGAQIIDLMMLVIDVTKGMQTQSAECLVIGQIACQKLVVVLNKIDLLPEGKRQAAIDKMTKKMQKTLENTKFRGAPIIPVAAKPGGPEAPETEAPQGIPELIELLTSQISIPTRDPSGPFLMSVDHCFSIKGQGTVMTGTILSGSISLGDSVEIPALKVVKKVKSMQMFHMPITSAMQGDRLGICVTQFDPKLLERGLVCAPESLHTVHAALISVEKIPYFRGPLQTKAKFHITVGHETVMGRLMFFSPAPDNFDQEPILDSFNFSQEYLFQEQYLSKDLTPAVTDNDEADKKAGQATEGHCPRQQWALVEFEKPVTCPRLCLVIGSRLDADIHTNTCRLAFHGILLHGLEDRNYADSFLPRLKVYKLKHKHGLVERAMDDYSVIGRSLFKKETNIQLFVGLKVHLSTGELGIIDSAFGQSGKFKIHIPGGLSPESKKILTPALKKRARAGRGEATRQEESAERSEPSQHVVLSLTFKRYVFDTHKRMVQSP

SEQ ID NO: 4374 - protein, 569 aa, Homo sapiens
MASCSTAAFDKQPQSRERGITLDLGFSCFSVPLPARLRSSLPEFQAAPEAEPEPGEPLLQVTLVDCPGHASLIRTIIGGAQIIDLMMLVIDVTKGMQTQSAECLVIGQIACQKLVVVLNKIDLLPEGKRQAAIDKMTKKMQKTLENTKFRGAPIIPVAAKPGGPEAPETEAPQGIPELIELLTSQISIPTRDPSGPFLMSVDHCFSIKGQGTVMTGTILSGSISLGDSVEIPALKVVKKVKSMQMFHMPITSAMQGDRLGICVTQFDPKLLERGLVCAPESLHTVHAALISVEKIPYFRGPLQTKAKFHITVGHETVMGRLMFFSPAPDNFDQEPILDSFNFSQEYLFQEQYLSKDLTPAVTDNDEADKKAGQATEGHCPRQQWALVEFEKPVTCPRLCLVIGSRLDADIHTNTCRLAFHGILLHGLEDRNYADSFLPRLKVYKLKHKHGLVERAMDDYSVIGRSLFKKETNIQLFVGLKVHLSTGELGIIDSAFGQSGKFKIHIPGGLSPESKKILTPALKKRARAGRGEATRQEESAERSEPSQHVVLSLTFKRYVFDTHKRMVQSP

SEQ ID NO: 4375 - protein, 359 aa, Homo sapiens
MADQDPAGISPLQQMVASGTGAVVTSLFMTPLDVVKVRLQSQRPSMASELMPSSRLWSLSYTKLPSSLQSTGKCLLYCNGVLEPLYLCPNGARCATWFQDPTRFTGTMDAFVKIVRHEGTRTLWSGLPATLVMTVPATAIYFTAYDQLKAFLCGRALTSDLYAPMVAGALARLGTVTVISPLELMRTKLQAQHVSYRELGACVRTAVAQGGWRSLWLGWGPTALRDVPFSALYWFNYELVKSWLNGFRPKDQTSVGMSFVAGGISGTVAAVLTLPFDVVKTQRQVALGAMEAVRVNPLHVDSTWLLLRRIRAESGTKGLFAGFLPRIIKAAPSCAIMISTYEFGKSFFQRLNQDRLLGG

SEQ ID NO: 4376 - protein, 351 aa, Homo sapiens
MADQDPAGISPLQQMVASGTGAVVTSLFMTPLDVVKVRLQSQRPSMASELMPSSRLWSLSYTKWKCLLYCNGVLEPLYLCPNGARCATWFQDPTRFTGTMDAFVKIVRHEGTRTLWSGLPATLVMTVPATAIYFTAYDQLKAFLCGRALTSDLYAPMVAGALARLGTVTVISPLELMRTKLQAQHVSYRELGACVRTAVAQGGWRSLWLGWGPTALRDVPFSALYWFNYELVKSWLNGFRPKDQTSVGMSFVAGGISGTVAAVLTLPFDVVKTQRQVALGAMEAVRVNPLHVDSTWLLLRRIRAESGTKGLFAGFLPRIIKAAPSCAIMISTYEFGKSFFQRLNQDRLLGG

SEQ ID NO: 4377 - protein, 288 aa, Homo sapiens
MPVEEFVAGWISGALGLVLGHPFDTVKVRLQTQTTYRGIVDCMVKIYRHESLLGFFKGMSFPIASIAVVNSVLFGVYSNTLLVLTATSHQERRAQPPSYMHIFLAGCTGGFLQAYCLAPFDLIKVRLQNQTEPRAQPGSPPPRYQGPVHCAASIFREEGPRGLFRGAWALTLRDTPTVGIYFITYEGLCRQYTPEGQNPSSATVLVAGGFAGIASWVAATPLDMIKSRMQMDGLRRRVYQGMLDCMVSSIRQEGLGVFFRGVTINSARAFPVNAVTFLSYEYLLRWWG

SEQ ID NO: 4378 - protein, 246 aa, Homo sapiens
MVKIYRHESLLGFFKGMSFPIASIAVVNSVLFGVYSNTLLVLTATSHQERRAQPPSYMHIFLAGCTGGFLQAYCLAPFDLIKVRLQNQTEPRAQPGSPPPRYQGPVHCAASIFREEGPRGLFRGAWALTLRDTPTVGIYFITYEGLCRQYTPEGQNPSSATVLVAGGFAGIASWVAATPLDMIKSRMQMDGLRRRVYQGMLDCMVSSIRQEGLGVFFRGVTINSARAFPVNAVTFLSYEYLLRWWG

SEQ ID NO: 4379 - protein, 184 aa, Homo sapiens
MVKIYRHESAYCLAPFDLIKVRLQNQTEPRAQPGSPPPRYQGPVHCAASIFREEGPRGLFRGAWALTLRDTPTVGIYFITYEGLCRQYTPEGQNPSSATVLVAGGFAGIASWVAATPLDMIKSRMQMDGLRRRVYQGMLDCMVSSIRQEGLGVFFRGVTINSARAFPVNAVTFLSYEYLLRWWG

SEQ ID NO: 4380 - protein, 264 aa, Homo sapiens
MPVEEFVAGWISGALGLVLGHPFDTVKLLGFFKGMSFPIASIAVVNSVLFGVYSNTLLVLTATSHQERRAQPPSYMHIFLAGCTGGFLQAYCLAPFDLIKVRLQNQTEPRAQPGSPPPRYQGPVHCAASIFREEGPRGLFRGAWALTLRDTPTVGIYFITYEGLCRQYTPEGQNPSSATVLVAGGFAGIASWVAATPLDMIKSRMQMDGLRRRVYQGMLDCMVSSIRQEGLGVFFRGVTINSARAFPVNAVTFLSYEYLLRWWG

SEQ ID NO: 4381 - protein, 268 aa, Homo sapiens
MPRSFLVKKHFNASKKPNYSELDTHTVIISPYLYESYSMPVIPQPEILSSGAYSPITVWTTAAPFHAQLPNGLSPLSGYSSSLGRVSPPPPSDTSSKDHSGSESPISDEEERLQSKLSDPHAIEAEKFQCNLCNKTYSTFSGLAKHKQLHCDAQSRKSFSCKYCDKEYVSLGALKMHIRTHTLPCVCKICGKAFSRPWLLQGHIRTHTGEKPFSCPHCNRAFADRSNLRAHLQTHSDVKKYQCKNCSKTFSRMSLLHKHEESGCCVAH

SEQ ID NO: 4382 - protein, 467 aa, Homo sapiens
MATRSCREKAQKLNEQHQLILSKLLREEDNKYCADCEAKGPRWASWNIGVFICIRCAGIHRNLGVHISRVKSVNLDQWTAEQIQCMQDMGNTKARLLYEANLPENFRRPQTDQAVEFFIRDKYEKKKYYDKNAIAITNISSSDAPLQPLVSSPSLQAAVDKNKLEKEKEKKKEEKKREKEPEKPAKPLTAEKLQKKDQQLEPKKSTSPKKAAEPTVDLLGLDGPAVAPVTNGNTTVPPLNDDLDIFGPMISNPLPATVMPPAQGTPSAPAAATLSTVTSGDLDLFTEQTTKSEEVAKKQLSKDSILSLYGTGTIQQQSTPGVFMGPTNIPFTSQAPAAFQGFPSMGVPVPAAPGLIGNVMGQSPSMMVGMPMPNGFMGNAQTGVMPLPQNVVGPQGGMVGQMGAPQSKFGLPQAQQPQWSLSQMNQQMAGMSISSATPTAGFGQPSSTTAGWSGSSSGQTLSTQLWK

SEQ ID NO: 4383 - protein, 440 aa, Homo sapiens
MATRSCREKAQKLNEQHQLILSKLLREEDNKYCADCEAKGPRWASWNIGVFICIRCAGIHRNLGVHISRVKSVNLDQWTAEQIQCMQDMGNTKARLLYEANLPENFRRPQTDQAVEFFIRDKYEKKKYYDKNAIAITNKEKEKKKEEKKREKEPEKPAKPLTAEKLQKKDQQLEPKKSTSPKKAAEPTVDLLGLDGPAVAPVTNGNTTVPPLNDDLDIFGPMISNPLPATVMPPAQGTPSAPAAATLSTVTSGDLDLFTEQTTKSEEVAKKQLSKDSILSLYGTGTIQQQSTPGVFMGPTNIPFTSQAPAAFQGFPSMGVPVPAAPGLIGNVMGQSPSMMVGMPMPNGFMGNAQTGVMPLPQNVVGPQGGMVGQMGAPQSKFGLPQAQQPQWSLSQMNQQMAGMSISSATPTAGFGQPSSTTAGWSGSSSGQTLSTQLWK

SEQ ID NO: 4384 - protein, 436 aa, Homo sapiens
MATRSCREKAQKLNEQHQLILSKLLREEDNKYCADCEAKGPRWASWNIGVFICIRCAGIHRNLGVHISRVKSVNLDQWTAEQIQCMQDMGNTKARLLYEANLPENFRRPQTDQAVEFFIRDKYEKKKYYDKNAIAITNKEKEKKKEEKKREKEPEKPAKPLTAEKLQKKDQQLEPKKSTSPKKAAEPTVDLLGLDGPAVAPVTNGNTTVPPLNDDLDIFGPMISNPLPATVMPPAQGTPSAPAAATLSTVTSGDLDLFTEQTTKSEEVAKKQLSKDSILSLYGTGTIQQQSTPGVFMGPTNIPFTSQAPAAFQGFPSMGVPVPAAPGLIGNVMGQSPSMMVGMPMPNGFMGNAQTGVMPLPQNVVGPQGGMVGQMGAPQSKFGLPQAQQPQWSLSQIMQKGDAVLQHSISAIYWPMTRWLKCPLVDESADGWHEYQ

SEQ ID NO: 4385 - protein, 946 aa, Homo sapiens
MVPWVRTMGQKLKQRLRLDVGREICRQYPLFCFLLLCLSAASLLLNRYIHILMIFWSFVAGVVTFYCSLGPDSLLPNIFFTIKYKPKQLGLQELFPQGHSCAVCGKVKCKRHRPSLLLENYQPWLDLKISSKVDASLSEVLELVLENFVYPWYRDVTDDESFVDELRITLRFFASVLIRRIHKVDIPSIITKKLLKAAMKHIEVIVKARQKVKNTEFLQQAALEEYGPELHVALRSRRDELHYLRKLTELLFPYILPPKATDCRSLTLLIREILSGSVFLPSLDFLADPDTVNHLLIIFIDDSPPEKATEPASPLVPFLQKFAEPRNKKPSVLKLELKQIREQQDLLFRFMNFLKQEGAVHVLQFCLTVEEFNDRILRPELSNDEMLSLHEELQKIYKTYCLDESIDKIRFDPFIVEEIQRIAEGPYIDVVKLQTMRCLFEAYEHVLSLLENVFTPMFCHSDEYFRQLLRGAESPTRNSKLNRGSLSLDDFRNTQKRGESFGISRIGSKIKGVFKSTTMEGAMLPNYGVAEGEDDFIEEGIVVMEDDSPVEAVSTPNTPRNLAAWKISIPYVDFFEDPSSERKEKKERIPVFCIDVERNDRRAVGHEPEHWSVYRRYLEFYVLESKLTEFHGAFPDAQLPSKRIIGPKNYEFLKSKREEFQEYLQKLLQHPELSNSQLLADFLSPNGGETQFLDKILPDVNLGKIIKSVPGKLMKEKGQHLEPFIMNFINSCESPKPKPSRPELTILSPTSENNKKLFNDLFKNNANRAENTERKQNQNYFMEVMTVEGVYDYLMYVGRVVFQVPDWLHHLLMGTRILFKNTLEMYTDYYLQCKLEQLFQEHRLVSLITLLRDAIFCENTEPRSLQDKQKGAKQTFEEMMNYIPDLLVKCIGEETKYESIRLLFDGLQQPVLNKQLTYVLLDIVIQELFPELNKVQKEVTSVTSWM

SEQ ID NO: 4386 - protein, 893 aa, Homo sapiens
MVPWVRTMGQKLKQRLRLDVGREICRQYPLFCFLLLCLSAASLLLNRYIHILMIFWSFVAGVVTFYCSLGPDSLLPNIFFTIKYKPKQLGLQELFPQGHSCAVCGKVKCKRHRPSLLLENYQPWLDLKISSKVDASLSEVDIPSIITKKLLKAAMKHIEVIVKARQKVKNTEFLQQAALEEYGPELHVALRSRRDELHYLRKLTELLFPYILPPKATDCRSLTLLIREILSGSVFLPSLDFLADPDTVNHLLIIFIDDSPPEKATEPASPLVPFLQKFAEPRNKKPSVLKLELKQIREQQDLLFRFMNFLKQEGAVHVLQFCLTVEEFNDRILRPELSNDEMLSLHEELQKIYKTYCLDESIDKIRFDPFIVEEIQRIAEGPYIDVVKLQTMRCLFEAYEHVLSLLENVFTPMFCHSDEYFRQLLRGAESPTRNSKLNRNTQKRGESFGISRIGSKIKGVFKSTTMEGAMLPNYGVAEGEDDFIEEGIVVMEDDSPVEAVSTPNTPRNLAAWKISIPYVDFFEDPSSERKEKKERIPVFCIDVERNDRRAVGHEPEHWSVYRRYLEFYVLESKLTEFHGAFPDAQLPSKRIIGPKNYEFLKSKREEFQEYLQKLLQHPELSNSQLLADFLSPNGGETQFLDKILPDVNLGKIIKSVPGKLMKEKGQHLEPFIMNFINSCESPKPKPSRPELTILSPTSENNKKLFNDLFKNNANRAENTERKQNQNYFMEVMTVEGVYDYLMYVGRVVFQVPDWLHHLLMGTRILFKNTLEMYTDYYLQCKLEQLFQEHRLVSLITLLRDAIFCENTEPRSLQDKQKGAKQTFEEMMNYIPDLLVKCIGEETKYESIRLLFDGLQQPVLNKQLTYVLLDIVIQELFPELNKVQKEVTSVTSWM

SEQ ID NO: 4387 - protein, 894 aa, Homo sapiens
MIFWSFVAGVVTFYCSLGPDSLLPNIFFTIKYKPKQLGLQELFPQGHSCAVCGKVKCKRHRPSLLLENYQPWLDLKISSKVDASLSEVLELVLENFVYPWYRDVTDDESFVDELRITLRFFASVLIRRIHKVDIPSIITKKLLKAAMKHIEVIVKARQKVKNTEFLQQAALEEYGPELHVALRSRRDELHYLRKLTELLFPYILPPKATDCRSLTLLIREILSGSVFLPSLDFLADPDTVNHLLIIFIDDSPPEKATEPASPLVPFLQKFAEPRNKKPSVLKLELKQIREQQDLLFRFMNFLKQEGAVHVLQFCLTVEEFNDRILRPELSNDEMLSLHEELQKIYKTYCLDESIDKIRFDPFIVEEIQRIAEGPYIDVVKLQTMRCLFEAYEHVLSLLENVFTPMFCHSDEYFRQLLRGAESPTRNSKLNRGSLSLDDFRNTQKRGESFGISRIGSKIKGVFKSTTMEGAMLPNYGVAEGEDDFIEEGIVVMEDDSPVEAVSTPNTPRNLAAWKISIPYVDFFEDPSSERKEKKERIPVFCIDVERNDRRAVGHEPEHWSVYRRYLEFYVLESKLTEFHGAFPDAQLPSKRIIGPKNYEFLKSKREEFQEYLQKLLQHPELSNSQLLADFLSPNGGETQFLDKILPDVNLGKIIKSVPGKLMKEKGQHLEPFIMNFINSCESPKPKPSRPELTILSPTSENNKKLFNDLFKNNANRAENTERKQNQNYFMEVMTVEGVYDYLMYVGRVVFQVPDWLHHLLMGTRILFKNTLEMYTDYYLQCKLEQLFQEHRLVSLITLLRDAIFCENTEPRSLQDKQKGAKQTFEEMMNYIPDLLVKCIGEETKYESIRLLFDGLQQPVLNKQLTYVLLDIVIQELFPELNKVQKEVTSVTSWM

SEQ ID NO: 4388 - protein, 937 aa, Homo sapiens
MVPWVRTMGQKLKQRLRLDVGREICRQYPLFCFLLLCLSAASLLLNRYIHILMIFWSFVAGVVTFYCSLGPDSLLPNIFFTIKYKPKQLGLQELFPQGHSCAVCGKVKCKRHRPSLLLENYQPWLDLKISSKVDASLSEVLELVLENFVYPWYRDVTDDESFVDELRITLRFFASVLIRRIHKVDIPSIITKKLLKAAMKHIEVIVKARQKVKNTEFLQQAALEEYGPELHVALRSRRDELHYLRKLTELLFPYILPPKATDCRSLTLLIREILSGSVFLPSLDFLADPDTVNHLLIIFIDDSPPEKATEPASPLVPFLQKFAEPRNKKPSVLKLELKQIREQQDLLFRFMNFLKQEGAVHVLQFCLTVEEFNDRILRPELSNDEMLSLHEELQKIYKTYCLDESIDKIRFDPFIVEEIQRIAEGPYIDVVKLQTMRCLFEAYEHVLSLLENVFTPMFCHSDEYFRQLLRGAESPTRNSKLNRNTQKRGESFGISRIGSKIKGVFKSTTMEGAMLPNYGVAEGEDDFIEEGIVVMEDDSPVEAVSTPNTPRNLAAWKISIPYVDFFEDPSSERKEKKERIPVFCIDVERNDRRAVGHEPEHWSVYRRYLEFYVLESKLTEFHGAFPDAQLPSKRIIGPKNYEFLKSKREEFQEYLQKLLQHPELSNSQLLADFLSPNGGETQFLDKILPDVNLGKIIKSVPGKLMKEKGQHLEPFIMNFINSCESPKPKPSRPELTILSPTSENNKKLFNDLFKNNANRAENTERKQNQNYFMEVMTVEGVYDYLMYVGRVVFQVPDWLHHLLMGTRILFKNTLEMYTDYYLQCKLEQLFQEHRLVSLITLLRDAIFCENTEPRSLQDKQKGAKQTFEEMMNYIPDLLVKCIGEETKYESIRLLFDGLQQPVLNKQLTYVLLDIVIQELFPELNKVQKEVTSVTSWM

SEQ ID NO: 4389 - protein, 418 aa, Homo sapiens
MAASMCDVFSFCVGVAGRARVSVEVRFVSSAKGKGLFATQLIRKGETIFVERPLVAAQFLWNALYRYRACDHCLRALEKAEENAQRLTGKPGQVLPHPELCTVRKDLHQNCPHCQVMYCSAECRLAATEQYHQVLCPGPSQDDPLHPLNKLQEAWRSIHYPPETASIMLMARMVATVKQAKDKDRWIRLFSQFCNKTANEEEEIVHKLLGDKFKGQLELLRRLFTEALYEEAVSQWFTPDGFRSLFALVGTNGQGIGTSSLSQWVHACDTLELKPQDREQLDAFIDQLYKDIEAATGEFLNCEGSGLFVLQSCCNHSCVPNAETSFPENNFLLHVTALEDIKPGEEICISYLDCCQRERSRHSRHKILRENYLFVCSCPKCLAEADEPNVTSEEEEEEEEEEEGEPEDAELGDEMTDV

SEQ ID NO: 4390 - protein, 926 aa, Homo sapiens
MTTKDYPSLWGFGTTKTFKIPIEHLDFKYIEKCSDVKHLEKILCVLRSGEEGYYPELTEFCEKHLQALAPESRALRKDKPAATAASFTAEEWEKIDGDIKSWVSEIKKEEDKMHFHETETFPAMKDNLPPVRGSNSCLHVGKEKYSKRPTKKKTPRDYAEWDKFDVEKECLKIDEDYKEKTVIDKSHLSKIETRIDTAGLTEKEKDFLATREKEKGNEAFNSGDYEEAVMYYTRSISALPTVVAYNNRAQAEIKLQNWNSAFQDCEKVLELEPGNVKALLRRATTYKHQNKLREATEDLSKVLDVEPDNDLAKKTLSEVERDLKNSEAASETQTKGKRMVIQEIENSEDEEGKSGRKHEDGGGDKKPAEPAGAARAAQPCVMGNIQKKLTGKAEGGKRPARGAPQRGQTPEAGADKRSPRRASAAAAAGGGATGHPGGGQGAENPAGLKSQGNELFRSGQFAEAAGKYSAAIALLEPAGSEIADDLSILYSNRAACYLKEGNCSGCIQDCNRALELHPFSMKPLLRRAMAYETLEQYGKAYVDYKTVLQIDCGLQLANDSVNRLSRILMELDGPNWREKLSPIPAVPASVPLQAWHPAKEMISKQAGDSSSHRQQGITDEKTFKALKEEGNQCVNDKNYKDALSKYSECLKINNKECAIYTNRALCYLKLCQFEEAKQDCDQALQLADGNVKAFYRRALAHKGLKNYQKSLIDLNKVILLDPSIIEAKMELEEVTRLLNLKDKTAPFNKEKERRKIEIQEVNEGKEEPGRPAGEVSMGCLASEKGGKSSRSPEDPEKLPIAKPNNAYEFGQIINALSTRKDKEACAHLLAITAPKDLPMFLSNKLEGDTFLLLIQSLKNNLIEKDPSLVYQHLLYLSKAERFKMMLTLISKGQKELIEQLFEDLSDTPNNHFTLEDIQALKRQYEL

SEQ ID NO: 4391 - protein, 416 aa, Homo sapiens
MTTKDYPSLWGFGTTKTFKIPIEHLDFKYIEKCSDVKHLEKILCVLRSGEEGYYPELTEFCEKHLQALAPESRALRKDKPAATAASFTAEEWEKIDGDIKSWVSEIKKEEDKMHFHETETFPAMKDNLPPVRGSNSCLHVGKEKYSKRPTKKKTPRDYAEWDKFDVEKECLKIDEDYKEKTVIDKSHLSKIETRIDTAGLTEKEKDFLATREKEKGNEAFNSGDYEEAVMYYTRSISALPTVVAYNNRAQAEIKLQNWNSAFQDCEKVLELEPGNVKALLRRATTYKHQNKLREATEDLSKVLDVEPDNDLAKKTLSEVERDLKNSEAASETQTKGKRMVIQEIENSEDEEGKSGRKHEDGGGDKSKIFFLFRLCKKLPFNMMSWLNFSIRTEIRNLSVFLALPCKFTSQFRSSFS

SEQ ID NO: 4392 - protein, 264 aa, Homo sapiens
MPRSFLVRKPSDPNRKPNYSELQDSNPEFTFQQPYDQAHLLAAIPPPEILNPTASLPMLIWDSVLAPQAQPIAWASLRLQESPRVAELTSLSDEDSGKGSQPPSPPSPAPSSFSSTSVSSLEAEAYAAFPGLGQVPKQLAQLSEAKDLQARKAFNCKYCNKEYLSLGALKMHIRSHTLPCVCGTCGKAFSRPWLLQGHVRTHTGEKPFSCPHCSRAFADRSNLRAHLQTHSDVKKYQCQACARTFSRMSLLHKHQESGCSGCPR

SEQ ID NO: 4393 - protein, 90 aa, Homo sapiens
MRLSVCLLLLTLALCCYRANAVVCQALGSEITGFLLAGKPVFKFQLAKFKAPLEAVAAKMEVKKCVDTMAYEKRVLITKTLGKIAEKCDR

SEQ ID NO: 4394 - protein, 437 aa, Homo sapiens
MAGGPPKALPSTGPHSLRDMPHPLAGSSSEEAVGGDSTPSPDLLMARSFGDKDLILPNGGTPAGTSSPASSSSLLNRLQLDDDIDGETRDLFVIVDDPKKHVCTMETYITYRITTKSTRVEFDLPEYSVRRRYQDFDWLRSKLEESQPTHLIPPLPEKFVVKGVVDRFSEEFVETRRKALDKFLKRITDHPVLSFNEHFNIFLTAKDLNAYKKQGIALLTRMGESVKHVTGGYKLRTRPLEFAAIGDYLDTFALKLGTIDRIAQRIIKEEIEYLVELREYGPVYSTWSALEGELAEPLEGVSACIGNCSTALEELTDDMTEDFLPVLREYILYSDSMKSVLKKRDQVQAEYEAKLEAVALRKEDRPKVPADVEKCQDRMECFNADLKADMERWQNNKRQDFRQLLMGMADKNIQYYEKCLMAWESIIPLLQEKQEAK

SEQ ID NO: 4395 - protein, 123 aa, Homo sapiens
MAQLPSAQMPAPRTQPDLILVHPVLALSGRAPSILCSVPWDACELLATAMWWKTRILWGVFLISRTRPPAPMQILILTLDPSEGEVCCKKRKPGQTGRNRVRMTTATCKPGGEASGETSPGTP

SEQ ID NO: 4396 - protein, 90 aa, Homo sapiens
MKLSVCLLLVTLALCCYQANAEFCPALVSELLDFFFISEPLFKLSLAKFDAPPEAVAAKLGVKRCTDQMSLQKRSLIAEVLVKILKKCSV

SEQ ID NO: 4397 - protein, 221 aa, Homo sapiens
MFGFHKPKMYRSIEGCCICRAKSSSSRFTDSKRYEKDFQSCFGLHETRSGDICNACVLLVKRWKKLPAGSKKNWNHVVDARAGPSLKTTLKPKKVKTLSGNRIKSNQISKLQKEFKRHNSDAHSTTSSASPAQSPCYSNQSDDGSDTEMASGSNRTPVFSFLDLTYWKRQKICCGIIYKGRFGEVLIDTHLFKPCCSNKKAAAEKPEEQGPEPLPISTQEW

SEQ ID NO: 4398 - protein, 73 aa, Homo sapiens
MASGSNRTPVFSFLDLTYWKRQKICCGIIYKGRFGEVLIDTHLFKPCCSNKKAAAEKPEEQGPEPLPISTQEW

SEQ ID NO: 4399 - protein, 258 aa, Homo sapiens
MHRRGVGAGAIAKKKLAEAKYKERGTVLAEDQLAQMSKQLDMFKTNLEEFASKHKQEIRKNPEFRVQFQDMCATIGVDPLASGKGFWSEMLGVGDFYYELGVQIIEVCLALKHRNGGLITLEELHQQVLKGRGKFAQDVSQDDLIRAIKKLKALGTGFGIIPVGGTYLIQSVPAELNMDHTVVLQLAEKNGYVTVSEIKASLKWETERARQVLEHLLKEGLAWLDLQAPGEAHYWLPALFTDLYSQEITAEEAREALP

SEQ ID NO: 4400 - protein, 257 aa, Homo sapiens
MHRRGVGAGAIAKKKLAEAKYKERGTVLAEDQLAQMSKQLDMFKTNLEEFASKHKQEIRKNPEFRVQFQDMCATIGVDPLASGKGFWSEMLGVGDFYYELGVQIIEVCLALKHRNGGLITLEELHQQVLKGRGKFAQDVSQDDLIRAIKKLKALGTGFGIIPVGGTYLIQSVPAELNMDHTVVLQLAENGYVTVSEIKASLKWETERARQVLEHLLKEGLAWLDLQAPGEAHYWLPALFTDLYSQEITAEEAREALP

SEQ ID NO: 4401 - protein, 235 aa, Homo sapiens
MGMLAPGPLQGRRPRKGHKGQEDAVAPGCKASGRGSRVTHLLGYPTQNVSRSLRRKYAPPPCGGPEDVALAPCTAAAACEAGPSPVYVKVKSAEPADCAEGPVQCKNGLLVSSPHCEEPCAHSCAHPGLPPHLVHKLPLSYLQTQDTDAASRRINAPLAAGWSWLRLWLVTLASGVDFPQVSAWMRALPSPDCPGLRTTGEQMQKLLLKENKVKTRKSKRRSGEGSHLTTSILEQ

SEQ ID NO: 4402 - protein, 302 aa, Homo sapiens
MEPGPDGPAASGPAAIREGWFRETCSLWPGQALSLQVEQLLHHRRSRYQDILVFRSKTYGNVLVLDGVIQCTERDEFSYQEMIANLPLCSHPNPRKVLIIGGGDGGVLREVVKHPSVESVVQCEIDEDVIQVSKKFLPGMAIGYSSSKLTLHVGDGFEFMKQNQDAFDVIITDSSDPMGPAESLFKESYYQLMKTALKEDGVLCCQGECQWLHLDLIKEMRQFCQSLFPVVAYAYCTIPTYPSGQIGFMLCSKNPSTNFQEPVQPLTQQQVAQMQLKYYNSDVHRAAFVLPEFARKALNDVS

SEQ ID NO: 4403 - protein, 781 aa, Homo sapiens
MTAPEKPVKQEEMAALDVDSGGGGGGGGGHGEYLQQQQQHGNGAVAAAAAAQDTQPSPLALLAATCSKIGPPSPGDDEEEAAAAAGAPAAAGATGDLASAQLGGAPNRWEVLSATPTTIKDEAGNLVQIPSAATSSGQYVLPLQNLQNQQIFSVAPGSDSSNGTVSSVQYQVIPQIQSADGQQVQIGFTGSSDNGGINQESSQIQIIPGSNQTLLASGTPSANIQNLIPQTGQVQVQGVAIGGSSFPGQTQVVANVPLGLPGNITFVPINSVDLDSLGLSGSSQTMTAGINADGHLINTGQAMDSSDNSERTGERVSPDINETNTDTDLFVPTSSSSQLPVTIDSTGILQQNTNSLTTSSGQVHSSDLQGNYIQSPVSEETQAQNIQVSTAQPVVQHLQLQESQQPTSQAQIVQGITPQTIHGVQASGQNISQQALQNLQLQLNPGTFLIQAQTVTPSGQVTWQTFQVQGVQNLQNLQIQNTAAQQITLTPVQTLTLGQVAAGGAFTSTPVSLSTGQLPNLQTVTVNSIDSAGIQLHPGENADSPADIRIKEEEPDPEEWQLSGDSTLNTNDLTHLRVQVVDEEGDQQHQEGKRLRRVACTCPNCKEGGGRGTNLGKKKQHICHIPGCGKVYGKTSHLRAHLRWHSGERPFVCNWMYCGKRFTRSDELQRHRRTHTGEKKFVCPECSKRFMRSDHLAKHIKTHQNKKGIHSSSTVLASVEAARDDTLITAGGTTLILANIQQGSVSGIGTVNTSATSNQDILTNTEIPLQLVTVSGNETME

SEQ ID NO: 4404 - protein, 769 aa, Homo sapiens
MAALDVDSGGGGGGGGGHGEYLQQQQQHGNGAVAAAAAAQDTQPSPLALLAATCSKIGPPSPGDDEEEAAAAAGAPAAAGATGDLASAQLGGAPNRWEVLSATPTTIKDEAGNLVQIPSAATSSGQYVLPLQNLQNQQIFSVAPGSDSSNGTVSSVQYQVIPQIQSADGQQVQIGFTGSSDNGGINQESSQIQIIPGSNQTLLASGTPSANIQNLIPQTGQVQVQGVAIGGSSFPGQTQVVANVPLGLPGNITFVPINSVDLDSLGLSGSSQTMTAGINADGHLINTGQAMDSSDNSERTGERVSPDINETNTDTDLFVPTSSSSQLPVTIDSTGILQQNTNSLTTSSGQVHSSDLQGNYIQSPVSEETQAQNIQVSTAQPVVQHLQLQESQQPTSQAQIVQGITPQTIHGVQASGQNISQQALQNLQLQLNPGTFLIQAQTVTPSGQVTWQTFQVQGVQNLQNLQIQNTAAQQITLTPVQTLTLGQVAAGGAFTSTPVSLSTGQLPNLQTVTVNSIDSAGIQLHPGENADSPADIRIKEEEPDPEEWQLSGDSTLNTNDLTHLRVQVVDEEGDQQHQEGKRLRRVACTCPNCKEGGGRGTNLGKKKQHICHIPGCGKVYGKTSHLRAHLRWHSGERPFVCNWMYCGKRFTRSDELQRHRRTHTGEKKFVCPECSKRFMRSDHLAKHIKTHQNKKGIHSSSTVLASVEAARDDTLITAGGTTLILANIQQGSVSGIGTVNTSATSNQDILTNTEIPLQLVTVSGNETME

SEQ ID NO: 4405 - protein, 496 aa, Homo sapiens
MTAGINADGHLINTGQAMDSSDNSERTGERVSPDINETNTDTDLFVPTSSSSQLPVTIDSTGILQQNTNSLTTSSGQVHSSDLQGNYIQSPVSEETQAQNIQVSTAQPVVQHLQLQESQQPTSQAQIVQGITPQTIHGVQASGQNISQQALQNLQLQLNPGTFLIQAQTVTPSGQVTWQTFQVQGVQNLQNLQIQNTAAQQITLTPVQTLTLGQVAAGGAFTSTPVSLSTGQLPNLQTVTVNSIDSAGIQLHPGENADSPADIRIKEEEPDPEEWQLSGDSTLNTNDLTHLRVQVVDEEGDQQHQEGKRLRRVACTCPNCKEGGGRGTNLGKKKQHICHIPGCGKVYGKTSHLRAHLRWHSGERPFVCNWMYCGKRFTRSDELQRHRRTHTGEKKFVCPECSKRFMRSDHLAKHIKTHQNKKGIHSSSTVLASVEAARDDTLITAGGTTLILANIQQGSVSGIGTVNTSATSNQDILTNTEIPLQLVTVSGNETME

SEQ ID NO: 4406 - protein, 479 aa, Homo sapiens
MDSSDNSERTGERVSPDINETNTDTDLFVPTSSSSQLPVTIDSTGILQQNTNSLTTSSGQVHSSDLQGNYIQSPVSEETQAQNIQVSTAQPVVQHLQLQESQQPTSQAQIVQGITPQTIHGVQASGQNISQQALQNLQLQLNPGTFLIQAQTVTPSGQVTWQTFQVQGVQNLQNLQIQNTAAQQITLTPVQTLTLGQVAAGGAFTSTPVSLSTGQLPNLQTVTVNSIDSAGIQLHPGENADSPADIRIKEEEPDPEEWQLSGDSTLNTNDLTHLRVQVVDEEGDQQHQEGKRLRRVACTCPNCKEGGGRGTNLGKKKQHICHIPGCGKVYGKTSHLRAHLRWHSGERPFVCNWMYCGKRFTRSDELQRHRRTHTGEKKFVCPECSKRFMRSDHLAKHIKTHQNKKGIHSSSTVLASVEAARDDTLITAGGTTLILANIQQGSVSGIGTVNTSATSNQDILTNTEIPLQLVTVSGNETME

SEQ ID NO: 4407 - protein, 713 aa, Homo sapiens
MGPPSPGDDEEEAAAAAGAPAAAGATGDLASAQLGGAPNRWEVLSATPTTIKDEAGNLVQIPSAATSSGQYVLPLQNLQNQQIFSVAPGSDSSNGTVSSVQYQVIPQIQSADGQQVQIGFTGSSDNGGINQESSQIQIIPGSNQTLLASGTPSANIQNLIPQTGQVQVQGVAIGGSSFPGQTQVVANVPLGLPGNITFVPINSVDLDSLGLSGSSQTMTAGINADGHLINTGQAMDSSDNSERTGERVSPDINETNTDTDLFVPTSSSSQLPVTIDSTGILQQNTNSLTTSSGQVHSSDLQGNYIQSPVSEETQAQNIQVSTAQPVVQHLQLQESQQPTSQAQIVQGITPQTIHGVQASGQNISQQALQNLQLQLNPGTFLIQAQTVTPSGQVTWQTFQVQGVQNLQNLQIQNTAAQQITLTPVQTLTLGQVAAGGAFTSTPVSLSTGQLPNLQTVTVNSIDSAGIQLHPGENADSPADIRIKEEEPDPEEWQLSGDSTLNTNDLTHLRVQVVDEEGDQQHQEGKRLRRVACTCPNCKEGGGRGTNLGKKKQHICHIPGCGKVYGKTSHLRAHLRWHSGERPFVCNWMYCGKRFTRSDELQRHRRTHTGEKKFVCPECSKRFMRSDHLAKHIKTHQNKKGIHSSSTVLASVEAARDDTLITAGGTTLILANIQQGSVSGIGTVNTSATSNQDILTNTEIPLQLVTVSGNETME

SEQ ID NO: 4408 - protein, 728 aa, Homo sapiens
MAALDVDSGGGGGGGGGHGEYLQQQQQHGNGAVAAAAAAQTGDLASAQLGGAPNRWEVLSATPTTIKDEAGNLVQIPSAATSSGQYVLPLQNLQNQQIFSVAPGSDSSNGTVSSVQYQVIPQIQSADGQQVQIGFTGSSDNGGINQESSQIQIIPGSNQTLLASGTPSANIQNLIPQTGQVQVQGVAIGGSSFPGQTQVVANVPLGLPGNITFVPINSVDLDSLGLSGSSQTMTAGINADGHLINTGQAMDSSDNSERTGERVSPDINETNTDTDLFVPTSSSSQLPVTIDSTGILQQNTNSLTTSSGQVHSSDLQGNYIQSPVSEETQAQNIQVSTAQPVVQHLQLQESQQPTSQAQIVQGITPQTIHGVQASGQNISQQALQNLQLQLNPGTFLIQAQTVTPSGQVTWQTFQVQGVQNLQNLQIQNTAAQQITLTPVQTLTLGQVAAGGAFTSTPVSLSTGQLPNLQTVTVNSIDSAGIQLHPGENADSPADIRIKEEEPDPEEWQLSGDSTLNTNDLTHLRVQVVDEEGDQQHQEGKRLRRVACTCPNCKEGGGRGTNLGKKKQHICHIPGCGKVYGKTSHLRAHLRWHSGERPFVCNWMYCGKRFTRSDELQRHRRTHTGEKKFVCPECSKRFMRSDHLAKHIKTHQNKKGIHSSSTVLASVEAARDDTLITAGGTTLILANIQQGSVSGIGTVNTSATSNQDILTNTEIPLQLVTVSGNETME

SEQ ID NO: 4409 - protein, 265 aa, Homo sapiens; identical to SEQ ID NO: 4138

SEQ ID NO: 4410 - protein, 59 aa, Homo sapiens
MRQLKGKPKKETSKDKKERKQAMQEARQQITTVVLPTLAVVVLLIVVFVYVATRPTITE

SEQ ID NO: 4411 - protein, 593 aa, Homo sapiens
MAPSGLKAVVGEKILSGVIRSVKKDGEWKVLIMDHPSMRILSSCCKMSDILAEGITIVEDINKRREPIPSLEAIYLLSPTEKSVQALIKDFQGTPTFTYKAAHIFFTDTCPEPLFSELGRSRLAKVVKTLKEIHLAFLPYEAQVFSLDAPHSTYNLYCPFRAEERTRQLEVLAQQIATLCATLQEYPAIRYRKGPEDTAQLAHAVLAKLNAFKADTPSLGEGPEKTRSQLLIMDRAADPVSPLLHELTFQAMAYDLLDIEQDTYRYETTGLSEAREKAVLLDEDDDLWVELRHMHIADVSKKVTELLRTFCESKRLTTDKANIKDLSQILKKMPQYQKELNKYSTHLHLADDCMKHFKGSVEKLCSVEQDLAMGSDAEGEKIKDSMKLIVPVLLDAAVPAYDKIRVLLLYILLRNGVSEENLAKLIQHANVQAHSSLIRNLEQLGGTVTNPGGSGTSSRLEPRERMEPTYQLSRWTPVIKDVMEDAVEDRLDRNLWPFVSDPAPTASSQAAVSARFGHWHKNKAGIEARAGPRLIVYVMGGVAMSEMRAAYEVTRATEGKWEVLIGSSHILTPTRFLDDLKALDKKLEDIALP

SEQ ID NO: 4412 - protein, 590 aa, Homo sapiens
MAPSGLKAVVGEKILSGVIRSVKKDGEWKVLIMDHPSMRILSSCCKMSDILAEGITIVEDINKRREPIPSLEAIYLLSPTEKALIKDFQGTPTFTYKAAHIFFTDTCPEPLFSELGRSRLAKVVKTLKEIHLAFLPYEAQVFSLDAPHSTYNLYCPFRAEERTRQLEVLAQQIATLCATLQEYPAIRYRKGPEDTAQLAHAVLAKLNAFKADTPSLGEGPEKTRSQLLIMDRAADPVSPLLHELTFQAMAYDLLDIEQDTYRYETTGLSEAREKAVLLDEDDDLWVELRHMHIADVSKKVTELLRTFCESKRLTTDKANIKDLSQILKKMPQYQKELNKYSTHLHLADDCMKHFKGSVEKLCSVEQDLAMGSDAEGEKIKDSMKLIVPVLLDAAVPAYDKIRVLLLYILLRNGVSEENLAKLIQHANVQAHSSLIRNLEQLGGTVTNPGGSGTSSRLEPRERMEPTYQLSRWTPVIKDVMEDAVEDRLDRNLWPFVSDPAPTASSQAAVSARFGHWHKNKAGIEARAGPRLIVYVMGGVAMSEMRAAYEVTRATEGKWEVLIGSSHILTPTRFLDDLKALDKKLEDIALP

SEQ ID NO: 4413 - protein, 604 aa, Homo sapiens
MAPSGLKAVVGEKILSGVIRSVKKDGEWKVLIMDHPSMRILSSCCKMSDILAEGITIVEDINKRREPIPSLEAIYLLSPTEKAQAQRVIHLPQSVQALIKDFQGTPTFTYKAAHIFFTDTCPEPLFSELGRSRLAKVVKTLKEIHLAFLPYEAQVFSLDAPHSTYNLYCPFRAEERTRQLEVLAQQIATLCATLQEYPAIRYRKGPEDTAQLAHAVLAKLNAFKADTPSLGEGPEKTRSQLLIMDRAADPVSPLLHELTFQAMAYDLLDIEQDTYRYETTGLSEAREKAVLLDEDDDLWVELRHMHIADVSKKVTELLRTFCESKRLTTDKANIKDLSQILKKMPQYQKELNKYSTHLHLADDCMKHFKGSVEKLCSVEQDLAMGSDAEGEKIKDSMKLIVPVLLDAAVPAYDKIRVLLLYILLRNGVSEENLAKLIQHANVQAHSSLIRNLEQLGGTVTNPGGSGTSSRLEPRERMEPTYQLSRWTPVIKDVMEDAVEDRLDRNLWPFVSDPAPTASSQAAVSARFGHWHKNKAGIEARAGPRLIVYVMGGVAMSEMRAAYEVTRATEGKWEVLIGSSHILTPTRFLDDLKALDKKLEDIALP

SEQ ID NO: 4414 - protein, 236 aa, Homo sapiens
MAPDPWFSTYDSTCQIAQEIAEKIQQRNQYERKGEKAPKLTVTIRALLQNLKEKIALLKDLLLRAVSTHQITQLEGDRRQNLLDDLVTRERLLLASFKNEGAEPDLIRSSLMSEEAKRGAPNPWLFEEPEETRGLGFDEIRQQQQKIIQEQDAGLDALSSIISRQKQMGQEIGNELDEQNEIIDDLANLVENTDEKLRNETRRVNMVDRKSASCGMIMVILLLLVAIVVVAVWPTN

SEQ ID NO: 4415 - protein, 379 aa, Homo sapiens
MPHSSLHPSIPCPRGHGAQKAALVLLSACLVTLWGLGEPPEHTLRYLVLHLASLQLGLLLNGVCSLAEELRHIHSRYRGSYWRTVRACLGCPLRRGALLLLSIYFYYSLPNAVGPPFTWMLALLGLSQALNILLGLKGLAPAEISAVCEKGNFNVAHGLAWSYYIGYLRLILPELQARIRTYNQHYNNLLRGAVSQRLYILLPLDCGVPDNLSMADPNIRFLDKLPQQTGDHAGIKDRVYSNSIYELLENGQRAGTCVLEYATPLQTLFAMSQYSQAGFSREDRLEQAKLFCRTLEDILADAPESQNNCRLIAYQEPADDSSFSLSQEVLRHLRQEEKEEVTVGSLKTSAVPSTSTMSQEPELLISGMEKPLPLRTDFS

SEQ ID NO: 4416 - protein, 137 aa, Homo sapiens
MGLRAGGTLGRAGAGRGAPEGPGPSGGAQGGSIHSGRIAAVHNVPLSVLIRPLPSVLDPAKVQSLVDTIREDPDSVPPIDVLWIKGAQGGDYFYSFGGCHRYAAYQQLQRETIPAKLVQSTLSDLRVYLGASTPDLQ

SEQ ID NO: 4417 - protein, 308 aa, Homo sapiens
MGNTLGLAPMGTLPRRSPRREEPLPNPGSFDELHRLCKDVFPAQMEGVKLVVNKVLSSHFQVAHTIHMSALGLPGYHLHAAYAGDWQLSPTEVFPTVVGDMDSSGSLNAQVLLLLAERLRAKAVFQTQQAKFLTWQFDGEYRGDDYTATLTLGNPDLIGESVIMVAHFLQSLTHRLVLGGELVYHRRPGEEGAILTLAGKYSAVHWVATLNVGSGGAHASYYHRANEQVQVGVEFEANTRLQDTTFSFGYHLTLPQANMVFRGLVDSNWCVGAVLEKKMPPLPVTLALGAFLNHWRNRFHCGFSITVG

SEQ ID NO: 4418 - protein, 274 aa, Homo sapiens
MGNTLGLAPMGTLPRRSPRREEPLPNPGSFDELHRLCKDVFPAQMEGVKLVVNKVLSSHFQVAHTIHMSALGLPGYHLHAAYAGDWQLSPTETQQAKFLTWQFDGEYRGDDYTATLTLGNPDLIGESVIMVAHFLQSLTHRLVLGGELVYHRRPGEEGAILTLAGKYSAVHWVATLNVGSGGAHASYYHRANEQVQVGVEFEANTRLQDTTFSFGYHLTLPQANMVFRGLVDSNWCVGAVLEKKMPPLPVTLALGAFLNHWRNRFHCGFSITVG

SEQ ID NO: 4419 - protein, 585 aa, Homo sapiens
MAEAATGFLEQLKSCIVWSWTYLWTVWFFIVLFLVYILRVPLKINDNLSTVSMFLNTLTPKFYVALTGTSSLISGLILIFEWWYFRKYGTSFIEQVSVSHLRPLLGGVDNNSSNNSNSSNGDSDSNRQSVSECKVWRNPLNLFRGAEYNRYTWVTGREPLTYYDMNLSAQDHQTFFTCDSDHLRPADAIMQKAWRERNPQARISAAHEALEINEIRSRVEVPLIASSTIWEIKLLPKCATAYILLAEEEATTIAEAEKLFKQALKAGDGCYRRSQQLQHHGSQYEAQHRRDTNVLVYIKRRLAMCARRLGRTREAVKMMRDLMKEFPLLSMFNIHENLLEALLELQAYADVQAVLAKYDDISLPKSATICYTAALLKARAVSDKFSPEAASRRGLSTAEMNAVEAIHRAVEFNPHVPKYLLEMKSLILPPEHILKRGDSEAIAYAFFHLAHWKRVEGALNLLHCTWEGTFRMIPYPLEKGHLFYPYPICTETADRELLPSFHEVSVYPKKELPFFILFTAGLCSFTAMLALLTHQFPELMGVFAKAMIDIFCSAEFRDWNCKSIFMRVEDELEIPPAPQSQHFQN

SEQ ID NO: 4420 - protein, 554 aa, Homo sapiens
MAEAATGFLEQLKSCIVWSWTYLWTVWFFIVLFLVYILRVPLKINDNLSTVSMFLNTLTPKFYVALTGTSSLISGLILIFEWWYFRKYGTSFIEQVSVSHLRPLLGGVDNNSSNNSNSSNGDSDSNRQSVSECKVWRNPLNLFRGAEYNRYTWVTGREPLTYYDMNLSAQDHQTFFTCDSDHLRPADAIMQKAWRERNPQARISAAHEALEINECATAYILLAEEEATTIAEAEKLFKQALKAGDGCYRRSQQLQHHGSQYEAQHRRDTNVLVYIKRRLAMCARRLGRTREAVKMMRDLMKEFPLLSMFNIHENLLEALLELQAYADVQAVLAKYDDISLPKSATICYTAALLKARAVSDKFSPEAASRRGLSTAEMNAVEAIHRAVEFNPHVPKYLLEMKSLILPPEHILKRGDSEAIAYAFFHLAHWKRVEGALNLLHCTWEGTFRMIPYPLEKGHLFYPYPICTETADRELLPSFHEVSVYPKKELPFFILFTAGLCSFTAMLALLTHQFPELMGVFAKAFLSTLFAPLNFVMEKVESILPSSLWHQLTRI

SEQ ID NO: 4421 - protein, 547 aa, Homo sapiens
MAEAATGFLEQLKSCIVWSWTYLWTVWFFIVLFLVYILRVPLKINDNLSTVSMFLNTLTPKFYVALTGTSSLISGLILIFEWWYFRKYGTSFIEQVSVSHLRPLLGGVDNNSSNNSDSNRQSVSECKVWRNPLNLFRGAEYNRYTWVTGREPLTYYDMNLSAQDHQTFFTCDSDHLRPADAIMQKAWRERNPQARISAAHEALEINECATAYILLAEEEATTIAEAEKLFKQALKAGDGCYRRSQQLQHHGSQYEAQHRRDTNVLVYIKRRLAMCARRLGRTREAVKMMRDLMKEFPLLSMFNIHENLLEALLELQAYADVQAVLAKYDDISLPKSATICYTAALLKARAVSDKFSPEAASRRGLSTAEMNAVEAIHRAVEFNPHVPKYLLEMKSLILPPEHILKRGDSEAIAYAFFHLAHWKRVEGALNLLHCTWEGTFRMIPYPLEKGHLFYPYPICTETADRELLPSFHEVSVYPKKELPFFILFTAGLCSFTAMLALLTHQFPELMGVFAKAFLSTLFAPLNFVMEKVESILPSSLWHQLTRI

SEQ ID NO: 4422 - protein, 534 aa, Homo sapiens
MFGTESSVSMFLNTLTPKFYVALTGTSSLISGLILIFEWWYFRKYGTSFIEQVSVSHLRPLLGGVDNNSSNNSNSSNGDSDSNRQSVSECKVWRNPLNLFRGAEYNRYTWVTGREPLTYYDMNLSAQDHQTFFTCDSDHLRPADAIMQKAWRERNPQARISAAHEALEINEIRSRVEVPLIASSTIWEIKLLPKCATAYILLAEEEATTIAEAEKLFKQALKAGDGCYRRSQQLQHHGSQYEAQHRRDTNVLVYIKRRLAMCARRLGRTREAVKMMRDLMKEFPLLSMFNIHENLLEALLELQAYADVQAVLAKYDDISLPKSATICYTAALLKARAVSDKFSPEAASRRGLSTAEMNAVEAIHRAVEFNPHVPKYLLEMKSLILPPEHILKRGDSEAIAYAFFHLAHWKRVEGALNLLHCTWEGTFRMIPYPLEKGHLFYPYPICTETADRELLPSFHEVSVYPKKELPFFILFTAGLCSFTAMLALLTHQFPELMGVFAKAFLSTLFAPLNFVMEKVESILPSSLWHQLTRI

SEQ ID NO: 4423 - protein, 511 aa, Homo sapiens
MFGTESSVSMFLNTLTPKFYVALTGTSSLISGLILIFEWWYFRKYGTSFIEQVSVSHLRPLLGGVDNNSSNNSNSSNGDSDSNRQSVSECKVWRNPLNLFRGAEYNRYTWVTGREPLTYYDMNLSAQDHQTFFTCDSDHLRPADAIMQKAWRERNPQARISAAHEALEINECATAYILLAEEEATTIAEAEKLFKQALKAGDGCYRRSQQLQHHGSQYEAQHRRDTNVLVYIKRRLAMCARRLGRTREAVKMMRDLMKEFPLLSMFNIHENLLEALLELQAYADVQAVLAKYDDISLPKSATICYTAALLKARAVSDKFSPEAASRRGLSTAEMNAVEAIHRAVEFNPHVPKYLLEMKSLILPPEHILKRGDSEAIAYAFFHLAHWKRVEGALNLLHCTWEGTFRMIPYPLEKGHLFYPYPICTETADRELLPSFHEVSVYPKKELPFFILFTAGLCSFTAMLALLTHQFPELMGVFAKAFLSTLFAPLNFVMEKVESILPSSLWHQLTRI

SEQ ID NO: 4424 - protein, 499 aa, Homo sapiens
MSMFLNTLTPKFYVALTGTSSLISGLILIFEWWYFRKYGTSFIEQVSVSHLRPLLGGVDNNSSNNSNSSNGDSDSNRQSVSECKVWRNPLNLFRGAEYNRYTWVTGREPLTYYDMNLSAQDHQTFFTCDSDHLRPADAIMQKAWRERNPQARISAAHEALEINECATAYILLAEEEATTIAEAEKLFKQALKAGDGCYRRSQQLQHHGSQYEAQHRRDTNVLVYIKRRLAMCARRLGRTREAVKMMRDLMKEFPLLSMFNIHENLLEALLELQAYADVQAVLAKYDDISLPKSATICYTAALLKARAVSDKFSPEAASRRGLSTAEMNAVEAIHRAVEFNPHVPKYLLEMKSLILPPEHILKRGDSEAIAYAFFHLAHWKRVEGALNLLHSFRMIPYPLEKGHLFYPYPICTETADRELLPSFHEVSVYPKKELPFFILFTAGLCSFTAMLALLTHQFPELMGVFAKAFLSTLFAPLNFVMEKVESILPSSLWHQLTRI

SEQ ID NO: 4425 - protein, 399 aa, Homo sapiens
MAEAATGFLEQLKSCIVWSWTYLWTVWFFIVLFLVYILRVPLKINDNLSTVSMFLNTLTPKFYVALTGTSSLISGLILIFEWWYFRKYGTSFIEQVSVSHLRPLLGGVDNNSSNNSNSSNGDSDSNRQSVSECKVWRNPLNLFRGAEYNRYTWVTGREPLTYYDMNLSAQDHQTFFTCDSDHLRPADAIMQKAWRERNPQARISAAHEALEINECATAYILLAEEEATTIAEAEKLFKQALKAGDGCYRRSQQLQHHGSQYEAQHRRDTNVLVYIKRRLAMCARRLGRTREAVKMMRDLMKEFPLLSMFNIHENLLEALLELQAYADVQAVLAKYDDISLPKSATICYTAALLKARAVSDKFSPEAASRRGLSTAEMNAVEAIHRAVEFNPHVPKARWK

SEQ ID NO: 4426 - protein, 101 aa, Homo sapiens
MSDQEAKPSTEDLGDKKEGEYIKLKVIGQDSSEIHFKVKMTTHLKKLKESYCQRQGVPMNSLRFLFEGQRIADNHTPKELGMEEEDVIEVYQEQTGGHSTV

SEQ ID NO: 4427 - protein, 76 aa, Homo sapiens
MSDQDSSEIHFKVKMTTHLKKLKESYCQRQGVPMNSLRFLFEGQRIADNHTPKELGMEEEDVIEVYQEQTGGHSTV

SEQ ID NO: 4428 - protein, 2570 aa, Homo sapiens
MAGPRGLLPLCLLAFCLAGFSFVRGQVLFKGCDVKTTFVTHVPCTSCAAIKKQTCPSGWLRELPDQITQDCRYEVQLGGSMVSMSGCRRKCRKQVVQKACCPGYWGSRCHECPGGAETPCNGHGTCLDGMDRNGTCVCQENFRGSACQECQDPNRFGPDCQSVCSCVHGVCNHGPRGDGSCLCFAGYTGPHCDQELPVCQELRCPQNTQCSAEAPSCRCLPGYTQQGSECRAPNPCWPSPCSLLAQCSVSPKGQAQCHCPENYHGDGMVCLPKDPCTDNLGGCPSNSTLCVYQKPGQAFCTCRPGLVSINSNASAGCFAFCSPFSCDRSATCQVTADGKTSCVCRESEVGDGRACYGHLLHEVQKATQTGRVFLQLRVAVAMMDQGCREILTTAGPFTVLVPSVSSFSSRTMNASLAQQLCRQHIIAGQHILEDTRTQQTRRWWTLAGQEITVTFNQFTKYSYKYKDQPQQTFNIYKANNIAANGVFHVVTGLRWQAPSGTPGDPKRTIGQILASTEAFSRFETILENCGLPSILDGPGPFTVFAPSNEAVDSLRDGRLIYLFTAGLSKLQELVRYHIYNHGQLTVEKLISKGRILTMANQVLAVNISEEGRILLGPEGVPLQRVDVMAANGVIHMLDGILLPPTILPILPKHCSEEQHKIVAGSCVDCQALNTSTCPPNSVKLDIFPKECVYIHDPTGLNVLKKGCASYCNQTIMEQGCCKGFFGPDCTQCPGGFSNPCYGKGNCSDGIQGNGACLCFPDYKGIACHICSNPNKHGEQCQEDCGCVHGLCDNRPGSGGVCQQGTCAPGFSGRFCNESMGDCGPTGLAQHCHLHARCVSQEGVARCRCLDGFEGDGFSCTPSNPCSHPDRGGCSENAECVPGSLGTHHCTCHKGWSGDGRVCVAIDECELDMRGGCHTDALCSYVGPGQSRCTCKLGFAGDGYQCSPIDPCRAGNGGCHGLATCRAVGGGQRVCTCPPGFGGDGFSCYGDIFRELEANAHFSIFYQWLKSAGITLPADRRVTALVPSEAAVRQLSPEDRAFWLQPRTLPNLVRAHFLQGALFEEELARLGGQEVATLNPTTRWEIRNISGRVWVQNASVDVADLLATNGVLHILSQVLLPPRGDVPGGQGLLQQLDLVPAFSLFRELLQHHGLVPQIEAATAYTIFVPTNRSLEAQGNSSHLDADTVRHHVVLGEALSMETLRKGGHRNSLLGPAHWIVFYNHSGQPEVNHVPLEGPMLEAPGRSLIGLSGVLTVGSSRCLHSHAEALREKCVNCTRRFRCTQGFQLQDTPRKSCVYRSGFSFSRGCSYTCAKKIQVPDCCPGFFGTLCEPCPGGLGGVCSGHGQCQDRFLGSGECHCHEGFHGTACEVCELGRYGPNCTGVCDCAHGLCQEGLQGDGSCVCNVGWQGLRCDQKITSPQCPRKCDPNANCVQDSAGASTCACAAGYSGNGIFCSEVDPCAHGHGGCSPHANCTKVAPGQRTCTCQDGYMGDGELCQEINSCLIHHGGCHIHAECIPTGPQQVSCSCREGYSGDGIRTCELLDPCSKNNGGCSPYATCKSTGDGQRTCTCDTAHTVGDGLTCRARVGLELLRDKHASFFSLRLLEYKELKGDGPFTIFVPHADLMSNLSQDELARIRAHRQLVFRYHVVGCRRLRSEDLLEQGYATALSGHPLRFSEREGSIYLNDFARVVSSDHEAVNGILHFIDRVLLPPEALHWEPDDAPIPRRNVTAAAQGFGYKIFSGLLKVAGLLPLLREASHRPFTMLWPTDAAFRALPPDRQAWLYHEDHRDKLAAILRGHMIRNVEALASDLPNLGPLRTMHGTPISFSCSRTRAGELMVGEDDARIVQRHLPFEGGLAYGIDQLLEPPGLGARCDHFETRPLRLNTCSICGLEPPCPEGSQEQGSPEACWRFYPKFWTSPPLHSLGLRSVWVHPSLWGRPQGLGRGCHRNCVTTTWKPSCCPGHYGSECQACPGGPSSPCSDRGVCMDGMSGSGQCLCRSGFAGTACELCAPGAFGPHCQACRCTVHGRCDEGLGGSGSCFCDEGWTGPRCEVQLELQPVCTPPCAPEAVCRAGNSCECSLGYEGDGRVCTVADLCQDGHGGCSEHANCSQVGTMVTCTCLPDYEGDGWSCRARNPCTDGHRGGCSEHANCLSTGLNTRRCECHAGYVGDGLQCLEESEPPVDRCLGQPPPCHSDAMCTDLHFQEKRAGVFHLQATSGPYGLNFSEAEAACEAQGAVLASFPQLSAAQQLGFHLCLMGWLANGSTAHPVVFPVADCGNGRVGIVSLGARKNLSERWDAYCFRVQDVACRCRNGFVGDGISTCNGKLLDVLAATANFSTFYGMLLGYANATQRGLDFLDFLDDELTYKTLFVPVNEGFVDNMTLSGPDLELHASNATLLSANASQGKLLPAHSGLSLIISDAGPDNSSWAPVAPGTVVVSRIIVWDIMAFNGIIHALASPLLAPPQPQAVLAPEAPPVAAGVGAVLAAGALLGLVAGALYLRARGKPMGFGFSAFQAEDDADDDFSPWQEGTNPTLVSVPNPVFGSDTFCEPFDDSLLEEDFPDTQRILTVK

SEQ ID NO: 4429 - protein, 803 aa, Homo sapiens
MAGPRGLLPLCLLAFCLAGFSFVRGQVLFKGCDVKTTFVTHVPCTSCAAIKKQTCPSGWLRELPDQITQDCRYEVQLGGSMVSMSGCRRKCRKQVVQKACCPGYWGSRCHECPGGAETPCNGHGTCLDGMDRNGTCVCQENFRGSACQECQDPNRFGPDCQSVCSCVHGVCNHGPRGDGSCLCFAGYTGPHCDQELPVCQELRCPQNTQCSAEAPSCRCLPGYTQQGSECRAPNPCWPSPCSLLAQCSVSPKGQAQCHCPENYHGDGMVCLPKDPCTDNLGGCPSNSTLCVYQKPGQAFCTCRPGLVSINSNASAGCFAFCSPFSCDRSATCQVTADGKTSCVCRESEVGDGRACYGHLLHEVQKATQTGRVFLQLRVAVAMMDQGCREILTTAGPFTVLVPSVSSFSSRTMNASLAQQLCRQHIIAGQHILEDTRTQQTRRWWTLAGQEITVTFNQFTKYSYKYKDQPQQTFNIYKANNIAANGVFHVVTGLRWQAPSGTPGDPKRTIGQILASTEAFSRFETILENCGLPSILDGPGPFTVFAPSNEAVDSLRDGRLIYLFTAGLSKLQELVRYHIYNHGQLTVEKLISKGRILTMANQVLAVNISEEGRILLGPEGVPLQRVDVMAANGVIHMLDGILLPPTILPILPKHCSEEQHKIVAGSCVDCQALNTSTCPPNSVKLDIFPKECVYIHDPTGLNVLKKGCASYCNQTIMEQGCCKGFFGPDCTQCPGGFSNPCYGKGNVSPILSWGEVWGTQGLLHRLASDWLCVWAKPATLALGFSYLCSGKLDQIISHILIKNN

SEQ ID NO: 4430 - protein, 1019 aa, Homo sapiens
MWVQGHSSRASATESVSFSGIVQMDEDTHYDKVEDVVGSHIEDAVTFWAQSINRNKDIMKIGCSLSEVCPQASSVLGNLDPNKIYGGLFSEDQCWYRCKVLKIISVEKCLVRYIDYGNTEILNRSDIVEIPLELQFSSVAKKYKLWGLHIPSDQEVTQFDQGTTFLGSLIFEKEIKMRIKATSEDGTVIAQAEYGSVDIGEEVLKKGFAEKCRLASRTDICEEKKLDPGQLVLRNLKSPIPLWGHRSNQSTFSRPKGHLSEKMTLDLKDENDAGNLITFPKESLAVGDFNLGSNVSLEKIKQDQKLIEENEKLKTEKDALLESYKALELKVEQIAQELQQEKAAAVDLTNHLEYTLKTYIDTRMKNLAAKMEILKEMRHVDISVRFGKDLSDAIQVLDEGCFTTPASLNGLEIIWAEYSLAQENIKTCEYVSEGNILIAQRNEMQQKLYMSVEDFILEVDESSLNKRLKTLQDLSVSLEAVYGQAKEGANSDEILKKFYDWKCDKREEFTSVRSETDASLHRLVAWFQRTLKVFDLSVEGSLISEDAMDNIDEILEKTESSVCKELEIALVDQGDADKEIISNTYSQVLQKIHSEERLIATVQAKYKDSIEFKKQLIEYLNKSPSVDHLLSIKKTLKSLKALLRWKLVEKSNLEESDDPDGSQIEKIKEEITQLRNNVFQEIYHEREEYEMLTSLAQKWFPELPLLHPEIGLLKYMNSGGLLTMSLERDLLDAEPMKELSSKRPLVRSEVNGQIILLKGYSVDVDTEAKVIERAATYHRAWREAEGDSGLLPLIFLFLCKSDPMAYLMVPYYPRANLNAVQANMPLNSEETLKVMKGVAQGLHTLHKADIIHGSLHQNNVFALNREQGIVGDFDFTKSVSQRASVNMMVGDLSLMSPELKMGKPASPGSDLYAYGCLLLWLSVQNQEFEINKDGIPKVDQFHLDDKVKSLLCSLICYRSSMTAEQVLNAECFLMPKEQSVPNPEKDTEYTLYKKEEEIKTENLDKCMEKTRNGEANFDC

SEQ ID NO: 4431 - protein, 996 aa, Homo sapiens
MDEDTHYDKVEDVVGSHIEDAVTFWAQSINRNKDIMKIGCSLSEVCPQASSVLGNLDPNKIYGGLFSEDQCWYRCKVLKIISVEKCLVRYIDYGNTEILNRSDIVEIPLELQFSSVAKKYKLWGLHIPSDQEVTQFDQGTTFLGSLIFEKEIKMRIKATSEDGTVIAQAEYGSVDIGEEVLKKGFAEKCRLASRTDICEEKKLDPGQLVLRNLKSPIPLWGHRSNQSTFSRPKGHLSEKMTLDLKDENDAGNLITFPKESLAVGDFNLGSNVSLEKIKQDQKLIEENEKLKTEKDALLESYKALELKVEQIAQELQQEKAAAVDLTNHLEYTLKTYIDTRMKNLAAKMEILKEMRHVDISVRFGKDLSDAIQVLDEGCFTTPASLNGLEIIWAEYSLAQENIKTCEYVSEGNILIAQRNEMQQKLYMSVEDFILEVDESSLNKRLKTLQDLSVSLEAVYGQAKEGANSDEILKKFYDWKCDKREEFTSVRSETDASLHRLVAWFQRTLKVFDLSVEGSLISEDAMDNIDEILEKTESSVCKELEIALVDQGDADKEIISNTYSQVLQKIHSEERLIATVQAKYKDSIEFKKQLIEYLNKSPSVDHLLSIKKTLKSLKALLRWKLVEKSNLEESDDPDGSQIEKIKEEITQLRNNVFQEIYHEREEYEMLTSLAQKWFPELPLLHPEIGLLKYMNSGGLLTMSLERDLLDAEPMKELSSKRPLVRSEVNGQIILLKGYSVDVDTEAKVIERAATYHRAWREAEGDSGLLPLIFLFLCKSDPMAYLMVPYYPRANLNAVQANMPLNSEETLKVMKGVAQGLHTLHKADIIHGSLHQNNVFALNREQGIVGDFDFTKSVSQRASVNMMVGDLSLMSPELKMGKPASPGSDLYAYGCLLLWLSVQNQEFEINKDGIPKVDQFHLDDKVKSLLCSLICYRSSMTAEQVLNAECFLMPKEQSVPNPEKDTEYTLYKKEEEIKTENLDKCMEKTRNGEANFDC

SEQ ID NO: 4432 - protein, 996 aa, Homo sapiens
MWVQGHSSRASATESVSFSGIVQMDEDTHYDKVEDVVGSHIEDAVTFWAQSINRNKDIMKIGCSLSEVCPQASSVLGNLDPNKIYGGLFSEDQCWYRCKVLKIISVEKCLVRYIDYGNTEILNRSDIVEIPLELQFSSVAKKYKLWGLHIPSDQEVTQFDQGTTFLGSLIFEKEIKMRIKATSEDGTVIAQAEYGSVDIGEEVLKKGFAEKCRLASRTDICEEKKLDPGQLVLRNLKSPIPLWGHRSNQSTFSRPKGHLSEKMTLDLKDENDAGNLITFPKESLAVGDFNLGSNVSLEKIKQDQKLIEENEKLKTEKDALLESYKALELKVEQIAQELQQEKAAAVDLTNHLEYTLKTYIDTRMKNLAAKMEILKEMRHVDISVRFGKDLSDAIQVLDEGCFTTPASLNGLEIIWAEYSLAQENIKTCEYVSEGNILIAQRNEMQQKLYMSVEDFILEVDESSLNKRLKTLQDLSVSLEAVYGQAKEGANSDEILKKFYDWKCDKREEFTSVRSETDASLHRLVAWFQRTLKVFDLSVEGSLISEDAMDNIDEILEKTESSVCKELEIALVDQGDADKEIISNTYSQVLQKIHSEERLIATVQAKYKDSIEFKKQLIEYLNKSPSVDHLLSIKKTLKSLKALLRWKLVEKSNLEESDDPDGSQIEKIKEEITQLRNNVFQEIYHEREEYEMLTSLAQKWFPELPLLHPEIGLLKYMNSGGLLTMSLERDLLDAEPMKELSSKRPLVRSEVNGQIILLKGYSVDVDTEAKVIERAATYHRAWREAEGDSGLLPLIFLFLCKSDPMAYLMVPYYPRANLNAVQANMPLNSEETLKVMKGVAQGLHTLHKADIIHGSLHQNNVFALNREQGIVGDFDFTKSVSQRASVNMMVGDLSLMSPELKMGKPASPGSDLYAYGCLLLWDDKVKSLLCSLICYRSSMTAEQVLNAECFLMPKEQSVPNPEKDTEYTLYKKEEEIKTENLDKCMEKTRNGEANFDC

SEQ ID NO: 4433 - protein, 317 aa, Homo sapiens
MNNTAASPMSTATSSSGRSTGKSISFATELQSMMYSLGDARRPLHETAVLVEDVVHTQLINLLQQAAEVSQLRGARVITPEDLLFLMRKDKKKLRRLLKYMFIRDYKSKIVKGIDEDDLLEDKLSGSNNANKRQKIAQDFLNSIDQTGELLAMFEDDEIDEVKQERMERAERQTRIMDSAQYAEFCESRQLSFSKKASKFRDWLDCSSMEIKPNVVAMEILAYLAYETVAQLVDLALLVRQDMVTKAGDPFSHAISATFIQYHNSAESTAACGVEAHSDAIQPCHIREAIRRYSHRIGPLSPFTNAYRRNGMAFLAC

SEQ ID NO: 4434 - protein, 328 aa, Homo sapiens
MVVFGTTFFNFDSFIGKTDSIEIIGKSVFPYCYHNILPLLNDSGRYSLGDARRPLHETAVLVEDVVHTQLINLLQQAAEVSQLRGARVITPEDLLFLMRKDKKKLRRLLKYMFIRDYKSKIVKGIDEDDLLEDKLSGSNNANKRQKIAQDFLNSIDQTGELLAMFEDDEIDEVKQERMERAERQTRIMDSAQYAEFCESRQLSFSKKASKFRDWLDCSSMEIKPNVVAMEILAYLAYETVAQLVDLALLVRQDMVTKAGDPFSHAISATFIQYHNSAESTAACGVEAHSDAIQPCHIREAIRRYSHRIGPLSPFTNAYRRNGMAFLAC

SEQ ID NO: 4435 - protein, 834 aa, Homo sapiens
MEDPAAPGTGGPPANGNGNGGGKGKQAAPKGREAFRSQRRESEGSVDCPTLEFEYGDADGHAAELSELYSYTENLEFTNNRRCFEEDFKTQVQGKEWLELEEDAQKAYIMGLLDRLEVVSRERRLKVARAVLYLAQGTFGECDSEVDVLHWSRYNCFLLYQMGTFSTFLELLHMEIDNSQACSSALRKPAVSIADSTELRVLLSVMYLMVENIRLERETDPCGWRTARETFRTELSFSMHNEEPFALLLFSMVTKFCSGLAPHFPIKKVLLLLWKVVMFTLGGFEHLQTLKVQKRAELGLPPLAEDSIQVVKSMRAASPPSYTLDLGESQLAPPPSKLRGRRGSRRQLLTKQDSLDIYNERDLFKTEEPATEEEEESAGDGERTLDGELDLLEQDPLVPPPPSQAPLSAERVAFPKGLPWAPKVRQKDIEHFLEMSRNKFIGFTLGQDTDTLVGLPRPIHESVKTLKQHKYISIADVQIKNEEELEKCPMSLGEEVVPETPCEILYQGMLYSLPQYMIALLKILLAAAPTSKAKTDSINILADVLPEEMPITVLQSMKLGIDVNRHKEIIVKSISTLLLLLLKHFKLNHIYQFEYVSQHLVFANCIPLILKFFNQNILSYITAKNSISVLDYPCCTIQDLPELTTESLEAGDNSQFCWRNLFSCINLLRLLNKLTKWKHSRTMMLVVFKSAPILKRALKVKQAMLQLYVLKLLKLQTKYLGRQWRKSNMKTMSAIYQKVRHRMNDDWAYGNDIDARPWDFQAEECTLRANIEAFNSRRYDRPQDSEFSPVDNCLQSVLGQRLDLPEDFHYSYELWLEREVFSQPICWEELLQNH

SEQ ID NO: 4436 - protein, 758 aa, Homo sapiens
MEDPAAPGTGGPPANGNGNGGGKGKQAAPKGREAFRSQRRESEGSVDCPTLEFEYGDADGHAAELSELYSYTENLEFTNNRRCFEEDFKTQVQGKEWLELEEDAQKAYIMGLLDRLEVVSRERRLKVARAVLYLAQGTFGECDSEVDVLHWSRYNCFLLYQMGTFSTFLELLHMEIDNSQACSSALRKPAVSIADSTELRVLLSVMYLMVENIRLERETDPCGWRTARETFRTELSFSMHNEEPFALLLFSMVTKFCSGLAPHFPIKKVLLLLWKVVMFTLGGFEHLQTLKVQKRAELGLPPLAEDSIQVVKSMRAASPPSYTLDLGESQLAPPPSKLRGRRGSRRQLLTKQDSLDIYNERDLFKTEEPATEEEEESAGDGERTLDGELDLLEQDPLVPPPPSQAPLSAERVAFPKGLPWAPKVRQKDIEHFLEMSRNKFIGFTLGQDTDTLVGLPRPIHESVKTLKQHKYISIADVQIKNEEELEKCPMSLGEEVVPETPCEILYQGMLYSLPQYMIALLKILLAAAPTSKAKTDSINILADVLPEEMPITVLQSMKLGIDVNRHKEIIVKSISTLLLLLLKHFKLNHIYQFEYVSQHLVFANCIPLILKFFNQNILSYITAKNSISVLDYPCCTIQDLPELTTESLEAGDNSQFCWRNLFSCINLLRLLNKLTKWKHSRTMMLVVFKSAPILKRALKVKQAMLQLYVLKLLKLQTKYLGRQWRKSNMKTMSAIYQKVRHRMNDDWAYGNGESSQSS

SEQ ID NO: 4437 - protein, 213 aa, Homo sapiens
MDPALAAQMSEAVAEKMLQYRRDTAGWKICREGNGVSVSWRPSVEFPGNLYRGEGIVYGTLEEVWDCVKPAVGGLRVKWDENVTGFEIIQSITDTLCVSRTSTPSAAMKLISPRDFVDLVLVKRYEDGTISSNATHVEHPLCPPKPGFVRGFNHPCGCFCEPLPGEPTKTNLVTFFHTDLSGYLPQNVVDSFFPRSMTRFYANLQKAVKQFHE

SEQ ID NO: 4438 - protein, 63 aa, Homo sapiens
MDPALAAQMSEAVAEKMLQYRRDTAGWKICREGVPRRRHCIWDTRGGVGLCEASCWRPTSEVG

SEQ ID NO: 4439 - protein, 786 aa, Homo sapiens
MLGARAWLGRVLLLPRAGAGLAASRRGSSSRDKDRSATVSSSVPMPAGGKGSHPSSTPQRVPNRLIHEKSPYLLQHAYNPVDWYPWGQEAFDKARKENKPIFLSVGYSTCHWCHMMEEESFQNEEIGRLLSEDFVSVKVDREERPDVDKVYMTFVQATSSGGGWPMNVWLTPNLQPFVGGTYFPPEDGLTRVGFRTVLLRIREQWKQNKNTLLENSQRVTTALLARSEISVGDRQLPPSAATVNNRCFQQLDEGYDEEYGGFAEAPKFPTPVILSFLFSYWLSHRLTQDGSRAQQMALHTLKMMANGGIRDHVGQGFHRYSTDRQWHVPHFEKMLYDQAQLAVAYSQAFQLSGDEFYSDVAKGILQYVARSLSHRSGGFYSAEDADSPPERGQRPKEGAYYVWTVKEVQQLLPEPVLGATEPLTSGQLLMKHYGLTEAGNISPSQDPKGELQGQNVLTVRYSLELTAARFGLDVEAVRTLLNSGLEKLFQARKHRPKPHLDSKMLAAWNGLMVSGYAVTGAVLGQDRLINYATNGAKFLKRHMFDVASGRLMRTCYTGPGGTVEHSNPPCWGFLEDYAFVVRGLLDLYEASQESAWLEWALRLQDTQDKLFWDSQGGGYFCSEAELGAGLPLRLKDDQDGAEPSANSVSAHNLLRLHGFTGHKDWMDKCVCLLTAFSERMRRVPVALPEMVRALSAQQQTLKQIVICGDRQAKDTKALVQCVHSVYIPNKVLILADGDPSSFLSRQLPFLSTLRRLEDQATAYVCENQACSVPITDPCELRKLLHP

SEQ ID NO: 4440 - protein, 802 aa, Homo sapiens
MLGARAWLGRVLLLPRAGAGLAASRRCPGVWPRTWPHRSPSRGSSSRDKDRSATVSSSVPMPAGGKGSHPSSTPQRVPNRLIHEKSPYLLQHAYNPVDWYPWGQEAFDKARKENKPIFLSVGYSTCHWCHMMEEESFQNEEIGRLLSEDFVSVKVDREERPDVDKVYMTFVQATSSGGGWPMNVWLTPNLQPFVGGTYFPPEDGLTRVGFRTVLLRIREQWKQNKNTLLENSQRVTTALLARSEISVGDRQLPPSAATVNNRCFQQLDEGYDEEYGGFAEAPKFPTPVILSFLFSYWLSHRLTQDGSRAQQMALHTLKMMANGGIRDHVGQGFHRYSTDRQWHVPHFEKMLYDQAQLAVAYSQAFQLSGDEFYSDVAKGILQYVARSLSHRSGGFYSAEDADSPPERGQRPKEGAYYVWTVKEVQQLLPEPVLGATEPLTSGQLLMKHYGLTEAGNISPSQDPKGELQGQNVLTVRYSLELTAARFGLDVEAVRTLLNSGLEKLFQARKHRPKPHLDSKMLAAWNGLMVSGYAVTGAVLGQDRLINYATNGAKFLKRHMFDVASGRLMRTCYTGPGGTVEHSNPPCWGFLEDYAFVVRGLLDLYEASQESAWLEWALRLQDTQDKLFWDSQGGGYFCSEAELGAGLPLRLKDDQDGAEPSANSVSAHNLLRLHGFTGHKDWMDKCVCLLTAFSERMRRVPVALPEMVRALSAQQQTLKQIVICGDRQAKDTKALVQCVHSVYIPNKVLILADGDPSSFLSRQLPFLSTLRRLEDQATAYVCENQACSVPITDPCELRKLLHP

SEQ ID NO: 4441 - protein, 742 aa, Homo sapiens
MPAGGKGSHPSSTPQRVPNRLIHEKSPYLLQHAYNPVDWYPWGQEAFDKARKENKPIFLSVGYSTCHWCHMMEEESFQNEEIGRLLSEDFVSVKVDREERPDVDKVYMTFVQATSSGGGWPMNVWLTPNLQPFVGGTYFPPEDGLTRVGFRTVLLRIREQWKQNKNTLLENSQRVTTALLARSEISVGDRQLPPSAATVNNRCFQQLDEGYDEEYGGFAEAPKFPTPVILSFLFSYWLSHRLTQDGSRAQQMALHTLKMMANGGIRDHVGQGFHRYSTDRQWHVPHFEKMLYDQAQLAVAYSQAFQLSGDEFYSDVAKGILQYVARSLSHRSGGFYSAEDADSPPERGQRPKEGAYYVWTVKEVQQLLPEPVLGATEPLTSGQLLMKHYGLTEAGNISPSQDPKGELQGQNVLTVRYSLELTAARFGLDVEAVRTLLNSGLEKLFQARKHRPKPHLDSKMLAAWNGLMVSGYAVTGAVLGQDRLINYATNGAKFLKRHMFDVASGRLMRTCYTGPGGTVEHSNPPCWGFLEDYAFVVRGLLDLYEASQESAWLEWALRLQDTQDKLFWDSQGGGYFCSEAELGAGLPLRLKDDQDGAEPSANSVSAHNLLRLHGFTGHKDWMDKCVCLLTAFSERMRRVPVALPEMVRALSAQQQTLKQIVICGDRQAKDTKALVQCVHSVYIPNKVLILADGDPSSFLSRQLPFLSTLRRLEDQATAYVCENQACSVPITDPCELRKLLHP

SEQ ID NO: 4442 - protein, 521 aa, Homo sapiens
MSHLSSPPKKHKGEHKGHSLPHGSERGSSSRDKDRSATVSSSVPMPAGGKGSHPSSTPQRVPNRLIHEKSPYLLQHAYNPVDWYPWGQEAFDKARKENKPIFLSVGYSTCHWCHMMEEESFQNEEIGRLLSEDFVSVKVDREERPDVDKVYMTFVQATSSGGGWPMNVWLTPNLQPFVGGTYFPPEDGLTRVGFRTVLLRIREQWKQNKNTLLENSQRVTTALLARSEISVGDRQLPPSAATVNNRCFQQLDEGYDEEYGGFAEAPKFPTPVILSFLFSYWLSHRLTQDGSRAQQMALHTLKMMANGGIRDHVGQGFHRYSTDRQWHVPHFEKMLYDQAQLAVAYSQAFQLSGDEFYSDVAKGILQYVARSLSHRSGGFYSAEDADSPPERGQRPKEGAYYVWTVKEVQQLLPEPVLGATEPLTSGQLLMKHYGLTEAGNISPSQDPKGELQGQNVLTVRYSLELTAARFGLDVEAVRTLLNSGLEKLFQARKHRPKPHLDSKMLAAWNGGAAHLRPSLSA

SEQ ID NO: 4443 - protein, 273 aa, Homo sapiens
MGQKLSGSLKSVEVREPALRPAKRELRGAEPGRPARLDQLLDMPAAGLAVQLRHAWNPEDRSLNVFVKDDDRLTFHRHPVAQSTDGIRGKVGHARGLHAWQINWPARQRGTHAVVGVATARAPLHSVGYTALVGSDAESWGWDLGRSRLYHDGKNQPGVAYPAFLGPDEAFALPDSLLVVLDMDEGTLSFIVDGQYLGVAFRGLKGKKLYPVVSAVWGHCEVTMRYINGLDPEPLPLMDLCRRSIRSALGRQRLQDISSLPLPQSLKNYLQYQ

SEQ ID NO: 4444 - protein, 473 aa, Homo sapiens
MGQSGRSRHQKRARAQAQLRNLEAYAANPHSFVFTRGCTGRNIRQLSLDVRRVMEPLTASRLQVRKKNSLKDCVAVAGPLGVTHFLILSKTETNVYFKLMRLPGGPTLTFQVKKYSLVRDVVSSLRRHRMHEQQFAHPPLLVLNSFGPHGMHVKLMATMFQNLFPSINVHKVNLNTIKRCLLIDYNPDSQELDFRHYSIKVVPVGASRGMKKLLQEKFPNMSRLQDISELLATGAGLSESEAEPDGDHNITELPQAVAGRGNMRAQQSAVRLTEIGPRMTLQLIKVQEGVGEGKVMFHSFVSKTEEELQAILEAKEKKLRLKAQRQAQQAQNVQRKQEQREAHRKKSLEGMKKARVGGSDEEASGIPSRTASLELGEDDDEQEDDDIEYFCQAVGEAPSEDLFPEAKQKRLAKSPGRKRKRWEMDRGRGRLCDQKFPKTKDKSQGAQARRGPRGASRDGGRGRGRGRPGKRVA

SEQ ID NO: 4445 - protein, 460 aa, Homo sapiens
MGQSGRSRHQKRARAQAQLRNLEAYAANPHSFVFTRGCTGRNIRQLSLDVRRVMEPLTASRLQVRKKNSLKDCVAVAGPLGVTHFLILSKTETNVYFKLMRLPGGPTLTFQVKKYSLVRDVVSSLRRHRMHEQQFAHPPLLVLNSFGPHGMHVKLMATMFQNLFPSINVHKVNLNTIKRCLLIDYNPDSQELDFRHYSIKVVPVGASRGMKKLLQEKFPNMSRLQDISELLATGAGLSESEAEPDGDHNITELPQAVAGRGNMRAQQSAVRLTEIGPRMTLQLIKVQEGVGEGKVMFHSFVSKTEEELQAILEAKEKKLRLKAQRQAQQAQNVQRKQEQREAHRKKSLEGMKKARVGGSDEEASGIPSRTASLELGEDDDEQEDDDIEYFCQAVGEAPSEDLFPEAKQKRLAKSPGRKRKRWEMDRGRGRLCDQKFPKTKDKSRDGGRGRGRGRPGKRVA

SEQ ID NO: 4446 - protein, 520 aa, Homo sapiens
MGQSGRSRHQKRARAQAQLRNLEAYAANPHSFVFTRGCTGRNIRQLSLDVRRVMEPLTASRLQVRKKNSLKDCVAVAGPLGVTHFLILSKTETNVYFKLMRLPGGPTLTFQVKKYSLVRDVVSSLRRHRMHEQQFAHPPLLVLNSFGPHGMHVKLMATMFQNLFPSINVHKVNLNTIKRCLLIDYNPDSQELDFRHYSIKVVPVGASRGMKKLLQEKFPNMSRLQDISELLATGAGLSESEAEPDGDHNITELPQAVAGRGNMRAQQSAVRLTEIGPRMTLQLIKVQEGVGEGKVMFHSFVSKTEEELQAILEAKEKKLRLKAQRQAQQAQNVQRKQEQREAHRKKSLEGMKKARVGGSDEEASGIPSRTASLELGEDDDEQEDDDIEYFCQAVGEAPSEDLFPEAKQKRLAKSPGRKRKRWEMDRGRGRLCDQKFPKTKDKSQGAQVPSPALPTSWQLPTTNSVGSRGTSCGPYWWLSSWWPWPAMAWPCTASASGSSAHGTPPWSSLSSWQSATCSAP

SEQ ID NO: 4447 - protein, 750 aa, Homo sapiens
MSQWYELQQLDSKFLEQVHQLYDDSFPMEIRQYLAQWLEKQDWEHAANDVSFATIRFHDLLSQLDDQYSRFSLENNFLLQHNIRKSKRNLQDNFQEDPIQMSMIIYSCLKEERKILENAQRFNQAQSGNIQSTVMLDKQKELDSKVRNVKDKVMCIEHEIKSLEDLQDEYDFKCKTLQNREHETNGVAKSDQKQEQLLLKKMYLMLDNKRKEVVHKIIELLNVTELTQNALINDELVEWKRRQQSACIGGPPNACLDQLQNWFTIVAESLQQVRQQLKKLEELEQKYTYEHDPITKNKQVLWDRTFSLFQQLIQSSFVVERQPCMPTHPQRPLVLKTGVQFTVKLRLLVKLQELNYNLKVKVLFDKDVNERNTVKGFRKFNILGTHTKVMNMEESTNGSLAAEFRHLQLKEQKNAGTRTNEGPLIVTEELHSLSFETQLCQPGLVIDLETTSLPVVVISNVSQLPSGWASILWYNMLVAEPRNLSFFLTPPCARWAQLSEVLSWQFSSVTKRGLNVDQLNMLGEKLLGPNASPDGLIPWTRFCKENINDKNFPFWLWIESILELIKKHLLPLWNDGCIMGFISKERERALLKDQQPGTFLLRFSESSREGAITFTWVERSQNGGEPDFHAVEPYTKKELSAVTFPDIIRNYKVMAAENIPENPLKYLYPNIDKDHAFGKYYSRPKEAPEPMELDGPKGTGYIKTELISVSEVHPSRLQTTDNLLPMSPEEFDEVSRIVGSVEFDSMMNTV

SEQ ID NO: 4448 - protein, 712 aa, Homo sapiens
MSQWYELQQLDSKFLEQVHQLYDDSFPMEIRQYLAQWLEKQDWEHAANDVSFATIRFHDLLSQLDDQYSRFSLENNFLLQHNIRKSKRNLQDNFQEDPIQMSMIIYSCLKEERKILENAQRFNQAQSGNIQSTVMLDKQKELDSKVRNVKDKVMCIEHEIKSLEDLQDEYDFKCKTLQNREHETNGVAKSDQKQEQLLLKKMYLMLDNKRKEVVHKIIELLNVTELTQNALINDELVEWKRRQQSACIGGPPNACLDQLQNWFTIVAESLQQVRQQLKKLEELEQKYTYEHDPITKNKQVLWDRTFSLFQQLIQSSFVVERQPCMPTHPQRPLVLKTGVQFTVKLRLLVKLQELNYNLKVKVLFDKDVNERNTVKGFRKFNILGTHTKVMNMEESTNGSLAAEFRHLQLKEQKNAGTRTNEGPLIVTEELHSLSFETQLCQPGLVIDLETTSLPVVVISNVSQLPSGWASILWYNMLVAEPRNLSFFLTPPCARWAQLSEVLSWQFSSVTKRGLNVDQLNMLGEKLLGPNASPDGLIPWTRFCKENINDKNFPFWLWIESILELIKKHLLPLWNDGCIMGFISKERERALLKDQQPGTFLLRFSESSREGAITFTWVERSQNGGEPDFHAVEPYTKKELSAVTFPDIIRNYKVMAAENIPENPLKYLYPNIDKDHAFGKYYSRPKEAPEPMELDGPKGTGYIKTELISVSEV

SEQ ID NO: 4449 - protein, 227 aa, Homo sapiens
MSYFRTPQTHPGPLPSGQGGAASPGLSLGLCSPVEPVVVASGGTGPLSQKAEQVAPAAQAWGPALAMPQARGCPGGTSWETLRKEYSRNCHKFPHVRQLESLGWDNGYSRSRAPDLGGPSRPRPLMLCGLSPRVLPVPSEAVGKEASSQPDICILTLAMMIAGIPTVPVPGVREEDLIWAAQAFMMAHPEPEGAVEGARWEQAHAHTASGKMPLVRSKRGQPPGSCL

SEQ ID NO: 4450 - protein, 197 aa, Homo sapiens
MMFPQSRHSGSSHLPQQLKFTTSDSCDRIKDEFQLLQAQYHSLKLECDKLASEKSEMQRHYVMYYEMSYGLNIEMHKQAEIVKRLNGICAQVLPYLSQEHQQQVLGAIERAKQVTAPELNSIIRQQLQAHQLSQLQALALPLTPLPVGLQPPSLPAVSAGTGLLSLSALGSQAHLSKEDKNGHDGDTHQEDDGEKSD

SEQ ID NO: 4451 - protein, 264 aa, Homo sapiens
MCHKNGFPQEGGITAAFLQKRKLRLSKNHRPARAKVTEHVRGTRPGRATAGPAASTRAAGSLFFDRWGNRGPAGCRGSSHLPQQLKFTTSDSCDRIKDEFQLLQAQYHSLKLECDKLASEKSEMQRHYVMYYEMSYGLNIEMHKQAEIVKRLNGICAQVLPYLSQEHQQQVLGAIERAKQVTAPELNSIIRQQLQAHQLSQLQALALPLTPLPVGLQPPSLPAVSAGTGLLSLSALGSQAHLSKEDKNGHDGDTHQEDDGEKSD

SEQ ID NO: 4452 - protein, 302 aa, Homo sapiens
MCAERLGQFMTLALVLATFDPARGTDATNPPEGPQDRSSQQKGRLSLQNTAEIQHCLVNAGDVGCGVFECFENNSCEIRGLHGICMTFLHNAGKFDAQGKSFIKDALKCKAHALRHRFGCISRKCPAIREMVSQLQRECYLKHDLCAAAQENTRVIVEMIHFKDLLLHEPYVDLVNLLLTCGEEVKEAITHSVQVQCEQNWGSLCSILSFCTSAIQKPPTAPPERQPQVDRTKLSRAHHGEAGHHLPEPSSRETGRGAKGERGSKSHPNAHARGRVGGLGAQGPSGSSEWEDEQSEYSDIRR

SEQ ID NO: 4453 - protein, 722 aa, Homo sapiens
MYRALYAFRSAEPNALAFAAGETFLVLERSSAHWWLAARARSGETGYVPPAYLRRLQGLEQDVLQAIDRAIEAVHNTAMRDGGKYSLEQRGVLQKLIHHRKETLSRRGPSASSVAVMTSSTSDHHLDAAAARQPNGVCRAGFERQHSLPSSEHLGADGGLYQIPLPSSQIPPQPRRAAPTTPPPPVKRRDREALMASGSGGHNTMPSGGNSVSSGSSVSSTSLDTLYTSSSPSEPGSSCSPTPPPVPRRGTHTTVSQVQPPPSKASAPEPPAEEEVATGTTSASDDLEALGTLSLGTTEEKAAAEAAVPRTIGAELMELVRRNTGLSHELCRVAIGIIVGHIQASVPASSPVMEQVLLSLVEGKDLSMALPSGQVCHDQQRLEVIFADLARRKDDAQQRSWALYEDEGVIRCYLEELLHILTDADPEVCKKMCKRNEFESVLALVAYYQMEHRASLRLLLLKCFGAMCSLDAAIISTLVSSVLPVELARDMQTDTQDHQKLCYSALILAMVFSMGEAVPYAHYEHLGTPFAQFLLNIVEDGLPLDTTEQLPDLCVNLLLALNLHLPAADQNVIMAALSKHANVKIFSEKLLLLLNRGDDPVRIFKHEPQPPHSVLKFLQDVFGSPATAAIFYHTDMMALIDITVRHIADLSPGDKLRMEYLSLMHAIVRTTPYLQHRHRLPDLQAILRRILNEEETSPQCQMDRMIVREMCKEFLVLGEAPS

SEQ ID NO: 4454 - protein, 722 aa, Homo sapiens
MYRALYAFRSAEPNALAFAAGETFLVLERSSAHWWLAARARSGETGYVPPAYLRRLQGLEQDVLQAIDRAIEAVHNTAMRDGGKYSLEQRGVLQKLIHHRKETLSRRGPSASSVAVMTSSTSDHHLDAAAARQPNGVCRAGFERQHSLPSSEHLGADGGLYQIPLPSSQIPPQPRRAAPTTPPPPVKRRDREALMASGSGGHNTMPSGGNSVSSGSSVSSTSLDTLYTSSSPSEPGSSCSPTPPPVPRRGTHTTVSQVQPPPSKASAPEPPAEEEVATGTTSASDDLEALGTLSLGTTEEKAAAEAAVPRTIGAELMELVRRNTGLSHELCRVAIGIIVGHIQASVPASSPVMEQVLLSLVEGKDLSMALPSGQVCHDQQRLEVIFADLARRKDDAQQRSWALYEDEGVIRCYLEELLHILTDADPEVCKKMCKRNEFESVLALVAYYQMEHRASLRLLLLKCFGAMCSLDAAIISTLVSSVLPVELARDMQTDTQDHQKLCYSALILAMVFSMGEAVPYAHYEHLGTPFAQFLLNIVEDGLPLDTTEQLPDLCVNLLLALNLHLPAADQNVIMAALSKHANVKIFSEKLLLLLNRGDDPVRIFKHEPQPPHSVLKFLQDVFGSPATAAIFYHTDMMALIDITVRHIADLSPGDKGPFGAGQRPWPGVPRLLEPGSTPSREPHPVERSGVPALTSSWASGCPRPLHPALQLVIDSAFGGRSV

SEQ ID NO: 4455 - protein, 715 aa, Homo sapiens
MYRALYAFRSAEPNALAFAAGETFLVLERSSAHWWLAARARSGETGYVPPAYLRRLQGLEQDVLQAIDRAIEAVHNTAMRDGGKYSLEQRGVLQKLIHHRKETLSRRGPSASSVAVMTSSTSDHHLDAAAARQPNGVCRAGFERQHSLPSSEHLGADGGLYQIPPQPRRAAPTTPPPPVKRRDREALMASGSGGHNTMPSGGNSVSSGSSVSSTSLDTLYTSSSPSEPGSSCSPTPPPVPRRGTHTTVSQVQPPPSKASAPEPPAEEEVATGTTSASDDLEALGTLSLGTTEEKAAAEAAVPRTIGAELMELVRRNTGLSHELCRVAIGIIVGHIQASVPASSPVMEQVLLSLVEGKDLSMALPSGQVCHDQQRLEVIFADLARRKDDAQQRSWALYEDEGVIRCYLEELLHILTDADPEVCKKMCKRNEFESVLALVAYYQMEHRASLRLLLLKCFGAMCSLDAAIISTLVSSVLPVELARDMQTDTQDHQKLCYSALILAMVFSMGEAVPYAHYEHLGTPFAQFLLNIVEDGLPLDTTEQLPDLCVNLLLALNLHLPAADQNVIMAALSKHANVKIFSEKLLLLLNRGDDPVRIFKHEPQPPHSVLKFLQDVFGSPATAAIFYHTDMMALIDITVRHIADLSPGDKLRMEYLSLMHAIVRTTPYLQHRHRLPDLQAILRRILNEEETSPQCQMDRMIVREMCKEFLVLGEAPS

SEQ ID NO: 4456 - protein, 651 aa, Homo sapiens
MYRALYAFRSAEPNALAFAAGETFLVLERSSAHWWLAARARSGETGYVPPAYLRRLQGLEQDVLQAIDRAIEAVHNTAMRDGGKYSLEQRGVLQKLIHHRKETLSRRGPSASSVAVMTSSTSDHHLDAAAARQPNGVCRAGFERQHSLPSSEHLGADGGLYQIPPQPRRAAPTTPPPPVKRRDREALMASGSGGHNTMPSGGNSVSSGSSVSSTSLDTLYTSSSPSEPGSSCSPTPPPVPRRGTHTTVSQVQPPPSKASAPEPPAEEEVATGTTSASDDLEALGTLSLGTTEEKAAAEAAVPRTIGAELMELVRRNTGLSHELCRVAIGIIVGHIQASVPASSPVMEQVLLSLVEGKDLSMALPSGQVCHDQQRLEVIFADLARRKDDAQQRSWALYEDEGVIRCYLEELLHILTDADPEVCKKMCKRNEFESVLALVAYYQMEHRASLRLLLLKCFGAMCSLDAAIISTLVSSVLPVELARDMQTDTQDHQKLCYSALILAMVFSMGEAVPYAHYEHLGTPFAQFLLNIVEDGLPLDTTEQLPDLCVNLLLALNLHLPAADQNVIMAALSKHANVKIFSEKLLLLLNRGDDPVRIFKHEPQPPHSVLKFLQDVFGSPATAAIFYHTDMMALIDITVRHIADLSPGDKGVH

SEQ ID NO: 4457 - protein, 596 aa, Homo sapiens
MYRALYAFRSAEPNALAFAAGETFLVLERSSAHWWLAARARSGETGYVPPAYLRRLQGLEQDVLQAIDRAIEAVHNTAMRDGGKYSLEQRGVLQKLIHHRKETLSRRGPSASSVAVMTSSTSDHHLDAAAARQPNGVCRAGFERQHSLPSSEHLGADGGLYQIPLPSSQIPPQPRRAAPTTPPPPVKRRDREALMASGSGGHNTMPSGGNSVSSGSSVSSTSLDTLYTSSSPSEPGSSCSPTPPPVPRRGTHTTVSQVQPPPSKASAPEPPAEEEVATGTTSASDDLEALGTLSLGTTEEKAAAEAAVPRTIGAELMELVRRNTGLSHELCRVAIGIIVGHIQASVPASSPVMEQVLLSLVEGKDLSMALPSGQVCHDQQRLEVIFADLARRKDDAQQRSWALYEDEGVIRCYLEELLHILTDADPEVCKKMCKRNEFESVLALVAYYQMEHRASLRLLLLKCFGAMCSLDAAIISTLVSSVLPVELARDMQTDTQDHQKLCYSALILAMVFSMGEAVPYAHYEHLGTPFAQFLLNIVEDGLPLDTTEQLPDLCVNLLLALNLHLPGGVGPGWAVAEHMVALRLSTLSIPMSFLSC

SEQ ID NO: 4458 - protein, 103 aa, Homo sapiens
MGQQSSVRRLKRSVPCESNEANEANEANKTMPETPTGDSDPQPAPKKMKTSESSTILVVRYRRNVKRTSPEELLNDHARENRINPDQMEEEEFIEITTERPKK

SEQ ID NO: 4459 - protein, 183 aa, Homo sapiens
MEDDSLYLGGEWQFNHFSKLTSSRPDAAFAEIQRTSLPEKSPLSCETRVDLCDDLAPVARQLAPREKLPLSSRRPAAVGAGLQNMGNTCYVNASLQCLTYTPPLANYMLSREHSQTCHRHKGCMLCTMQAHITRALHNPGHVIQPSQALAAGFHRGKQEDAHEFLMFTVDAMEKACLPGHKQV

SEQ ID NO: 4460 - protein, 339 aa, Homo sapiens
MSGQLERCEREWHELEGEFQELQETHRIYKQKLEELAALQTLCSSSISKQKKHLKDLKLTLQRCKRHASREEAELVQQMAANIKERQDVFFDMEAYLPKKNGLYLNLVLGNVNVTLLSNQAKFAYKDEYEKFKLYLTIILLLGAVACRFVLHYRVTDEVFNFLLVWYYCTLTIRESILISNGSRIKGWWVSHHYVSTFLSGVMLTWPNGPIYQKFRNQFLAFSIFQSCVQFLQYYYQRGCLYRLRALGERNHLDLTVEGFQSWMWRGLTFLLPFLFCGHFWQLYNAVTLFELSSHEECREWQVFVLAFTFLILFLGNFLTTLKVVHAKLQKNRGKTKQP

SEQ ID NO: 4461 - protein, 259 aa, Homo sapiens
MAPNIYLVRQRISRLGQRMSGFQINLNPLKEPLGFIKVLEWIASIFAFATCGGFKGQTEIQVNCPPAVTENKTVTATFGYPFRLNEASFQPPPGVNICDVNWKDYVLIGDYSSSAQFYVTFAVFVFLYCIAALLLYVGYTSLYLDSRKLPMIDFVVTLVATFLWLVSTSAWAKALTDIKIATGHNIIDELPPCKKKAVLCYFGSVTSMGSLNVSVIFGFLNMILWGGNAWFVYKETSLHSPSNTSAPHSQGGIPPPTGI

SEQ ID NO: 4462 - protein, 241 aa, Homo sapiens
MSGFQINLNPLKEPLGFIKVLEWIASIFAFATCGGFKGQTEIQVNCPPAVTENKTVTATFGYPFRLNEASFQPPPGVNICDVNWKDYVLIGDYSSSAQFYVTFAVFVFLYCIAALLLYVGYTSLYLDSRKLPMIDFVVTLVATFLWLVSTSAWAKALTDIKIATGHNIIDELPPCKKKAVLCYFGSVTSMGSLNVSVIFGFLNMILWGGNAWFVYKETSLHSPSNTSAPHSQGGIPPPTGI

SEQ ID NO: 4463 - protein, 862 aa, Homo sapiens
MPAGLTEPAGAAPPAAVSASGTVTMAPAGALPVRVESTPVALGAVTKAPVSVCVEPTASQPLRSPVGTLVTKVAPVSAPPKVSSGPRLPAPQIVAVKAPNTTTIQFPANLQLPPGTVLIKSNSGPLMLVSPQQTVTRAETTSNITSRPAVPANPQTVKICTVPNSSSQLIKKVAVTPVKKLAQIGTTVVTTVPKPSSVQSVAVPTSVVTVTPGKPLNTVTTLKPSSLGASSTPSNEPNLKAENSAAVQINLSPTMLENVKKCKNFLAMLIKLACSGSQSPEMGQNVKKLVEQLLDAKIEAEEFTRKLYVELKSSPQPHLVPFLKKSVVALRQLLPNSQSFIQQCVQQTSSDMVIATCTTTVTTSPVVTTTVSSSQSEKSIIVSGATAPRTVSVQTLNPLAGPVGAKAGVVTLHSVGPTAATGGTTAGTGLLQTSKPLVTSVANTVTTVSLQPEKPVVSGTAVTLSLPAVTFGETSGAAICLPSVKPVVSSAGTTSDKPVIGTPVQIKLAQPGPVLSQPAGIPQAVQVKQLVVQQPSGGNEKQVTTISHSSTLTIQKCGQKTMPVNTIIPTSQFPPASILKQITLPGNKILSLQASPTQKNRIKENVTSCFRDEDDINDVTSMAGVNLNEENACILATNSELVGTLIQSCKDEPFLFIGALQKRILDIGKKHDITELNSDAVNLISQATQERLRGLLEKLTAIAQHRMTTYKASENYILCSDTRSQLKFLEKLDQLEKQRKDLEEREMLLKAAKSRSNKEDPEQLRLKQKAKELQQLELAQIQHRDANLTALAAIGPRKKRPLESGIEGLKDNLLASGTSSLTATKQLHRPRITRICLRDLIFCMEQEREMKYSRALYLALLK

SEQ ID NO: 4464 - protein, 618 aa, Homo sapiens
MPAGLTEPAGAAPPAAVSASGTVTMAPAGALPVRVESTPVALGAVTKAPVSVCVEPTASQPLRSPVGTLVTKVAPVSAPPKVSSGPRLPAPQIVAVKAPNTTTIQFPANLQLPPGTVLIKSNSGPLMLVSPQQTVTRAETTSNITSRPAVPANPQTVKICTVPNSSSQLIKKVAVTPVKKLAQIGTTVVTTVPKPSSVQSVAVPTSVVTVTPGKPLNTVTTLKPSSLGASSTPSNEPNLKAENSAAVQINLSPTMLENVKKCKNFLAMLIKLACSGSQSPEMGQNVKKLVEQLLDAKIEAEEFTRKLYVELKSSPQPHLVPFLKKSVVALRQLLPNSQSFIQQCVQQTSSDMVIATCTTTVTTSPVVTTTVSSSQSEKSIIVSGATAPRTVSVQTLNPLAGPVGAKAGVVTLHSVGPTAATGGTTAGTGLLQTSKPLVTSVANTVTTVSLQPEKPVVSGTAVTLSLPAVTFGETSGAAICLPSVKPVVSSAGTTSDKPVIGTPVQIKLAQPGPVLSQPAGIPQAVQVKQLVVQQPSGGNEKQVTTISHSSTLTIQKCGQKTMPVNTIIPTSQFPPASILKQITLPGNKILSLQASPTQKNRIKENVTSCFRSTFICVY

SEQ ID NO: 4465 - protein, 808 aa, Homo sapiens
MAELLASAGSACSWDFPRAPPSFPPPAASRGGLGGTRSFRPHRGAESPRPGRDRDGVRVPMASSRCPAPRGCRCLPGASLAWLGTVLLLLADWVLLRTALPRIFSLLVPTALPLLRVWAVGLSRWAVLWLGACGVLRATVGSKSENAGAQGWLAALKPLAAALGLALPGLALFRELISWGAPGSADSTRLLHWGSHPTAFVVSYAAALPAAALWHKLGSLWVPGGQGGSGNPVRRLLGCLGSETRRLSLFLVLVVLSSLGEMAIPFFTGRLTDWILQDGSADTFTRNLTLMSILTIASAVLEFVGDGIYNNTMGHVHSHLQGEVFGAVLRQETEFFQQNQTGNIMSRVTEDTSTLSDSLSENLSLFLWYLVRGLCLLGIMLWGSVSLTMVTLITLPLLFLLPKKVGKWYQLLEVQVRESLAKSSQVAIEALSAMPTVRSFANEEGEAQKFREKLQEIKTLNQKEAVAYAVNSWTTSISGMLLKVGILYIGGQLVTSGAVSSGNLVTFVLYQMQFTQAVEVLLSIYPRVQKAVGSSEKIFEYLDRTPRCPPSGLLTPLHLEGLVQFQDVSFAYPNRPDVLVLQGLTFTLRPGEVTALVGPNGSGKSTVAALLQNLYQPTGGQLLLDGKPLPQYEHRYLHRQVAAVGQEPQVFGRSLQENIAYGLTQKPTMEEITAAAVKSGAHSFISGLPQGYDTEVDEAGSQLSGGQRQAVALARALIRKPCVLILDDATSALDANSQLQVEQLLYESPERYSRSVLLITQHLSLVEQADHILFLEGGAIREGGTHQQLMEKKGCYWAMVQAPADAPE

SEQ ID NO: 4466 - protein, 299 aa, Homo sapiens
MITFLPIIFSILVVVTFVIGNFANGFIALVNSTEWVKRQKISFADQIVTALAVSRVGLLWVLLLNWYSTVLNPAFCSVELRTTAYNIWAVTGHFSNWPATSLSIFYLLKIANFSNLIFLRLKRRVKSVILVVLLGPLLFLACHLFVVNMNQIVWTKEYEGNMTWKIKLRRAMYLSDTTVTMLANLVPFTVTLISFLLLVCSLCKHLKKMQLHGKGSQDPSTKVHIKVLQTVISFFLLRAIYFVSVIISVWSFKNLENKPVFMFCQAIGFSCSSAHPFILIWGNKKLKQTYLSVLWQMRY

SEQ ID NO: 4467 - protein, 314 aa, Homo sapiens
MATELDKIFLILAIAEFIISMLGNVFIGLVNCSEGIKNQKVFSADFILTCLAISTIGQLLVILFDSFLVGLASHLYTTYRLGKTVIMLWHMTNHLTTWLATCLSIFYFFKIAHFPHSLFLWLRWRMNGMIVMLLILSLFLLIFDSLVLEIFIDISLNIIDKSNLTLYLDESKTLYDKLSILKTLLSLTSFIPFSLFLTSLLFLFLSLVRHTRNLKLSSLGSRDSSTEAHRRAMKMVMSFLFLFIVHFFSLQVANGIFFMLWNNKYIKFVMLALNAFPSCHSFILILGNSKLRQTAVRLLWHLRNYTKTPNALPL

SEQ ID NO: 4468 - protein, 1085 aa, Homo sapiens
MAAGSDLLDEVFFNSEVDEKVVSDLVGSLESQLAASAAHHHHLAPRTPEVRAAAAGALGNHVVSGSPAGAAGAGPAAPAEGAPGAAPEPPPAGRARPGGGGPQRPGPPSPRRPLVPAGPAPPAAKLRPPPEGSAGSCAPVPAAAAVAAGPEPAPAGPAKPAGPAALAARAGPGPGPGPGPGPGPGPGKPAGPGAAQTLNGSAALLNSHHAAAPAVSLVNNGPAALLPLPKPAAPGTVIQTPPFVGAAAPPAPAAPSPPAAPAPAAPAAAPPPPPPAPATLARPPGHPAGPPTAAPAVPPPAAAQNGGSAGAAPAPAPAAGGPAGVSGQPGPGAAAAAPAPGVKAESPKRVVQAAPPAAQTLAASGPASTAASMVIGPTMQGALPSPAAVPPPAPGTPTGLPKGAAGAVTQSLSRTPTATTSGIRATLTPTVLAPRLPQPPQNPTNIQNFQLPPGMVLVRSENGQLLMIPQQALAQMQAQAHAQPQTTMAPRPATPTSAPPVQISTVQAPGTPIIARQVTPTTIIKQVSQAQTTVQPSATLQRSPGVQPQLVLGGAAQTASLGTATAVQTGTPQRTVPGATTTSSAATETMENVKKCKNFLSTLIKLASSGKQSTETAANVKELVQNLLDGKIEAEDFTSRLYRELNSSPQPYLVPFLKRSLPALRQLTPDSAAFIQQSQQQPPPPTSQATTALTAVVLSSSVQRTAGKTAATVTSALQPPVLSLTQPTQVGVGKQGQPTPLVIQQPPKPGALIRPPQVTLTQTPMVALRQPHNRIMLTTPQQIQLNPLQPVPVVKPAVLPGTKALSAVSAQAAAAQKNKLKEPGGGSFRDDDDINDVASMAGVNLSEESARILATNSELVGTLTRSCKDETFLLQAPLQRRILEIGKKHGITELHPDVVSYVSHATQQRLQNLVEKISETAQQKNFSYKDDDRYEQASDVRAQLKFFEQLDQIEKQRKDEQEREILMRAAKSRSRQEDPEQLRLKQKAKEMQQQELAQMRQRDANLTALAAIGPRKKRKVDCPGPGSGAEGSGPGSVVPGSSGVGTPRQFTRQRITRVNLRDLIFCLENERETSHSLLLYKAFLK

SEQ ID NO: 4469 - protein, 934 aa, Homo sapiens
MIDLSFLTEEEQEAIMKVLQRDAALKRAEEERVRHLPEKIKDDQQLKNMSGQWFYEAKAKRHRDKIHGADIIRASMRKKRPQIAAEQSKDRENGAKESWVNNVNKDAFLPPELAGVVEEPEEDAAPASPSSSVVNPASSVIDMSQENTRKPNVSPEKRKNPFNSSKLPEGHSSQQTKNEQSKNGRTGLFQTSKEDELSESKEKSTVADTSIQKLEKSKQTLPGLSNGSQIKAPIPKARKMIYKSTDLNKDDNQSFPRQRTDSLKARGAPRGILKRNSSSSSTDSETLRYNHNFEPKSKIVSPGLTIHERISEKEHSLEDNSSPNSLEPLKHVRFSAVKDELPQSPGLIHGREVGEFSVLESDRLKNGMEDAGDTEEFQSDPKPSQYRKPSLFHQSTSSPYVSKSETHQPMTSGSFPINGLHSHSEVLTARPQSMENSPTINEPKDKSSELTRLESVLPRSPADELSHCVEPEPSQVPGGSSRDRQQGSEEEPSPVLKTLERSAARKMPSKSLEDISSDSSNQAKVDNQPEELVRSAEDVSTVPTQPDNPFSHPDKLKRMSKSVPAFLQDESDDRETDTASESSYQLSRHKKSPSSLTNLSSSSGMTSLSSVSGSVMSVYSGDFGNLEVKGNIQFAIEYVESLKELHVFVAQCKDLAAADVKKQRSDPYVKAYLLPDKGKMGKKKTLVVKKTLNPVYNEILRYKIEKQILKTQKLNLSIWHRDTFKRNSFLGEVELDLETWDWDNKQNKQLRWYPLKRKTAPVALEAENRGEMKLALQYVPEPVPGKKLPTTGEVHIWVKECLDLPLLRGSHLNSFVKCTILPDTSRKSRQKTRAVGKTTNPIFNHTMVYDGFRPEDLMEACVELTVWDHYKLTNQFLGGLRIGFGTGKSYGTEVDWMDSTSEEVALWEKMVNSPNTWIEATLPLRMLLIAKISK

SEQ ID NO: 4470 - protein, 376 aa, Homo sapiens
MSKSVPAFLQDESDDRETDTASESSYQLSRHKKSPSSLTNLSSSSGMTSLSSVSGSVMSVYSGDFGNLEVKGNIQFAIEYVESLKELHVFVAQCKDLAAADVKKQRSDPYVKAYLLPDKGKMGKKKTLVVKKTLNPVYNEILRYKIEKQILKTQKLNLSIWHRDTFKRNSFLGEVELDLETWDWDNKQNKQLRWYPLKRKTAPVALEAENRGEMKLALQYVPEPVPGKKLPTTGEVHIWVKECLDLPLLRGSHLNSFVKCTILPDTSRKSRQKTRAVGKTTNPIFNHTMVYDGFRPEDLMEACVELTVWDHYKLTNQFLGGLRIGFGTGKSYGTEVDWMDSTSEEVALWEKMVNSPNTWIEATLPLRMLLIAKISK

SEQ ID NO: 4471 - protein, 336 aa, Homo sapiens
MSKSVPAFLQDEVSGSVMSVYSGDFGNLEVKGNIQFAIEYVESLKELHVFVAQCKDLAAADVKKQRSDPYVKAYLLPDKGKMGKKKTLVVKKTLNPVYNEILRYKIEKQILKTQKLNLSIWHRDTFKRNSFLGEVELDLETWDWDNKQNKQLRWYPLKRKTAPVALEAENRGEMKLALQYVPEPVPGKKLPTTGEVHIWVKECLDLPLLRGSHLNSFVKCTILPDTSRKSRQKTRAVGKTTNPIFNHTMVYDGFRPEDLMEACVELTVWDHYKLTNQFLGGLRIGFGTGKSYGTEVDWMDSTSEEVALWEKMVNSPNTWIEATLPLRMLLIAKISK

SEQ ID NO: 4472 - protein, 910 aa, Homo sapiens
MIDLSFLTEEEQEAIMKVLQRDAALKRAEEERVRHLPEKIKDDQQLKNMSGQWFYEAKAKRHRDKIHGADIIRASMRKKRPQIAAEQSKDRENGAKESWVNNVNKDAFLPPELAGVVEEPEEDAAPASPSSSVVNPASSVIDMSQENTRKPNVSPEKRKNPFNSSKLPEGHSSQQTKNEQSKNGRTGLFQTSKEDELSESKEKSTVADTSIQKLEKSKQTLPGLSNGSQIKAPIPKARKMIYKSTDLNKDDNQSFPRQRTDSLKARGAPRGILKRNSSSSSTDSETLRYNHNFEPKSKIVSPGLTIHERISEKEHSLEDNSSPNSLEPLKHVRFSAVKDELPQSPGLIHGREVGEFSVLESDRLKNGMEDAGDTEEFQSDPKPSQYRKPSLFHQSTSSPYVSKSETHQPMTSGSFPINGLHSHSEVLTARPQSMENSPTINEPKDKSSELTRLESVLPRSPADELSHCVEPEPSQVPGGSSRDRQQGSEEEPSPVLKTLERSAARKMPSKSLEDISSDSSNQAKVDNQPEELVRSAEDDEKPDQKPVTNECVPRISTVPTQPDNPFSHPDKLKRMSKSVPAFLQDEVSGSVMSVYSGDFGNLEVKGNIQFAIEYVESLKELHVFVAQCKDLAAADVKKQRSDPYVKAYLLPDKGKMGKKKTLVVKKTLNPVYNEILRYKIEKQILKTQKLNLSIWHRDTFKRNSFLGEVELDLETWDWDNKQNKQLRWYPLKRKTAPVALEAENRGEMKLALQYVPEPVPGKKLPTTGEVHIWVKECLDLPLLRGSHLNSFVKCTILPDTSRKSRQKTRAVGKTTNPIFNHTMVYDGFRPEDLMEACVELTVWDHYKLTNQFLGGLRIGFGTGKSYGTEVDWMDSTSEEVALWEKMVNSPNTWIEATLPLRMLLIAKISK

SEQ ID NO: 4473 - protein, 1256 aa, Homo sapiens
MDEPNAEQVYNPSQFENLRKFWDLEANSNSKDNDKNITTTSQKNSAPFNRQKHKEFSDIKLSGKNTHEAEVLLSPKKVMAREEMEKLNSKGILQVLPDEITFPLSPLRKYTYQLPGNESSKENVEKNTEGIVTPVFKEEKDYSEQEIQESIIKTNVLSKDCKDTFNDSLQKLLSETSTPAIQPSGGKVHGKQVLEPSVSENRTWPQKTDFADTEEEVKGPEKIINEHVDKTVVHPKVKRNSLTASLDKLLKEATGTSPSPLQAKLAPVITGTNSKLEEGRFFGKGIEQSHNTSADKREILAPFPVRDETFGNTALLKKAESGECQLSTQNLIQMAAEDSHPLDPTSQLSRKGSFGDVASPPQDMLFPQDAHLVPQARVHPSQTEISETVEKVILPPRPVLNDVSAALQKLCGEVWLSYPAGREVGPGEVNPEFPEAVQPVCSPLNPPGVISPWATMDTIVPDRKDFYSSNVVPDKTHEVGSYLAAQMSPSDQTLSSFASIVAQYGKGLPQEVEEIVRETIVQPKSEFLEFSAGLEKLLKEETETFPSKYESDTGNLSPSKLIGSTEEPRRATSECHPEELKETVEKAEAPLITESAFDAGFEKLLKEITEAPPYQPQVSVREETHEKESSQSEQTRFLGTVPHFYRAASQTSEMKDKSNGLESQVNQCDKMLGGDALVTDLLVDFCGSRSGVEIPRTPQLYVAHEIGTIKTVTPPEDRDSESGVAGGQGTLQEPGFGEASEAISVSRNRQPIPLLMNKENSTKTSKVELTLASPYMKQEKEEEKEGFSESDFSDGNTSSNAESWRNPSSSEEEPSPVLKTLERSAARKMPSKSLEDISSDSSNQAKVDNQPEELVRSAEDVSTVPTQPDNPFSHPDKLKRMSKSVPAFLQDESDDRETDTASESSYQLSRHKKSPSSLTNLSSSSGMTSLSSVSGSVMSVYSGDFGNLEVKGNIQFAIEYVESLKELHVFVAQCKDLAAADVKKQRSDPYVKAYLLPDKGKMGKKKTLVVKKTLNPVYNEILRYKIEKQILKTQKLNLSIWHRDTFKRNSFLGEVELDLETWDWDNKQNKQLRWYPLKRKTAPVALEAENRGEMKLALQYVPEPVPGKKLPTTGEVHIWVKECLDLPLLRGSHLNSFVKCTILPDTSRKSRQKTRAVGKTTNPIFNHTMVYDGFRPEDLMEACVELTVWDHYKLTNQFLGGLRIGFGTGKSYGTEVDWMDSTSEEVALWEKMVNSPNTWIEATLPLRMLLIAKISK

SEQ ID NO: 4474 - protein, 1272 aa, Homo sapiens
MDEPNAEQVYNPSQFENLRKFWDLEANSNSKDNDKNITTTSQKNSAPFNRQKHKEFSDIKLSGKNTHEAEVLLSPKKVMAREEMEKLNSKGILQVLPDEITFPLSPLRKYTYQLPGNESSKENVEKNTEGIVTPVFKEEKDYSEQEIQESIIKTNVLSKDCKDTFNDSLQKLLSETSTPAIQPSGGKVHGKQVLEPSVSENRTWPQKTDFADTEEEVKGPEKIINEHVDKTVVHPKVKRNSLTASLDKLLKEATGTSPSPLQAKLAPVITGTNSKLEEGRFFGKGIEQSHNTSADKREILAPFPVRDETFGNTALLKKAESGECQLSTQNLIQMAAEDSHPLDPTSQLSRKGSFGDVASPPQDMLFPQDAHLVPQARVHPSQTEISETVEKVILPPRPVLNDVSAALQKLCGEVWLSYPAGREVGPGEVNPEFPEAVQPVCSPLNPPGVISPWATMDTIVPDRKDFYSSNVVPDKTHEVGSYLAAQMSPSDQTLSSFASIVAQYGKGLPQEVEEIVRETIVQPKSEFLEFSAGLEKLLKEETETFPSKYESDTGNLSPSKLIGSTEEPRRATSECHPEELKETVEKAEAPLITESAFDAGFEKLLKEITEAPPYQPQVSVREETHEKESSQSEQTRFLGTVPHFYRAASQTSEMKDKSNGLESQVNQCDKMLGGDALVTDLLVDFCGSRSGVEIPRTPQLYVAHEIGTIKTVTPPEDRDSESGVAGGQGTLQEPGFGEASEAISVSRNRQPIPLLMNKENSTKTSKVELTLASPYMKQEKEEEKEGFSESDFSDGNTSSNAESWRNPSSSEEEPSPVLKTLERSAARKMPSKSLEDISSDSSNQAKVDNQPEELVRSAEDDEKPDQKPVTNECVPRISTVPTQPDNPFSHPDKLKRMSKSVPAFLQDESDDRETDTASESSYQLSRHKKSPSSLTNLSSSSGMTSLSSVSGSVMSVYSGDFGNLEVKGNIQFAIEYVESLKELHVFVAQCKDLAAADVKKQRSDPYVKAYLLPDKGKMGKKKTLVVKKTLNPVYNEILRYKIEKQILKTQKLNLSIWHRDTFKRNSFLGEVELDLETWDWDNKQNKQLRWYPLKRKTAPVALEAENRGEMKLALQYVPEPVPGKKLPTTGEVHIWVKECLDLPLLRGSHLNSFVKCTILPDTSRKSRQKTRAVGKTTNPIFNHTMVYDGFRPEDLMEACVELTVWDHYKLTNQFLGGLRIGFGTGKSYGTEVDWMDSTSEEVALWEKMVNSPNTWIEATLPLRMLLIAKISK

SEQ ID NO: 4475 - protein, 365 aa, Homo sapiens
MSDDRETDTASESSYQLSRHKKSPSSLTNLSSSSGMTSLSSVSGSVMSVYSGDFGNLEVKGNIQFAIEYVESLKELHVFVAQCKDLAAADVKKQRSDPYVKAYLLPDKGKMGKKKTLVVKKTLNPVYNEILRYKIEKQILKTQKLNLSIWHRDTFKRNSFLGEVELDLETWDWDNKQNKQLRWYPLKRKTAPVALEAENRGEMKLALQYVPEPVPGKKLPTTGEVHIWVKECLDLPLLRGSHLNSFVKCTILPDTSRKSRQKTRAVGKTTNPIFNHTMVYDGFRPEDLMEACVELTVWDHYKLTNQFLGGLRIGFGTGKSYGTEVDWMDSTSEEVALWEKMVNSPNTWIEATLPLRMLLIAKISK

SEQ ID NO: 4476 - protein, 1232 aa, Homo sapiens
MDEPNAEQVYNPSQFENLRKFWDLEANSNSKDNDKNITTTSQKNSAPFNRQKHKEFSDIKLSGKNTHEAEVLLSPKKVMAREEMEKLNSKGILQVLPDEITFPLSPLRKYTYQLPGNESSKENVEKNTEGIVTPVFKEEKDYSEQEIQESIIKTNVLSKDCKDTFNDSLQKLLSETSTPAIQPSGGKVHGKQVLEPSVSENRTWPQKTDFADTEEEVKGPEKIINEHVDKTVVHPKVKRNSLTASLDKLLKEATGTSPSPLQAKLAPVITGTNSKLEEGRFFGKGIEQSHNTSADKREILAPFPVRDETFGNTALLKKAESGECQLSTQNLIQMAAEDSHPLDPTSQLSRKGSFGDVASPPQDMLFPQDAHLVPQARVHPSQTEISETVEKVILPPRPVLNDVSAALQKLCGEVWLSYPAGREVGPGEVNPEFPEAVQPVCSPLNPPGVISPWATMDTIVPDRKDFYSSNVVPDKTHEVGSYLAAQMSPSDQTLSSFASIVAQYGKGLPQEVEEIVRETIVQPKSEFLEFSAGLEKLLKEETETFPSKYESDTGNLSPSKLIGSTEEPRRATSECHPEELKETVEKAEAPLITESAFDAGFEKLLKEITEAPPYQPQVSVREETHEKESSQSEQTRFLGTVPHFYRAASQTSEMKDKSNGLESQVNQCDKMLGGDALVTDLLVDFCGSRSGVEIPRTPQLYVAHEIGTIKTVTPPEDRDSESGVAGGQGTLQEPGFGEASEAISVSRNRQPIPLLMNKENSTKTSKVELTLASPYMKQEKEEEKEGFSESDFSDGNTSSNAESWRNPSSSEEEPSPVLKTLERSAARKMPSKSLEDISSDSSNQAKVDNQPEELVRSAEDDEKPDQKPVTNECVPRISTVPTQPDNPFSHPDKLKRMSKSVPAFLQDEVSGSVMSVYSGDFGNLEVKGNIQFAIEYVESLKELHVFVAQCKDLAAADVKKQRSDPYVKAYLLPDKGKMGKKKTLVVKKTLNPVYNEILRYKIEKQILKTQKLNLSIWHRDTFKRNSFLGEVELDLETWDWDNKQNKQLRWYPLKRKTAPVALEAENRGEMKLALQYVPEPVPGKKLPTTGEVHIWVKECLDLPLLRGSHLNSFVKCTILPDTSRKSRQKTRAVGKTTNPIFNHTMVYDGFRPEDLMEACVELTVWDHYKLTNQFLGGLRIGFGTGKSYGTEVDWMDSTSEEVALWEKMVNSPNTWIEATLPLRMLLIAKISK

SEQ ID NO: 4477 - protein, 893 aa, Homo sapiens
MLFPQDAHLVPQARVHPSQTEISETVEKVILPPRPVLNDVSAALQKLCGEVWLSYPAGREVGPGEVNPEFPEAVQPVCSPLNPPGVISPWATMDTIVPDRKDFYSSNVVPDKTHEVGSYLAAQMSPSDQTLSSFASIVAQYGKGLPQEVEEIVRETIVQPKSEFLEFSAGLEKLLKEETETFPSKYESDTGNLSPSKLIGSTEEPRRATSECHPEELKETVEKAEAPLITESAFDAGFEKLLKEITEAPPYQPQVSVREETHEKESSQSEQTRFLGTVPHFYRAASQTSEMKDKSNGLESQVNQCDKMLGGDALVTDLLVDFCGSRSGVEIPRTPQLYVAHEIGTIKTVTPPEDRDSESGVAGGQGTLQEPGFGEASEAISVSRNRQPIPLLMNKENSTKTSKVELTLASPYMKQEKEEEKEGFSESDFSDGNTSSNAESWRNPSSSEEEPSPVLKTLERSAARKMPSKSLEDISSDSSNQAKVDNQPEELVRSAEDVSTVPTQPDNPFSHPDKLKRMSKSVPAFLQDESDDRETDTASESSYQLSRHKKSPSSLTNLSSSSGMTSLSSVSGSVMSVYSGDFGNLEVKGNIQFAIEYVESLKELHVFVAQCKDLAAADVKKQRSDPYVKAYLLPDKGKMGKKKTLVVKKTLNPVYNEILRYKIEKQILKTQKLNLSIWHRDTFKRNSFLGEVELDLETWDWDNKQNKQLRWYPLKRKTAPVALEAENRGEMKLALQYVPEPVPGKKLPTTGEVHIWVKECLDLPLLRGSHLNSFVKCTILPDTSRKSRQKTRAVGKTTNPIFNHTMVYDGFRPEDLMEACVELTVWDHYKLTNQFLGGLRIGFGTGKSYGTEVDWMDSTSEEVALWEKMVNSPNTWIEATLPLRMLLIAKISK

SEQ ID NO: 4478 - protein, 935 aa, Homo sapiens
MIDLSFLTEEEQEAIMKVLQRDAALKRAEEERVRHLPEKIKDDQQLKNMSGQWFYEAKAKRHRDKIHGADIIRASMRKKRPQIAAEQSKDRENGAKESWVNNVNKDAFLPPELAGVVEEPEEDAAPASPSSSVVNPASSVIDMSQENTRKPNVSPEKQRKNPFNSSKLPEGHSSQQTKNEQSKNGRTGLFQTSKEDELSESKEKSTVADTSIQKLEKSKQTLPGLSNGSQIKAPIPKARKMIYKSTDLNKDDNQSFPRQRTDSLKARGAPRGILKRNSSSSSTDSETLRYNHNFEPKSKIVSPGLTIHERISEKEHSLEDNSSPNSLEPLKHVRFSAVKDELPQSPGLIHGREVGEFSVLESDRLKNGMEDAGDTEEFQSDPKPSQYRKPSLFHQSTSSPYVSKSETHQPMTSGSFPINGLHSHSEVLTARPQSMENSPTINEPKDKSSELTRLESVLPRSPADELSHCVEPEPSQVPGGSSRDRQQGSEEEPSPVLKTLERSAARKMPSKSLEDISSDSSNQAKVDNQPEELVRSAEDVSTVPTQPDNPFSHPDKLKRMSKSVPAFLQDESDDRETDTASESSYQLSRHKKSPSSLTNLSSSSGMTSLSSVSGSVMSVYSGDFGNLEVKGNIQFAIEYVESLKELHVFVAQCKDLAAADVKKQRSDPYVKAYLLPDKGKMGKKKTLVVKKTLNPVYNEILRYKIEKQILKTQKLNLSIWHRDTFKRNSFLGEVELDLETWDWDNKQNKQLRWYPLKRKTAPVALEAENRGEMKLALQYVPEPVPGKKLPTTGEVHIWVKECLDLPLLRGSHLNSFVKCTILPDTSRKSRQKTRAVGKTTNPIFNHTMVYDGFRPEDLMEACVELTVWDHYKLTNQFLGGLRIGFGTGKSYGTEVDWMDSTSEEVALWEKMVNSPNTWIEATLPLRMLLIAKISK

SEQ ID NO: 4479 - protein, 902 aa, Homo sapiens
MSGQWFYEAKAKRHRDKIHGADIIRASMRKKRPQIAAEQSKDRENGAKESWVNNVNKDAFLPPELAGVVEEPEEDAAPASPSSSVVNPASSVIDMSQENTRKPNVSPEKRKNPFNSSKLPEGHSSQQTKNEQSKNGRTGLFQTSKEDELSESKEKSTVADTSIQKLEKSKQTLPGLSNGSQIKAPIPKARKMIYKSTDLNKDDNQSFPRQRTDSLKARGAPRGILKRNSSSSSTDSETLRYNHNFEPKSKIVSPGLTIHERISEKEHSLEDNSSPNSLEPLKHVRFSAVKDELPQSPGLIHGREVGEFSVLESDRLKNGMEDAGDTEEFQSDPKPSQYRKPSLFHQSTSSPYVSKSETHQPMTSGSFPINGLHSHSEVLTARPQSMENSPTINEPKDKSSELTRLESVLPRSPADELSHCVEPEPSQVPGGSSRDRQQGSEEEPSPVLKTLERSAARKMPSKSLEDISSDSSNQAKVDNQPEELVRSAEDDEKPDQKPVTNECVPRISTVPTQPDNPFSHPDKLKRMSKSVPAFLQDESDDRETDTASESSYQLSRHKKSPSSLTNLSSSSGMTSLSSVSGSVMSVYSGDFGNLEVKGNIQFAIEYVESLKELHVFVAQCKDLAAADVKKQRSDPYVKAYLLPDKGKMGKKKTLVVKKTLNPVYNEILRYKIEKQILKTQKLNLSIWHRDTFKRNSFLGEVELDLETWDWDNKQNKQLRWYPLKRKTAPVALEAENRGEMKLALQYVPEPVPGKKLPTTGEVHIWVKECLDLPLLRGSHLNSFVKCTILPDTSRKSRQKTRAVGKTTNPIFNHTMVYDGFRPEDLMEACVELTVWDHYKLTNQFLGGLRIGFGTGKSYGTEVDWMDSTSEEVALWEKMVNSPNTWIEATLPLRMLLIAKISK

SEQ ID NO: 4480 - protein, 752 aa, Homo sapiens
MSQENTRKPNVSPEKRKNPFNSSKLPEGHSSQQTKNEQSKNGRTGLFQTSKEDELSESKEKSTVADTSIQKLEKSKQTLPGLSNGSQIKAPIPKARKMIYKSTDLNKDDNQSFPRQRTDSLKARGAPRGILKRNSSSSSTDSETLRYNHNFEPKSKIVSPGLTIHERISEKEHSLEDNSSPNSLEPLKHVRFSAVKDELPQSPGLIHGREVGEFSVLESDRLKNGMEDAGDTEEFQSDPKPSQYRKPSLFHQSTSSPYVSKSETHQPMTSGSFPINGLHSHSEVLTARPQSMENSPTINEPKDKSSELTRLESVLPRSPADELSHCVEPEPSQVPGGSSRDRQQGSEEEPSPVLKTLERSAARKMPSKSLEDISSDSSNQAKVDNQPEELVRSAEDVSTVPTQPDNPFSHPDKLKRMSKSVPAFLQDEVSGSVMSVYSGDFGNLEVKGNIQFAIEYVESLKELHVFVAQCKDLAAADVKKQRSDPYVKAYLLPDKGKMGKKKTLVVKKTLNPVYNEILRYKIEKQILKTQKLNLSIWHRDTFKRNSFLGEVELDLETWDWDNKQNKQLRWYPLKRKTAPVALEAENRGEMKLALQYVPEPVPGKKLPTTGEVHIWVKECLDLPLLRGSHLNSFVKCTILPDTSRKSRQKTRAVGKTTNPIFNHTMVYDGFRPEDLMEACVELTVWDHYKLTNQFLGGLRIGFGTGKSYGTEVDWMDSTSEEVALWEKMVNSPNTWIEATLPLRMLLIAKISK

SEQ ID NO: 4481 - protein, 610 aa, Homo sapiens
MAQEIDLSALKELEREAILQVLYRDQAVQNTEEERTRKLKTHLQHLRWKGAKNTDWEHKEKCCARCQQVLGFLLHRGAVCRGCSHRVCAQCRVFLRGTHAWKCTVCFEDRNVKIKTGEWFYEERAKKFPTGGKHETVGGQLLQSYQKLSKISVVPPTPPPVSESQCSRSPGRLQEFGQFRGFNKSVENLFLSLATHVKKLSKSQNDMTSEKHLLATGPRQCVGQTERRSQSDTAVNVTTRKVSAPDILKPLNQEDPKCSTNPILKQQNLPSSPAPSTIFSGGFRHGSLISIDSTCTEMGNFDNANVTGEIEFAIHYCFKTHSLEICIKACKNLAYGEEKKKKCNPYVKTYLLPDRSSQGKRKTGVQRNTVDPTFQETLKYQVAPAQLVTRQLQVSVWHLGTLARRVFLGEVIIPLATWDFEDSTTQSFRWHPLRAKAEKYEDSVPQSNGELTVRAKLVLPSRPRKLQEAQEGTDQPSLHGQLCLVVLGAKNLPVRPDGTLNSFVKGCLTLPDQQKLRLKSPVLRKQACPQWKHSFVFSGVTPAQLRQSSLELTVWDQALFGMNDRLLGGTRLGSKGDTAVGGDACSLSKLQWQKVLSSPNLWTDMTLVLH

SEQ ID NO: 4482 - protein, 542 aa, Homo sapiens
MAQEIDLSALKELEREAILQVLYRDQAVQNTEEERTRKLKTHLQHLRWKGAKNTDWEHKEKCCARCQQVLGFLLHRGAVCRGCSHRVCAQCRVFLRGTHAWKCTVCFEDRNVKIKTGEWFYEERAKKFPTGGKHETVGGQLLQSYQKLSKISVVPPTPPPVSESQCSRSPGRKVSAPDILKPLNQEDPKCSTNPILKQQNLPSSPAPSTIFSGGFRHGSLISIDSTCTEMGNFDNANVTGEIEFAIHYCFKTHSLEICIKACKNLAYGEEKKKKCNPYVKTYLLPDRSSQGKRKTGVQRNTVDPTFQETLKYQVAPAQLVTRQLQVSVWHLGTLARRVFLGEVIIPLATWDFEDSTTQSFRWHPLRAKAEKYEDSVPQSNGELTVRAKLVLPSRPRKLQEAQEGTDQPSLHGQLCLVVLGAKNLPVRPDGTLNSFVKGCLTLPDQQKLRLKSPVLRKQACPQWKHSFVFSGVTPAQLRQSSLELTVWDQALFGMNDRLLGGTRLGSKGDTAVGGDACSLSKLQWQKVLSSPNLWTDMTLVLH

SEQ ID NO: 4483 - protein, 562 aa, Homo sapiens
MPQRGHPSQEGLWALPSLPMAHGPKPETEGLLDLSFLTEEEQEAIAGVLQRDARLRQLEEGRVSKLRASVADPGQLKILTGDWFQEARSQRHHNAHFGSDLVRASMRRKKSTRGDQAPGHDREAEAAVKEKEEGPEPRLTIDEAPQERLRETEGPDFPSPSVPLKASDPEEASQAQEDPGQGDQQVCAEEADPELEPASGGEQEPRPQQAQTKAASQILENGEEAPGPDPSLDRMLSSSSSVSSLNSSTLSGSQMSLSGDAEAVQVRGSVHFALHYEPGAAELRVHVIQCQGLAAARRRRSDPYVKSYLLPDKQSKRKTAVKKRNLNPVFNETLRYSVPQAELQGRVLSLSVWHRESLGRNIFLGEVEVPLDTWDWGSEPTWLPLQPRVPPSPDDLPSRGLLALSLKYVPAGSEGAGLPPSGELHFWVKEARDLLPLRAGSLDTYVQCFVLPDDSQASRQRTRVVRRSLSPVFNHTMVYDGFGPADLRQACAELSLWDHGALANRQLGGTRLSLGTGSSYGLQVPWMDSTPEEKQLWQALLEQPCEWVDGLLPLRTNLAPRT

SEQ ID NO: 4484 - protein, 550 aa, Homo sapiens
MPQRGHPSQEGLWALPSLPMAHGPKPETEGLLDLSFLTEEEQEAIAGVLQRDARLRQLEEGRVSKLRASVADPGQLKILTGDWFQEARSQRHHNAHFGSDLVRASMRRKKSTRGDQAPGHDREAEAAVKEKEEGPEPRLTIDEAPQERLRETEASDPEEASQAQEDPGQGDQQVCAEEADPELEPASGGEQEPRPQQAQTKAASQILENGEEAPGPDPSLDRMLSSSSSVSSLNSSTLSGSQMSLSGDAEAVQVRGSVHFALHYEPGAAELRVHVIQCQGLAAARRRRSDPYVKSYLLPDKQSKRKTAVKKRNLNPVFNETLRYSVPQAELQGRVLSLSVWHRESLGRNIFLGEVEVPLDTWDWGSEPTWLPLQPRVPPSPDDLPSRGLLALSLKYVPAGSEGAGLPPSGELHFWVKEARDLLPLRAGSLDTYVQCFVLPDDSQASRQRTRVVRRSLSPVFNHTMVYDGFGPADLRQACAELSLWDHGALANRQLGGTRLSLGTGSSYGLQVPWMDSTPEEKQLWQALLEQPCEWVDGLLPLRTNLAPRT

SEQ ID NO: 4485 - protein, 323 aa, Homo sapiens
MATVNTDATDKDISKFKVTFTLVVSGIECITGILGSGFITAIYGAEWARGKTLPTGDRIMLMLSFSRLLLQIWMMLENIFSLLFRIVYNQNSVYILFKVITVFLNHSNLWFAAWLKVFYCLRIANFNHPLFFLMKRKIIVLMPWLLRLSVLVSLSFSFPLSRDVFNVYVNSSIPIPSSNSTEKKYFSETNMVNLVFFYNMGIFVPLIMFILAATLLILSLKRHTLHMGSNATGSRDPSMKAHIGAIKATSYFLILYIFNAIALFLSTSNIFDTYSSWNILCKIIMAAYPAGHSVQLILGNPGLRRAWKRFQHQVPLYLKGQTL

SEQ ID NO: 4486 - protein, 309 aa, Homo sapiens
MICFLLIILSILVVFAFVLGNFSNGFIALVNVIDWVKRQKISSADQILTALVVSRVGLLWVILLHWYSNVLNSALYSSEVIIFISNAWAIINHFSIWLATSLSIFYLLKIVNFSRLIFHHLKRKAKSVVLVIVLGPLVFLVCHLVMKHTYINVWTKEYEGNVTWKIKLRNAIHLSNLTVSTLANLIPFTLTLISFLLLIYSLCKHLKKMQLHGKGSQDPSTKVHIKALQTVTSFLLLCAIYFLSMIISVCNFGRLEKQPVFMFCQAIIFSYPSTHPFILILGNKKLKQIFLSVFWQMRYWVKGEKPSSP

SEQ ID NO: 4487 - protein, 319 aa, Homo sapiens
MITFLPIIFSILIVVIFVIGNFANGFIALVNSIEWVKRQKISFVDQILTALAVSRVGLLWVLLLHWYATQLNPAFYSVEVRITAYNVWAVTNHFSSWLATSLSMFYLLRIANFSNLIFLRIKRRVKSVVLVILLGPLLFLVCHLFVINMDETVWTKEYEGNVTWKIKLRSAMYHSNMTLTMLANFVPLTLTLISFLLLICSLCKHLKKMQLHGKGSQDPSTKVHIKALQTVTSFLLLCAIYFLSMIISVCNFGRLEKQPVFMFCQAIIFSYPSTHPFILILGNKKLKQIFLSVLRHVRYWVKDRSLRLHRFTRGALCVF

SEQ ID NO: 4488 - protein, 161 aa, Homo sapiens
MNQFGPSALINLSNFSSIKPEPASTPPQGSMANSTAVVKIPGTPGAGGRLSPENNQVLTKKKLQDLVREVDPNEQLDEDVEEMLLQIADDFIESVVTAACQLARHRKSSTLEVKDVQLHLERQWNMWIPGFGSEEIRPYKKACTTEAHKQRMALIRKTTKK

SEQ ID NO: 4489 - protein, 131 aa, Homo sapiens
MANSTAVVKIPGTPGAGGRLSPENNQVLTKKKLQDLVREVDPNEQLDEDVEEMLLQIADDFIESVVTAACQLARHRKSSTLEVKDVQLHLERQWNMWIPGFGSEEIRPYKKACTTEAHKQRMALIRKTTKK

SEQ ID NO: 4490 - protein, 817 aa, Homo sapiens
MMDGPRSDVGRWGGNPLQPPTTPSPEPEPEPDGRSRRGGGRSFWARCCGCCSCRNAADDDWGPEPSDSRGRGSSSGTRRPGSRGSDSRRPVSRGSGVNAAGDGTIREGMLVVNGVDLLSSRSDQNRREHHTDEYEYDELIVRRGQPFHMLLLLSRTYESSDRITLELLIGNNPEVGKGTHVIIPVGKGGSGGWKAQVVKASGQNLNLRVHTSPNAIIGKFQFTVRTQSDAGEFQLPFDPRNEIYILFNPWCPEDIVYVDHEDWRQEYVLNESGRIYYGTEAQIGERTWNYGQFDHGVLDACLYILDRRGMPYGGRGDPVNVSRVISAMVNSLDDNGVLIGNWSGDYSRGTNPSAWVGSVEILLSYLRTGYSVPYGQCWVFAGVTTTVLRCLGLATRTVTNFNSAHDTDTSLTMDIYFDENMKPLEHLNHDSVWNFHVWNDCWMKRPDLPSGFDGWQVVDATPQETSSGIFCCGPCSVESIKNGLVYMKYDTPFIFAEVNSDKVYWQRQDDGSFKIVYVEEKAIGTLIVTKAISSNMREDITYLYKHPEGSDAERKAVETAAAHGSKPNVYANRGSAEDVAMQVEAQDAVMGQDLMVSVMLINHSSSRRTVKLHLYLSVTFYTGVSGTIFKETKKEVELAPGASDRVTMPVAYKEYRPHLVDQGAMLLNVSGHVKESGQVLAKQHTFRLRTPDLSLTLLGAAVVGQECEVQIVFKNPLPVTLTNVVFRLEGSGLQRPKILNVGDIGGNETVTLRQSFVPVRPGPRQLIASLDSPQLSQVHGVIQVDVAPAPGDGGFFSDAGGDSHLGETIPMASRGGA

SEQ ID NO: 4491 - protein, 375 aa, Homo sapiens
MKRPDLPSGFDGWQVVDATPQETSSGIFCCGPCSVESIKNGLVYMKYDTPFIFAEVNSDKVYWQRQDDGSFKIVYVEEKAIGTLIVTKAISSNMREDITYLYKHPEGSDAERKAVETAAAHGSKPNVYANRGSAEDVAMQVEAQDAVMGQDLMVSVMLINHSSSRRTVKLHLYLSVTFYTGVSGTIFKETKKEVELAPGASDRVTMPVAYKEYRPHLVDQGAMLLNVSGHVKESGQVLAKQHTFRLRTPDLSLTLLGAAVVGQECEVQIVFKNPLPVTLTNVVFRLEGSGLQRPKILNVGDIGGNETVTLRQSFVPVRPGPRQLIASLDSPQLSQVHGVIQVDVAPAPGDGGFFSDAGGDSHLGETIPMASRGGA

SEQ ID NO: 4492 - protein, 683 aa, Homo sapiens
MSSESSKKRKPKVIRSDGAPAEGKRNRSDTEQEGKYYSEEAEVDLRDPGRDYELYKYTCQELQRLMAEIQDLKSRGGKDVAIEIEERRIQSCVHFMTLKKLNRLAHIRLKKGRDQTHEAKQKVDAYHLQLQNLLYEVMHLQKEITKCLEFKSKHEEIDLVSLEEFYKEAPPDISKAEVTMGDPHQQTLARLDWELEQRKRLAEKYRECLSNKEKILKEIEVKKEYLSSLQPRLNSIMQASLPVQEYLFMPFDQAHKQYETARHLPPPLYVLFVQATAYGQACDKTLSVAIEGSVDEAKALFKPPEDSQDDESDSDAEEEQTTKRRRPTLGVQLDDKRKEMLKRHPLSVMLDLKCKDDSVLHLTFYYLMNLNIMTVKAKVTTAMELITPISAGDLLSPDSVLSCLYPGDHGKKTPNPANQYQFDKVGILTLSDYVLELGHPYLWVQKLGGLHFPKEQPQQTVIADHSLSASHMETTMKLLKTRVQSRLALHKQFASLEHGIVPVTSDCQYLFPAKVVSRLVKWVTVAHEDYMELHFTKDIVDAGLAGDTNLYYMALIERGTAKLQAAVVLNPGYSSIPPVFQLCLNWKGEKTNSNDDNIRAMEGEVNVCYKELCGPWPSHQLLTNQLQRLCVLLDVYLETESHDDSVEGPKEFPQEKMCLRLFRGPSRMKPFKYNHPQGFFSHR

SEQ ID NO: 4493 - protein, 359 aa, Homo sapiens
MPSLLLLFTAALLSSWAQLLTDANSWWSLALNPVQRPEMFIIGAQPVCSQLPGLSPGQRKLCQLYQEHMAYIGEGAKTGIKECQHQFRQRRWNCSTADNASVFGRVMQIGSRETAFTHAVSAAGVVNAISRACREGELSTCGCSRTARPKDLPRDWLWGGCGDNVEYGYRFAKEFVDAREREKNFAKGSEEQGRVLMNLQNNEAGRRAVYKMADVACKCHGVSGSCSLKTCWLQLAEFRKVGDRLKEKYDSAAAMRVTRKGRLELVNSRFTQPTPEDLVYVDPSPDYCLRNESTGSLGTQGRLCNKTSEGMDGCELMCCGRGYNQFKSVQVERCHCKFHWCCFVRCKKCTEIVDQYICK

SEQ ID NO: 4494 - protein, 907 aa, Homo sapiens
MNAPLDGLSVSSSSTGSLGSAAGAGGGGGAGLRLLSANVRQLHQALTALLSEAEREQFTHCLNAYHARRNVFDLVRTLRVLLDSPVKRRLLPMLRLVIPRSDQLLFDQYTAEGLYLPATTPYRQPAWGGPDSAGPGEVRLVSLRRAKAHEGLGFSIRGGSEHGVGIYVSLVEPGSLAEKEGLRVGDQILRVNDKSLARVTHAEAVKALKGSKKLVLSVYSAGRIPGGYVTNHIYTWVDPQGRSISPPSGLPQPHGGALRQQEGDRRSTLHLLQGGDEKKVNLVLGDGRSLGLTIRGGAEYGLGIYITGVDPGSEAEGSGLKVGDQILEVNGRSFLNILHDEAVRLLKSSRHLILTVKDVGRLPHARTTVDETKWIASSRIRETMANSAGFLGDLTTEGINKPGFYKGPAGSQVTLSSLGNQTRVLLEEQARHLLNEQEHATMAYYLDEYRGGSVSVEALVMALFKLLNTHAKFSLLSEVRGTISPQDLERFDHLVLRREIESMKARQPPGPGAGDTYSMVSYSDTGSSTGSHGTSTTVSSARNTLDLEETGEAVQGNINALPDVSVDDVRSTSQGLSSFKPLPRPPPLAQGNDLPLGQPRKLGREDLQPPSSMPSCSGTVFSAPQNRSPPAGTAPTPGTSSAQDLPSSPIYASVSPANPSSKRPLDAHLALVNQHPIGPFPRVQSPPHLKSPSAEATVAGGCLLPPSPSGHPDQTGTNQHFVMVEVHRPDSEPDVNEVRALPQTRTASTLSQLSDSGQTLSEDSGVDAGEAEASAPGRGRQSVSTKSRSSKELPRNERPTDGANKPPGLLEPTSTLVRVKKSAATLGIAIEGGANTRQPLPRIVTIQRGGSAHNCGQLKVGHVILEVNGLTLRGKEHREAARIIAEAFKTKDRDYIDFLVTEFNVML

SEQ ID NO: 4495 - protein, 345 aa, Homo sapiens
MNAPLDGLSVSSSSTGSLGSAAGAGGGGGAGLRLLSANVRQLHQALTALLSEAEREQFTHCLNAYHARRNVFDLVRTLRVLLDSPVKRRLLPMLRLVIPRSDQLLFDQYTAEGLYLPATTPYRQPAWGGPDSAGPGEVRLVSLRRAKAHEGLGFSIRGGSEHGVGIYVSLVEPGSLAEKEGLRVGDQILRVNDKSLARVTHAEAVKALKGSKKLVLSVYSAGRIPGGYVTNHIYTWVDPQGRSISPPSGLPQPHGGALRQQEGDRRSTLHLLQGGDEKKVSGVGKGGQPLRHRILPPNPEQQSCLEAARRGWFCPGSVFPQVCTEGWCFFFAFLFDLCSVCYNTG

SEQ ID NO: 4496 - protein, 524 aa, Homo sapiens
MANSAGFLGDLTTEGINKPGFYKGPAGSQVTLSSLGNQTRVLLEEQARHLLNEQEHATMAYYLDEYRGGSVSVEALVMALFKLLNTHAKFSLLSEVRGTISPQDLERFDHLVLRREIESMKARQPPGPGAGDTYSMVSYSDTGSSTGSHGTSTTVSSARNTLDLEETGEAVQGNINALPDVSVDDVRSTSQGLSSFKPLPRPPPLAQGNDLPLGQPRKLGREDLQPPSSMPSCSGTVFSAPQNRSPPAGTAPTPGTSSAQDLPSSPIYASVSPANPSSKRPLDAHLALVNQHPIGPFPRVQSPPHLKSPSAEATVAGGCLLPPSPSGHPDQTGTNQHFVMVEVHRPDSEPDVNEVRALPQTRTASTLSQLSDSGQTLSEDSGVDAGEAEASAPGRGRQSVSTKSRSSKELPRNERPTDGANKPPGLLEPTSTLVRVKKSAATLGIAIEGGANTRQPLPRIVTIQRGGSAHNCGQLKVGHVILEVNGLTLRGKEHREAARIIAEAFKTKDRDYIDFLVTEFNVML

SEQ ID NO: 4497 - protein, 556 aa, Homo sapiens
MHGSLEALLFLPQVTLSLAHAHLICSNAQLEMCVFPHRFLGDLTTEGINKPGFYKGPAGSQVTLSSLGNQTRVLLEEQARHLLNEQEHATMAYYLDEYRGGSVSVEALVMALFKLLNTHAKFSLLSEVRGTISPQDLERFDHLVLRREIESMKARQPPGPGAGDTYSMVSYSDTGSSTGSHGTSTTVSSARNTLDLEETGEAVQGNINALPDVSVDDVRSTSQGLSSFKPLPRPPPLAQGNDLPLGQPRKLGREDLQPPSSMPSCSGTVFSAPQNRSPPAGTAPTPGTSSAQDLPSSPIYASVSPANPSSKRPLDAHLALVNQHPIGPFPRVQSPPHLKSPSAEATVAGGCLLPPSPSGHPDQTGTNQHFVMVEVHRPDSEPDVNEVRALPQTRTASTLSQLSDSGQTLSEDSGVDAGEAEASAPGRGRQSVSTKSRSSKELPRNERPTDGANKPPGLLEPTSTLVRVKKSAATLGIAIEGGANTRQPLPRIVTIQRGGSAHNCGQLKVGHVILEVNGLTLRGKEHREAARIIAEAFKTKDRDYIDFLVTEFNVML

SEQ ID NO: 4498 - protein, 379 aa, Homo sapiens
MARRSAFPAAALWLWSILLCLLALRAEAGPPQEESLYLWIDAHQARVLIGFEEDILIVSEGKMAPFTHDFRKAQQRMPAIPVNIHSMNFTWQAAGQAEYFYEFLSLRSLDKGIMADPTVNVPLLGTVPHKASVVQVGFPCLGKQDGVAAFEVDVIVMNSEGNTILQTPQNAIFFKTCQQAECPGGCRNGGFCNERRICECPDGFHGPHCEKALCTPRCMNGGLCVTPGFCICPPGFYGVNCDKANCSTTCFNGGTCFYPGKCICPPGLEGEQCEISKCPQPCRNGGKCIGKSKCKCSKGYQGDLCSKPVCEPGCGAHGTCHEPNKCQCQEGWHGRHCNKRYEASLIHALRPAGAQLRQHTPSLKKAEERRDPPESNYIW

SEQ ID NO: 4499 - protein, 349 aa, Homo sapiens
MNRKARRCLGHLFLSLGMVYLRIGGFSSVVALGASIICNKIPGLAPRQRAICQSRPDAIIVIGEGSQMGLDECQFQFRNGRWNCSALGERTVFGKELKVGSREAAFTYAIIAAGVAHAITAACTQGNLSDCGCDKEKQGQYHRDEGWKWGGCSADIRYGIGFAKVFVDAREIKQNARTLMNLHNNEAGRKILEENMKLECKCHGVSGSCTTKTCWTTLPQFRELGYVLKDKYNEAVHVEPVRASRNKRPTFLKIKKPLSYRKPMDTDLVYIEKSPNYCEEDPVTGSVGTQGRACNKTAPQASGCDLMCCGRGYNTHQYARVWQCNCKFHWCCYVKCNTCSERTEMYTCK

SEQ ID NO: 4500 - protein, 397 aa, Homo sapiens
MAPISLSWLLRLATFCHLTVLLAGQHHGVTKCNITCSKMTSKIPVALLIHYQQNQASCGKRAIILETRQHRLFCADPKEQWVKDAMQHLDRQAAALTRNGGTFEKQIGEVKPRTTPAAGGMDESVVLEPEATGESSSLEPTPSSQEAQRALGTSPELPTGVTGSSGTRLPPTPKAQDGGPVGTELFRVPPVSTAATWQSSAPHQPGPSLWAEAKTSEAPSTQDPSTQASTASSPAPEENAPSEGQRVWGQGQSPRPENSLEREEMGPVPAHTDAFQDWGPGSMAHVSVVPVSSEGTPSREPVASGSWTPKAEEPIHATMDPQRLGVLITPVPDAQAATRRQAVGLLAFLGLLFCLGVAMFTYQSLQGCPRKMAGEMAEGLRYIPRSCGSNSYVLVPV

SEQ ID NO: 4501 - protein, 349 aa, Homo sapiens
MHRNFRKWIFYVFLCFGVLYVKLGALSSVVALGANIICNKIPGLAPRQRAICQSRPDAIIVIGEGAQMGINECQYQFRFGRWNCSALGEKTVFGQELRVGSREAAFTYAITAAGVAHAVTAACSQGNLSNCGCDREKQGYYNQAEGWKWGGCSADVRYGIDFSRRFVDAREIKKNARRLMNLHNNEAGRKVLEDRMQLECKCHGVSGSCTTKTCWTTLPKFREVGHLLKEKYNAAVQVEVVRASRLRQPTFLRIKQLRSYQKPMETDLVYIEKSPNYCEEDAATGSVGTQGRLCNRTSPGADGCDTMCCGRGYNTHQYTKVWQCNCKFHWCCFVKCNTCSERTEVFTCK

SEQ ID NO: 4502 - protein, 503 aa, Homo sapiens
MPVPPPPAPPPPPTFALANTEKPTLNKTEQAGRNALLSDISKGKKLKKTVTNDRSAPILDKPKGAGAGGGGGGFGGGGGFGGGGGGGGGGSFGGGGPPGLGGLFQAGMPKLRSTANRDNDSGGSRPPLLPPGGRSTSAKPFSPPSGPGRFPVPSPGHRSGPPEPQRNRMPPPRPDVGSKPDSIPPPVPSTPRPIQSSPHNRGSPPVPGGPRQPSPGPTPPPFPGNRGTALGGGSIRQSPLSSSSPFSNRPPLPPTPSRALDDKPPPPPPPVGNRPSIHREAVPPPPPQNNKPPVPSTPRPSASSQAPPPPPPPSRPGPPPLPPSSSGNDETPRLPQRNLSLSSSTPPLPSPGRSGPLPPPPSERPPPPVRDPPGRSGPLPPPPPVSRNGSTSRALPATPQLPSRSGVDSPRSGPRPPLPPDRPSAGAPPPPPPSTSIRNGFQDSPCEDEWESRFYFHPISDLPPPEPYVQTTKSYPSKLARNESRSGSNRRERGAPPLPPIPR

SEQ ID NO: 4503 - protein, 493 aa, Homo sapiens
MPVPPPPAPPPPPTFALANTEKPTLNKTEQAGRNALLSDISKGKKLKKTVTNDRSAPILDKPKGAGAGGGGGGFGGGGGFGGGGGGGGGGSFGGGGPPGLGGLFQAGMPKLRSTANRDNDSGGSRPPLLPPGGRSTSAKPFSPPSGPGRFPVPSPGHRSGPPEPQRNRMPPPRPDVGSKPDSIPPPVPSTPRPIQSSPHNRGSPPVPGGPRQPSPGPTPPPFPGNRGTALGGGSIRQSPLSSSSPFSNRPPLPPTPSRALDDKPPPPPPPVGNRPSIHREAVPPPPPQNNKPPVPSTPRPSASSQAPPPPPPPSRPGPPPLPPSSSGNDETPRLPQRNLSLSSSTPPLPSPGRSGPLPPPPSERPPPPVRDPPGRSGPLPPPPPVSRNGSTSRALPATPQLPSRSGVDSPRSGPRPPLPPDRPSAGAPPPPPPSTSIRNGFQDSPCEDEWESRFYFHPISDLPPPEPYVQTTKSYPSKLARNESRSEYFCQGF

SEQ ID NO: 4504 - protein, 510 aa, Homo sapiens
MPVPPPPAPPPPPTFALANTEKPTLNKTEQAGRNALLSDISKGKKLKKTVTNDRSAPILDKPKGAGAGGGGGGFGGGGGFGGGGGGGGGGSFGGGGPPGLGGLFQAGMPKLRSTANRDNDSGGSRPPLLPPGGRSTSAKPFSPPSGPGRFPVPSPGHRSGPPEPQRNRMPPPRPDVGSKPDSIPPPVPSTPRPIQSSPHNRGSPPVPGGPRQPSPGPTPPPFPGNRGTALGGGSIRQSPLSSSSPFSNRPPLPPTPSRALDDKPPPPPPPVGNRPSIHREAVPPPPPQNNKPPVPSTPRPSASSQAPPPPPPPSRPGPPPLPPSSSGNDETPRLPQRNLSLSSSTPPLPSPGRSGPLPPPPSERPPPPVRDPPGRSGPLPPPPPVSRNGSTSRALPATPQLPSRSGVDSPRSGPRPPLPPDRPSAGAPPPPPPSTSIRNGFQDSPCEDEWESRFYFHPISDLPPPEPYVQTTKSYPSKLARNESRSGSNRRERGAPPLPPIPRPPKQAAE

SEQ ID NO: 4505 - protein, 358 aa, Homo sapiens
MPVPPPPAPPPPPTFALANTEKPTLNKTEQAGRNALLSDISKGKKLKKTVTNDRSAPILDKPKGAGAGGGGGGFGGGGGFGGGGGGGGGGSFGGGGPPGLGGLFQAGMPKLRSTANRDNDSGGSRPPLLPPGGRSTSAKPFSPPSGPGRFPVPSPGHRSGPPEPQRNRMPPPRPDVGSKPDSIPPPVPSTPRPIQSSPHNRGSPPVPGGPRQPSPGPTPPPPPVRDPPGRSGPLPPPPPVSRNGSTSRALPATPQLPSRSGVDSPRSGPRPPLPPDRPSAGAPPPPPPSTSIRNGFQDSPCEDEWESRFYFHPISDLPPPEPYVQTTKSYPSKLARNESRSGSNRRERGAPPLPPIPR

SEQ ID NO: 4506 - protein, 440 aa, Homo sapiens
MPIPPPPPPPPGPPPPPTFHQANTEQPKLSRDEQRGRGALLQDICKGTKLKKVTNINDRSAPILEKPKGSSGGYGSGGAALQPKGGLFQGGVLKLRPVGAKDGSENLAGKPALQIPSSRAAAPRPPVSAASGRPQDDTDSSRASLPELPRMQRPSLPDLSRPNTTSSTGMKHSSSAPPPPPPGRRANAPPTPLPMHSSKAPAYNREKPLPPTPGQRLHPGREGPPAPPPVKPPPSPVNIRTGPSGQSLAPPPPPYRQPPGVPNGPSSPTNESAPELPQRHNSLHRKTPGPVRGLAPPPPTSASPSLLSNRPPPPARDPPSRGAAPPPPPPVIRNGARDAPPPPPPYRMHGSEPPSRGKPPPPPSRTPAGPPPPPPPPLRNGHRDSITTVRSFLDDFESKYSFHPVEDFPAPEEYKHFQRIYPSKTNRAARGAPPLPPILR

SEQ ID NO: 4507 - protein, 290 aa, Homo sapiens
MQRPSLPDLSRPNTTSSTGMKHSSSAPPPPPPGRRANAPPTPLPMHSSKAPAYNREKPLPPTPGQRLHPGREGPPAPPPVKPPPSPVNIRTGPSGQSLAPPPPPYRQPPGVPNGPSSPTNESAPELPQRHNSLHRKTPGPVRGLAPPPPTSASPSLLSNRPPPPARDPPSRGAAPPPPPPVIRNGARDAPPPPPPYRMHGSEPPSRGKPPPPPSRTPAGPPPPPPPPLRNGHRDSITTVRSFLDDFESKYSFHPVEDFPAPEEYKHFQRIYPSKTNRAARGAPPLPPILR

SEQ ID NO: 4508 - protein, 351 aa, Homo sapiens
MGNLFMLWAALGICCAAFSASAWSVNNFLITGPKAYLTYTTSVALGAQSGIEECKFQFAWERWNCPENALQLSTHNRLRSATRETSFIHAISSAGVMYIITKNCSMGDFENCGCDGSNNGKTGGHGWIWGGCSDNVEFGERISKLFVDSLEKGKDARALMNLHNNRAGRLAVRATMKRTCKCHGISGSCSIQTCWLQLAEFREMGDYLKAKYDQALKIEMDKRQLRAGNSAEGHWVPAEAFLPSAEAELIFLEESPDYCTCNSSLGIYGTEGRECLQNSHNTSRWERRSCGRLCTECGLQVEERKTEVISSCNCKFQWCCTVKCDQCRHVVSKYYCARSPGSAQSLGKGSA

SEQ ID NO: 4509 - protein, 355 aa, Homo sapiens
MGNLFMLWAALGICCAAFSASAWSVNNFLITGPKAYLTYTTSVALGAQSGIEECKFQFAWERWNCPENALQLSTHNRLRSATRETSFIHAISSAGVMYIITKNCSMGDFENCGCDGSNNGKTGGHGWIWGGCSDNVEFGERISKLFVDSLEKGKDARALMNLHNNRAGRLAVRATMKRTCKCHGISGSCSIQTCWLQLAEFREMGDYLKAKYDQALKIEMDKRQLRAGNSAEGHWVPAEAFLPSAEAELIFLEESPDYCTCNSSLGIYGTEGRECLQNSHNTSRWERRSCGRLCTECGLQVEERKTEVISSCNCKFQWCCTVKCDQCRHVVSKYYCARSPGSAQSLGRVWFGVYI

SEQ ID NO: 4510 - protein, 483 aa, Homo sapiens
MPVPPPPPPPLPPPPPPLGAPPPPPPSAPPVSTDTSSLRRADPKGRSALLADIQQGTRLRKVTQINDRSAPQIESSKGTNKEGGGSANTRGASTPPTLGDLFAGGFPVLRPAGQRDVAGGKTGQGPGSRAPSPRLPNKTISGPLIPPASPRLGNTSEAHGAARTAPPRPNVPAPPPPTPPPPPPPLPPPLPSSSPIKTPLVSPPGPLTKGNLPVVAPPVPCAPPPPPPPPPPTPPPLPPASVLSDKAVKPQLAPLHLPPIPPPLPLLPPCGYPGLKAEPASPAQDAQEPPAPPPPLPPYASCSPRASLPAPPLPGVNSSSETPPPLPPKSPSFQAPPQKAGAQALPAPPAPPGSQPFLQKKRHGRPGAGGGKLNPPPAPPARSPTTELSSKSQQATAWTPTQQPGGQLRNGSLHIIDDFESKFTFHSVEDFPPPDEYKPCQKIYPSKIPRSRTPGPWLQAEAVGQSSDDIKGRNSQLSLKTLR

SEQ ID NO: 4511 - protein, 365 aa, Homo sapiens
MTGRDSLSDGRTSSRALVPGGSPRGSRPRGFAITDLLGLEAELPAPAGPGQGSGCEGPAVAPCPGPGLDGSSLARGALPLGLGLLCGFGTQPPAAARAPCLLLADVPFLPPRGPEPAAPLAPSRPPPALGRQKRSDSVSTSDEDSQSEDRNDLKASPTLGKRKKRRHRTVFTAHQLEELEKAFSEAHYPDVYAREMLAVKTELPEDRIQVWFQNRRAKWRKREKRWGGSSVMAEYGLYGAMVRHCIPLPDSVLNSAEGGLLGSCAPWLLGMHKKSMGMIRKPGSEDKLAGLWGSDHFKEGSSQSESGSQRGSDKVSPENGLEDVAIDLSSSARQETKKVHPGAGAQGGSNSTALEGPQPGKVGAT

SEQ ID NO: 4512 - protein, 239 aa, Homo sapiens
MTGRDSLSDGRTSSRALVPGGSPRGSRPRGFAITDLLGLEAELPAPAGPGQGSGCEGPAVAPCPGPGLDGSSLARGALPLGLGLLCGFGTQPPAAARAPCLLLADVPFLPPRGPEPAAPLAPSRPPPALGRQKRSDSVSTSDEDSQSEDRNDLKASPTLGKRKKRRHRTVFTAHQLEELEKAFSEAHYPDVYAREMLAVKTELPEDRIQVSGVPFLRSKDTTENVSFPHSVSQSAVPSL

SEQ ID NO: 4513 - protein, 374 aa, Homo sapiens
MTGRDSLSDGRTSSRALVPGGSPRGSRPRGFAITDLLGLEAELPAPAGPGQGSGCEGPAVAPCPGPGLDGSSLARGALPLGLGLLCGFGTQPPAAARAPCLLLADVPFLPPRGPEPAAPLAPSRPPPALGRQKRSDSVSTSGNQARAFRSCPCPLGSEPRRGHRPSPHRTPGPSGPDLGGEPRARPRRGRGIRGAAPPAPCCILNPCLSSGVLFPQRCETATTWFRVEPFDETLGSSTTISRGPFFPPAPGASLRLWQLRGSGRPGPVVVTSSTEQDEDSQSEDRNDLKASPTLGKRKKRRHRTVFTAHQLEELEKAFSEAHYPDVYAREMLAVKTELPEDRIQVSGVPFLRSKDTTENVSFPHSVSQSAVPSL

SEQ ID NO: 4514 - protein, 143 aa, Homo sapiens
MTGRDSLSDGRTSSRALVPGGSPRGSRPRGFAITDLLGLEAELPAPAGPGQGSGCEGPAVAPCPGPGLDGSSLARGALPLGLGLLCGFGTQPPAAARAPCLLLADVPFLPPRGPEPAAPLAPSRPPPALGRQKRSDSVSTSAM

SEQ ID NO: 4515 - protein, 280 aa, Homo sapiens
MTGRDSLSDGRTSSRALVPGGSPRGSRPRGFAITDLLGLEAELPAPAGPGQGSGCEGPAVAPCPGPGLDGSSLARGALPLGLGLLCGFGTQPPAAARAPCLLLADVPFLPPRGPEPAAPLAPSRPPPALGRQKRSDSVSTSDEDSQSEDRNDLKASPTLGKRKKRRHRTVFTAHQLEELEKAFSEAHYPDVYAREMLAVKTELPEDRIQVWFQNRRAKWRKREKRWGGSSVMAEYGLYGAMVRHCIPLPDSVLNSAEGGLLGSCAPWLLEGETLGCREMK

SEQ ID NO: 4516 - protein, 218 aa, Homo sapiens
MTGRDSLSDGRTSSRALVPGGSPRGSRPRGFAITDLLGLEAELPAPAGPGQGSGCEGPAVAPCPGPGLDGSSLARGALPLGLGLLCGFGTQPPAAARAPCLLLADVPFLPPRGPEPAAPLAPSRPPPALGRQKRSDSVSTSDEDSQSEDRNDLKASPTLGKRKKRRHRTVFTAHQLEELEKAFSEAHYPDVYAREMLAVKTELPEDRIQRVRHWAAEK

SEQ ID NO: 4517 - protein, 236 aa, Homo sapiens
MTGRDSLSDGRTSSRALVPGGSPRGSRPRGFAITDLLGLEAELPAPAGPGQGSGCEGPAVAPCPGPGLDGSSLARGALPLGLGLLCGFGTQPPAAARAPCLLLADVPFLPPRGPEPAAPLAPSRPPPALGRQKRSDSVSTSDEDSQSEDRNDLKASPTLGKRKKRRHRTVFTAHQLEELEKAFSEAHYPDVYAREMLAVKTELPEDRIQCKLLLLEAPVHWTLQETHRLPRPRGGA

SEQ ID NO: 4518 - protein, 301 aa, Homo sapiens
MTGRDSLSDGRTSSRALVPGGSPRGSRPRGFAITDLLGLEAELPAPAGPGQGSGCEGPAVAPCPGPGLDGSSLARGALPLGLGLLCGFGTQPPAAARAPCLLLADVPFLPPRGPEPAAPLAPSRPPPALGRQKRSDSVSTSDEDSQSEDRNDLKASPTLGKRKKRRHRTVFTAHQLEELEKAFSEAHYPDVYAREMLAVKTELPEDRIQVWFQNRRAKWRKREKRWGGSSVMAEYGLYGAMVRHCIPLPDSVLNSAEGGLLGSCAPWLLVQTSAPGGSRSLDFAGDTQAPQTPWWCLMTFS

SEQ ID NO: 4519 - protein, 92 aa, Homo sapiens
MQRRGQPLENHVALIHWQSAGIPASKVHNYCNMKKSRLGRSRAVRISQPLLSPRRCPLHLTERGAGLLQPQPQGPVRTPGPPSGSHPAAADN

SEQ ID NO: 4520 - protein, 351 aa, Homo sapiens
MFLSKPSVYICLFTCVLQLSHSWSVNNFLMTGPKAYLIYSSSVAAGAQSGIEECKYQFAWDRWNCPERALQLSSHGGLRSANRETAFVHAISSAGVMYTLTRNCSLGDFDNCGCDDSRNGQLGGQGWLWGGCSDNVGFGEAISKQFVDALETGQDARAAMNLHNNEAGRKAVKGTMKRTCKCHGVSGSCTTQTCWLQLPEFREVGAHLKEKYHAALKVDLLQGAGNSAAGRGAIADTFRSISTRELVHLEDSPDYCLENKTLGLLGTEGRECLRRGRALGRWERRSCRRLCGDCGLAVEERRAETVSSCNCKFHWCCAVRCEQCRRRVTKYFCSRAERPRGGAAHKPGRKP

SEQ ID NO: 4521 - protein, 446 aa, Homo sapiens
MEAEAADAPPGGVESALSCFSFNQDCTSLATGTKAGYKLFSLSSVEQLDQVHGSNEIPDVYIVERLFSSSLVVVVSHTKPRQMNVYHFKKGTEICNYSYSSNILSIRLNRQRLLVCLEESIYIHNIKDMKLLKTLLDIPANPTGLCALSINHSNSYLAYPGSLTSGEIVLYDGNSLKTVCTIAAHEGTLAAITFNASGSKLASASEKGTVIRVFSVPDGQKLYEFRRGMKRYVTISSLVFSMDSQFLCASSNTETVHIFKLEQVTNSRPEEPSTWSGYMGKMFMAATNYLPTQVSDMMHQDRAFATARLNFSGQRNICTLSTIQKLPRLLVASSSGHLYMYNLDPQDGGECVLIKTHSLLGSGTTEENKENDLRPSLPQSYAATVARPSASSASTVPGYSEDGGALRGEVIPEHEFATGPVCLDDENEFPPIILCRGNQKGKTKQS

SEQ ID NO: 4522 - protein, 441 aa, Homo sapiens
MDAPPGGVESALSCFSFNQDCTSLATGTKAGYKLFSLSSVEQLDQVHGSNEIPDVYIVERLFSSSLVVVVSHTKPRQMNVYHFKKGTEICNYSYSSNILSIRLNRQRLLVCLEESIYIHNIKDMKLLKTLLDIPANPTGLCALSINHSNSYLAYPGSLTSGEIVLYDGNSLKTVCTIAAHEGTLAAITFNASGSKLASASEKGTVIRVFSVPDGQKLYEFRRGMKRYVTISSLVFSMDSQFLCASSNTETVHIFKLEQVTNSRPEEPSTWSGYMGKMFMAATNYLPTQVSDMMHQDRAFATARLNFSGQRNICTLSTIQKLPRLLVASSSGHLYMYNLDPQDGGECVLIKTHSLLGSGTTEENKENDLRPSLPQSYAATVARPSASSASTVPGYSEDGGALRGEVIPEHEFATGPVCLDDENEFPPIILCRGNQKGKTKQS

SEQ ID NO: 4523 - protein, 365 aa, Homo sapiens
MLDGSPLARWLAAAFGLTLLLAALRPSAAYFGLTGSEPLTILPLTLEPEAAAQAHYKACDRLKLERKQRRMCRRDPGVAETLVEAVSMSALECQFQFRFERWNCTLEGRYRASLLKRGFKETAFLYAISSAGLTHALAKACSAGRMERCTCDEAPDLENREAWQWGGCGDNLKYSSKFVKEFLGRRSSKDLRARVDFHNNLVGVKVIKAGVETTCKCHGVSGSCTVRTCWRQLAPFHEVGKHLKHKYETALKVGSTTNEAAGEAGAISPPRGRASGAGGSDPLPRTPELVHLDDSPSFCLAGRFSPGTAGRRCHREKNCESICCGRGHNTQSRVVTRPCQCQVRWCCYVECRQCTQREEVYTCKG

SEQ ID NO: 4524 - protein, 424 aa, Homo sapiens
MRAPGCGRLVLPLLLLAAAALAEGDAKGLKEGETPGNFMEDEQWLSSISQYSGKIKHWNRFRDEVEDDYIKSWEDNQQGDEALDTTKDPCQKVKCSRHKVCIAQGYQRAMCISRKKLEHRIKQPTVKLHGNKDSICKPCHMAQLASVCGSDGHTYSSVCKLEQQACLSSKQLAVRCEGPCPCPTEQAATSTADGKPETCTGQDLADLGDRLRDWFQLLHENSKQNGSASSVAGPASGLDKSLGASCKDSIGWMFSKLDTSADLFLDQTELAAINLDKYEVCIRPFFNSCDTYKDGRVSTAEWCFCFWREKPPCLAELERIQIQEAAKKKPGIFIPSCDEDGYYRKMQCDQSSGDCWCVDQLGLELTGTRTHGSPDCDDIVGFSGDFGSGVGWEDEEEKETEEAGEEAEEEEGEAGEADDGGYIW

SEQ ID NO: 4525 - protein, 77 aa, Homo sapiens
MRAPGCGRLVLPLLLLAAAALAEGDAKGLKEGETPGNFMEDEQWLSSISQYSGKIKHWNRFRDVPSSDPPSTTQATP

SEQ ID NO: 4526 - protein, 439 aa, Homo sapiens
MPAIAVLAAAAAAWCFLQVESRHLDALAGGAGPNHGNFLDNDQWLSTVSQYDRDKYWNRFRDDDYFRNWNPNKPFDQALDPSKDPCLKVKCSPHKVCVTQDYQTALCVSRKHLLPRQKKGNVAQKHWVGPSNLVKCKPCPVAQSAMVCGSDGHSYTSKCKLEFHACSTGKSLATLCDGPCPCLPEPEPPKHKAERSACTDKELRNLASRLKDWFGALHEDANRVIKPTSSNTAQGRFDTSILPICKDSLGWMFNKLDMNYDLLLDPSEINAIYLDKYEPCIKPLFNSCDSFKDGKLSNNEWCYCFQKPGGLPCQNEMNRIQKLSKGKSLLGAFIPRCNEEGYYKATQCHGSTGQCWCVDKYGNELAGSRKQGAVSCEEEQETSGDFGSGGSVVLLDDLEYERELGPKDKEGKLRVHTRAVTEDDEDEDDDKEDEVGYIW

SEQ ID NO: 4527 - protein, 398 aa, Homo sapiens
MHFSTVTRDMEAFTASSLSSLGAAGGFPGAASPGADPYGPREPPPPPPRYDPCAAAAPGAPGPPPPPHAYPFAPAAGAATSAAAEPEGPGASCAAAAKAPVKKNAKVAGVSVQLEMKALWDEFNQLGTEMIVTKAGRRMFPTFQVKLFGMDPMADYMLLMDFVPVDDKRYRYAFHSSSWLVAGKADPATPGRVHYHPDSPAKGAQWMKQIVSFDKLKLTNNLLDDNGHIILNSMHRYQPRFHVVYVDPRKDSEKYAEENFKTFVFEETRFTAVTAYQNHRITQLKIASNPFAKGFRDCDPEDWPRNHRPGALPLMSAFARSRNPVASPTQPSGTEKGGHVLKDKEVKAETSRNTPEREVELLRDAGGCVNLGLPCPAECQPFNTQGLVAGRTAGDRLC

SEQ ID NO: 4528 - protein, 372 aa, Homo sapiens
MHFSTVTRDMEAFTASSLSSLGAAGGFPGAASPGADPYGPREPPPPPPRYDPCAAAAPGAPGPPPPPHAYPFAPAAGAATSAAAEPEGPGASCAAAAKAPVKKNAKVAGVSVQLEMKALWDEFNQLGTEMIVTKAGRRMFPTFQVKLFGMDPMADYMLLMDFVPVDDKRYRYAFHSSSWLVAGKADPATPGRVHYHPDSPAKGAQWMKQIVSFDKLKLTNNLLDDNGHIILNSMHRYQPRFHVVYVDPRKDSEKYAEENFKTFVFEETRFTAVTAYQNHRITQLKIASNPFAKGFRDCDPEDWPRNHRPGALPLMSAFARSRNPVASPTQPSGTEKGLVTEGSGLQPGLLDVLLKPPSKKSESLRPPHCKDT

SEQ ID NO: 4529 - protein, 495 aa, Homo sapiens
MHFSTVTRDMEAFTASSLSSLGAAGGFPGAASPGADPYGPREPPPPPPRYDPCAAAAPGAPGPPPPPHAYPFAPAAGAATSAAAEPEGPGASCAAAAKAPVKKNAKVAGVSVQLEMKALWDEFNQLGTEMIVTKAGRRMFPTFQVKLFGMDPMADYMLLMDFVPVDDKRYRYAFHSSSWLVAGKADPATPGRVHYHPDSPAKGAQWMKQIVSFDKLKLTNNLLDDNGHIILNSMHRYQPRFHVVYVDPRKDSEKYAEENFKTFVFEETRFTAVTAYQNHRITQLKIASNPFAKGFRDCDPEDWPRNHRPGALPLMSAFARSRNPVASPTQPSGTEKDAAEARREFQRDAGGPAVLGDPAHPPQLLARVLSPSLPGAGGAGGLVPLPGAPGGRPSPPNPELRLEAPGASEPLHHHPYKYPAAAYDHYLGAKSRPAPYPLPGLRGHGYHPHAHPHHHHHPVSPAAAAAAAAAAAAAAANMYSSAGAAPPGSYDYCPR

SEQ ID NO: 4530 - protein, 161 aa, Homo sapiens
MEKPLTVLRVSLYHPTLGPSAFANVPPRLQHDTSPLLLGRGQDAHLQLQLPRLSRRHLSLEPYLEKGSALLAFCLKALSRKGCVWVNGLTLRYLEQVPLSTVNRVSFSGIQMLVRVEEGTSLEAFVCYFHVSPSPLIYRPEAEETDEWEGISQGQPPPGSG

SEQ ID NO: 4531 - protein, 835 aa, Homo sapiens
MAASAAAASAAAASAASGSPGPGEGSAGGEKRSTAPSAAASASASAAASSPAGGGAEALELLEHCGVCRERLRPEREPRLLPCLHSACSACLGPAAPAAANSSGDGGAAGDGTVVDCPVCKQQCFSKDIVENYFMRDSGSKAATDAQDANQCCTSCEDNAPATSYCVECSEPLCETCVEAHQRVKYTKDHTVRSTGPAKSRDGERTVYCNVHKHEPLVLFCESCDTLTCRDCQLNAHKDHQYQFLEDAVRNQRKLLASLVKRLGDKHATLQKSTKEVRSSIRQVSDVQKRVQVDVKMAILQIMKELNKRGRVLVNDAQKVTEGQQERLERQHWTMTKIQKHQEHILRFASWALESDNNTALLLSKKLIYFQLHRALKMIVDPVEPHGEMKFQWDLNAWTKSAEAFGKIVAERPGTNSTGPAPMAPPRAPGPLSKQGSGSSQPMEVQEGYGFGSGDDPYSSAEPHVSGVKRSRSGEGEVSGLMRKVPRVSLERLDLDLTADSQPPVFKVFPGSTTEDYNLIVIERGAAAAATGQPGTAPAGTPGAPPLAGMAIVKEEETEAAIGAPPTATEGPETKPVLMALAEGPGAEGPRLASPSGSTSSGLEVVAPEGTSAPGGGPGTLDDSATICRVCQKPGDLVMCNQCEFCFHLDCHLPALQDVPGEEWSCSLCHVLPDLKEEDGSLSLDGADSTGVVAKLSPANQRKCERVLLALFCHEPCRPLHQLATDSTFSLDQPGGTLDLTLIRARLQEKLSPPYSSPQEFAQDVGRMFKQFNKLTEDKADVQSIIGLQRFFETRMNEAFGDTKFSAVLVEPPPMSLPGAGLSSQELSGGPGDGP

SEQ ID NO: 4532 - protein, 753 aa, Homo sapiens
MAASAAAASAAAASAASGSPGPGEGSAGGEKRSTAPSAAASASASAAASSPAGGGAEALELLEHCGVCRERLRPEREPRLLPCLHSACSACLGPAAPAAANSSGDGGAAGDGTGPAKSRDGERTVYCNVHKHEPLVLFCESCDTLTCRDCQLNAHKDHQYQFLEDAVRNQRKLLASLVKRLGDKHATLQKSTKEVRSSIRQVSDVQKRVQVDVKMAILQIMKELNKRGRVLVNDAQKVTEGQQERLERQHWTMTKIQKHQEHILRFASWALESDNNTALLLSKKLIYFQLHRALKMIVDPVEPHGEMKFQWDLNAWTKSAEAFGKIVAERPGTNSTGPAPMAPPRAPGPLSKQGSGSSQPMEVQEGYGFGSGDDPYSSAEPHVSGVKRSRSGEGEVSGLMRKVPRVSLERLDLDLTADSQPPVFKVFPGSTTEDYNLIVIERGAAAAATGQPGTAPAGTPGAPPLAGMAIVKEEETEAAIGAPPTATEGPETKPVLMALAEGPGAEGPRLASPSGSTSSGLEVVAPEGTSAPGGGPGTLDDSATICRVCQKPGDLVMCNQCEFCFHLDCHLPALQDVPGEEWSCSLCHVLPDLKEEDGSLSLDGADSTGVVAKLSPANQRKCERVLLALFCHEPCRPLHQLATDSTFSLDQPGGTLDLTLIRARLQEKLSPPYSSPQEFAQDVGRMFKQFNKLTEDKADVQSIIGLQRFFETRMNEAFGDTKFSAVLVEPPPMSLPGAGLSSQELSGGPGDGP

SEQ ID NO: 4533 - protein, 151 aa, Homo sapiens
MEYVLEVKNSPRHLLKQFTVCDVPLYDICDYNVSRDRCQELGCCFYEGVCYKKAVPIYIHVFSALIVIIAGAFVITIIYRVIQESRKEKAIPVDVALPQKSSEKAELASSSSKLGLKPASPGPPSAGPSMKSDEDKDDVTGTITEAEETED

SEQ ID NO: 4534 - protein, 391 aa, Homo sapiens
MAGRSLCLTRSSVPGTPFPPPVQQPSTPGPDLLALEEEYKRLNAELQAKTADVVQQAKEIIRDRQEVRSRPVSTQMKSCDDEDDYSLRGLLPSEGIVHLHSETKPKTKNIDPVNKVQNKLHSANKGRKTNSSVKLKYSDVQTADDVAIPEDFSDFSLAKTISKIEGQLEEEGLPEYIDDIFSGVSNDIGTEAQIRFLKAKLHVMQEELDNVVCECNKKEDEIQNLKSQVKNFEEDFMRQQRTINMQQSQVEKYKTLFEEANKKYDGLQQQLSSVERELENKRRLQKQAASSQSATEVRLNRALEEAEKYKLELSKLRQNNKDIANEEHKKIEVLKSENKKLEKQKGELMIGFKKQLKLIDVLKRQKMHIEAAKMLSFTEEEFMKALEWGNS

SEQ ID NO: 4535 - protein, 316 aa, Homo sapiens
MKSCDDEDDYSLRGLLPSEGIVHLHSETKPKTKNIDPVNKVQNKLHSANKGRKTNSSVKLKYSDVQTADDVAIPEDFSDFSLAKTISKIEGQLEEEGLPEYIDDIFSGVSNDIGTEAQIRFLKAKLHVMQEELDNVVCECNKKEDEIQNLKSQVKNFEEDFMRQQRTINMQQSQVEKYKTLFEEANKKYDGLQQQLSSVERELENKRRLQKQAASSQSATEVRLNRALEEAEKYKLELSKLRQNNKDIANEEHKKIEVLKSENKKLEKQKGELMIGFKKQLKLIDVLKRQKMHIEAAKMLSFTEEEFMKALEWGNS

SEQ ID NO: 4536 - protein, 177 aa, Homo sapiens
MSNQRLPLIFSLLFICFFGESFCICDGTVWTKVGWEILPEEVHYWKVKGSPSHCLPYLLDKLCCDFANMDIFQGCLYLIYNLLQAVFFVLFVLSVHYLWKKWKKHQKKLKKQASLEKPGNDLESPLINNIDQTLHRVATTASVIYKIWEHRSHHPSSKKIKHCKLKKKSKEEGARRY

SEQ ID NO: 4537 - protein, 395 aa, Homo sapiens
MDEEPERTKRWEGGYERTWEILKEDESGSLKATIEDILFKAKRKRVFEHHGQVRLGMMRHLYVVVDGSRTMEDQDLKPNRLTCTLKLLEYFVEEYFDQNPISQIGIIVTKSKRAEKLTELSGNPRKHITSLKKAVDMTCHGEPSLYNSLSIAMQTLKHMPGHTSREVLIIFSSLTTCDPSNIYDLIKTLKAAKIRVSVIGLSAEVRVCTVLARETGGTYHVILDESHYKELLTHHVSPPPASSSSECSLIRMGFPQHTIASLSDQDAKPSFSMAHLDGNTEPGLTLGGYFCPQCRAKYCELPVECKICGLTLVSAPHLARSYHHLFPLDAFQEIPLEEYNGERFCYGCQGELKDQHVYVCAVCQNVFCVDCDVFVHDSLHCCPGCIHKIPAPSGV

SEQ ID NO: 4538 - protein, 512 aa, Homo sapiens
MAEASVDASTLPVTVKKKKSLSIEEKIDIINAVESGKKKAEIAAEYGIKKNSLSSIMKNKDKVLEAFESLRFDPKRKRLRTAFYTDLEEALMRWYRIAQCLNVPVNGPMLRLKANDFAQKLGHNDFKCSNGWLDRFKSRYGLVFRAQPVEATGVPVDPSTVWYQNVLPYYLNDYHPKNVFNIKETGLLYRMLPTNTFAFKGETCSVGKLCKDRITLVVGTNMDGSEKLPLLVIGKKRTPHCFKGLKSLPVCYEANRMAWMTSDVFEQWMRKLDEEFQAQQRRVVIFVESFPAHPEVKNLKSIELAFFPSCLSSKCIAMKQGVIKSLKIKYRHCLIKKFLSSVEGSKEFTFSLLDAVDTLHLCWRAVTPETIVKSYEEAGFKSQKGESDITNAEKDTGLDLVADALGAGVEFPEGLSIEEYAALDDDLETCEAAPNGDSICTKESKSDETGFYTSDEEDDDGSPGTELPLPSKSEAITALDTLKKFLRSQDMNDGLQNSLADLENFINSLSPK

SEQ ID NO: 4539 - protein, 436 aa, Homo sapiens
MYHPRELYPSLGAGYRLGPAQPGADSSFPPALAEGYRYPELDTPKLDCFLSGMEAAPRTLAAHPPLPLLPPAMGTEPAPSAPEALHSLPGVSLSLENRELWKEFSSVGTEMIITKAGRRMFPACRVSVTGLDPEARYLFLLDVIPVDGARYRWQGRRWEPSGKAEPRLPDRVYIHPDSPATGAHWMRQPVSFHRVKLTNSTLDPHGHLILHSMHKYQPRIHLVRAAQLCSQHWGGMASFRFPETTFISVTAYQNPQITQLKIAANPFAKGFRENGRNCKRERDARVKRKLRGPEPAATEAYGSGDTPGGPCDSTLGGDIRESDPEQAPAPGEATAAPAPLCGGPSAEAYLLHPAAFHGAPSHLPTRSPSFPEAPDSGRSAPYSAAFLELPHGSGGSGYPAAPPAVPFAPHFLQGGPFPLPYTAPGGYLDVGSKPMY

SEQ ID NO: 4540 - protein, 295 aa, Homo sapiens
MYHPRELYPSLGAGYRLGPAQPGADSSFPPALAEGYRYPELDTPKLDCFLSGMEAAPRTLAAHPPLPLLPPAMGTEPAPSAPEALHSLPGVSLSLENRELWKEFSSVGTEMIITKAGRRMFPACRVSVTGLDPEARYLFLLDVIPVDGARYRWQGRRWEPSGKAEPRLPDRVYIHPDSPATGAHWMRQPVSFHRVKLTNSTLDPHGHLILHSMHKYQPRIHLVRAAQLCSQHWGGMASFRFPETTFISVTAYQNPQITQLKIAANPFAKGFRENGRNCKRWELFIHLFMHSTNVY

SEQ ID NO: 4541 - protein, 547 aa, Homo sapiens
MEVGGDTAAPAPGGAEDLEDTQFPSEEAREGGGVHAVPPDPEDEGLEETGSKDKDQPPSPSPPPQSEALSSTSRLWSPAAPENSPTCSPESSSGGQGGDPSDEEWRSQRKHVFVLSEAGKPIYSRYGSVEALSATMGVMTALVSFVQSAGDAIRAIYAEDHKLVFLQQGPLLLVAMSRTSQSAAQLRGELLAVHAQIVSTLTRASVARIFAHKQNYDLRRLLAGSERTLDRLLDSMEQDPGALLLGAVRCVPLARPLRDALGALLRRCTAPGLALSVLAVGGRLITAAQERNVLAECRLDPADLQLLLDWVGAPAFAAGEAWAPVCLPRFNPDGFFYAYVARLDAMPVCLLLLGTQREAFHAMAACRRLVEDGMHALGAMRALGEAASFSNASSASAPAYSVQAVGAPGLRHFLYKPLDIPDHHRQLPQFTSPELEAPYSREEERQRLSDLYHRLHARLHSTSRPLRLIYHVAEKETLLAWVTSKFELYTCLSPLVTKAGAILVVTKLLRWVKKEEDRLFIRYPPKYSTPPATSTDQAAHNGLFTGL

SEQ ID NO: 4542 - protein, 401 aa, Homo sapiens
MVSGQLRFGVKTEDHKLVFLQQGPLLLVAMSRTSQSAAQLRGELLAVHAQIVSTLTRASVARIFAHKQNYDLRRLLAGSERTLDRLLDSMEQDPGALLLGAVRCVPLARPLRDALGALLRRCTAPGLALSVLAVGGRLITAAQERNVLAECRLDPADLQLLLDWVGAPAFAAGEAWAPVCLPRFNPDGFFYAYVARLDAMPVCLLLLGTQREAFHAMAACRRLVEDGMHALGAMRALGEAASFSNASSASAPAYSVQAVGAPGLRHFLYKPLDIPDHHRQLPQFTSPELEAPYSREEERQRLSDLYHRLHARLHSTSRPLRLIYHVAEKETLLAWVTSKFELYTCLSPLVTKAGAILVVTKLLRWVKKEEDRLFIRYPPKYSTPPATSTDQAAHNGLFTGL

SEQ ID NO: 4543 - protein, 607 aa, Homo sapiens
MILLTFSTGRRLDFVHHSGVFFLQTLLWILCATVCGTEQYFNVEVWLQKYGYLPPTDPRMSVLRSAETMQSALAAMQQFYGINMTGKVDRNTIDWMKKPRCGVPDQTRGSSKFHIRRKRYALTGQKWQHKHITYSIKNVTPKVGDPETRKAIRRAFDVWQNVTPLTFEEVPYSELENGKRDVDITIIFASGFHGDSSPFDGEGGFLAHAYFPGPGIGGDTHFDSDEPWTLGNPNHDGNDLFLVAVHELGHALGLEHSNDPTAIMAPFYQYMETDNFKLPNDDLQGIQKIYGPPDKIPPPTRPLPTVPPHRSIPPADPRKNDRPKPPRPPTGRPSYPGAKPNICDGNFNTLAILRREMFVFKDQWFWRVRNNRVMDGYPMQITYFWRGLPPSIDAVYENSDGNFVFFKGNKYWVFKDTTLQPGYPHDLITLGSGIPPHGIDSAIWWEDVGKTYFFKGDRYWRYSEEMKTMDPGYPKPITVWKGIPESPQGAFVHKENGFTYFYKGKEYWKFNNQILKVEPGYPRSILKDFMGCDGPTDRVKEGHSPPDDVDIVIKLDNTASTVKAIAIVIPCILALCLLVLVYTVFQFKRKGTPRHILYCKRSMQEWV

SEQ ID NO: 4544 - protein, 457 aa, Homo sapiens
MILLTFSTGRRLDFVHHSGVFFLQTLLWILCATVCGTEQYFNVEVWLQKYGYLPPTDPRMSVLRSAETMQSALAAMQQFYGINMTGKVDRNTIDWMKKPRCGVPDQTRGSSKFHIRRKRYALTGQKWQHKHITYSIKNVTPKVGDPETRKAIRRAFDVWQNVTPLTFEEVPYSELENGKRDVDITIIFASGFHGDSSPFDGEGGFLAHAYFPGPGIGGDTHFDSDEPWTLGNPNHDGNDLFLVAVHELGHALGLEHSNDPTAIMAPFYQYMETDNFKLPNDDLQGIQKIYGPPDKIPPPTRPLPTVPPHRSIPPADPRKNDRPKPPRPPTGRPSYPGAKPNICDGNFNTLAILRREMFVFKDQWFWRVRNNRVMDGYPMQITYFWRGLPPSIDAVYENSDGNFVFFKVKGDTLSVIQDGWLYKYHWKWILEQRQSVPVLSRQTEKHKTYEELSSITY

SEQ ID NO: 4545 - protein, 470 aa, Homo sapiens
MKFLLILLLQATASGALPLNSSTSLEKNNVLFGERYLEKFYGLEINKLPVTKMKYSGNLMKEKIQEMQHFLGLKVTGQLDTSTLEMMHAPRCGVPDVHHFREMPGGPVWRKHYITYRINNYTPDMNREDVDYAIRKAFQVWSNVTPLKFSKINTGMADILVVFARGAHGDFHAFDGKGGILAHAFGPGSGIGGDAHFDEDEFWTTHSGGTNLFLTAVHEIGHSLGLGHSSDPKAVMFPTYKYVDINTFRLSADDIRGIQSLYGDPKENQRLPNPDNSEPALCDPNLSFDAVTTVGNKIFFFKDRFFWLKVSERPKTSVNLISSLWPTLPSGIEAAYEIEARNQVFLFKDDKYWLISNLRPEPNYPKSIHSFGFPNFVKKIDAAVFNPRFYRTYFFVDNQYWRYDERRQMMDPGYPKLITKNFQGIGPKIDAVFYSKNKYYYFFQGSNQFEYDFLLQRITKTLKSNSWFGC

SEQ ID NO: 4546 - protein, 1243 aa, Homo sapiens
MENCSAASTFLTDSLELELGTEWCKPPYFSCAVDNRGGGKHFSGESYLCSGALKRLILNLDPLPTNFEEDTLEIFGIQWVTETALVNSSRELFHLFRQQLYNLETLLQSSCDFGKVSTLHCKADNIRQQCVLFLHYVKVFIFRYLKVQNAESHVPVHPYEALEAQLPSVLIDELHGLLLYIGHLSELPSVNIGAFVNQNQIKLFPPSWHLLHLHLDIHWLVLEILYMLGEKLKQVVYGHQFMNLASDNLTNISLFEEHCETLLCDLISLSLNRYDKVRSSESLMSDQCPCLCIKELWVLLIHLLDHRSKWFVSESFWNWLNKLLKTLLEKSSDRRRSSMPVIQSRDPLGFSWWIITHVASFYKFDRHGVPDEMRKVESNWNFVEELLKKSISVQGVILEEQLRMYLHCCLTLCDFWEPNIAIVTILWEYYSKNLNSSFSISWLPFKGLANTMKSPLSMLEMVKTCCCDKQDQELYKSSSSYTIFLCILAKVVKKAMKSNGPHPWKQVKGRIYSKFHQKRMEELTEVGLQNFFSLFLLLAAVAEVEDVASHVLDLLNFLKPAFVTSQRALIWKGHMAFLLMYAQKNLDIGVLAEKFSCAFREKAKEFLVSKNEEMVQRQTIWTLLSIYIDGVQEVFETSYCLYPSHEKLLNDGFSMLLRACRESELRTVLSFLQAVLARIRSMHQQLCQELQRDNVDLFVQSSLSAKERHLAAVASALWRHFFSFLKSQRMSQVVPFSQLADAAADFTLLAMDMPSTAPSDFQPQPVISIIQLFGWDDIICPQVVARYLSHVLQNSTLCEALSHSGYVSFQALTVRSWIRCVLQMYIKNLSGPDDLLIDKNLEEAVEKEYMKQLVKLTRLLFNLSEVKSIFSKAQVEYLSISEDPKKALVRFFEAVGVTYGNVQTLSDKSAMVTKSLEYLGEVLKYIKPYLGKKVFSAGLQLTYGMMGILVKSWAQIFATSKAQKLLFRIIDCLLLPHAVLQQEKELPAPMLSAIQKSLPLYLQGMCIVCCQSQNPNAYLNQLLGNVIEQYIGRFLPASPYVSDLGQHPVLLALRNTATIPPISSLKKCIVQVIRKSYLEYKGSSPPPRLASILAFILQLFKETNTDIYEVELLLPGILKCLVLVSEPQVKRLATENLQYMVKACQVGSEEEPSSQLTSVFRQFIQDYGMRYYYQVYSILETVATLDQQVVIHLISTLTQSLKDSEQKWGLGRNIAQREAYSKLLSHLGQMGQDEMQRLENDNT

SEQ ID NO: 4547 - protein, 14507 aa, Homo sapiens
MLKPSGLPGSSSPTRSLMTGSRSTKATPEMDSGLTGATLSPKTSTGAIVVTEHTLPFTSPDKTLASPTSSVVGRTTQSLGVMSSALPESTSRGMTHSEQRTSPSLSPQVNGTPSRNYPATSMVSGLSSPRTRTSSTEGNFTKEASTYTLTVETTSGPVTEKYTVPTETSTTEGDSTETPWDTRYIPVKITSPMKTFADSTASKENAPVSMTPAETTVTDSHTPGRTNPSFGTLYSSFLDLSPKGTPNSRGETSLELILSTTGYPFSSPEPGSAGHSRISTSAPLSSSASVLDNKISETSIFSGQSLTSPLSPGVPEARASTMPNSAIPFSMTLSNAETSAERVRSTISSLGTPSISTKQTAETILTFHAFAETMDIPSTHIAKTLASEWLGSPGTLGGTSTSALTTTSPSTTLVSEETNTHHSTSGKETEGTLNTSMTPLETSAPGEESEMTATLVPTLGFTTLDSKIRSPSQVSSSHPTRELRTTGSTSGRQSSSTAAHGSSDILRATTSSTSKASSWTSESTAQQFSEPQHTQWVETSPSMKTERPPASTSVAAPITTSVPSVVSGFTTLKTSSTKGIWLEETSADTLIGESTAGPTTHQFAVPTGISMTGGSSTRGSQGTTHLLTRATASSETSADLTLATNGVPVSVSPAVSKTAAGSSPPGGTKPSYTMVSSVIPETSSLQSSAFREGTSLGLTPLNTRHPFSSPEPDSAGHTKISTSIPLLSSASVLEDKVSATSTFSHHKATSSITTGTPEISTKTKPSSAVLSSMTLSNAATSPERVRNATSPLTHPSPSGEETAGSVLTLSTSAETTDSPNIHPTGTLTSESSESPSTLSLPSVSGVKTTFSSSTPSTHLFTSGEETEETSNPSVSQPETSVSRVRTTLASTSVPTPVFPTMDTWPTRSAQFSSSHLVSELRATSSTSVTNSTGSALPKISHLTGTATMSQTNRDTFNDSAAPQSTTWPETSPRFKTGLPSATTTVSTSATSLSATVMVSKFTSPATSSMEATSIREPSTTILTTETTNGPGSMAVASTNIPIGKGYITEGRLDTSHLPIGTTASSETSMDFTMAKESVSMSVSPSQSMDAAGSSTPGRTSQFVDTFSDDVYHLTSREITIPRDGTSSALTPQMTATHPPSPDPGSARSTWLGILSSSPSSPTPKVTMSSTFSTQRVTTSMIMDTVETSRWNMPNLPSTTSLTPSNIPTSGAIGKSTLVPLDTPSPATSLEASEGGLPTLSTYPESTNTPSIHLGAHASSESPSTIKLTMASVVKPGSYTPLTFPSIETHIHVSTARMAYSSGSSPEMTAPGETNTGSTWDPTTYITTTDPKDTSSAQVSTPHSVRTLRTTENHPKTESATPAAYSGSPKISSSPNLTSPATKAWTITDTTEHSTQLHYTKLAEKSSGFETQSAPGPVSVVIPTSPTIGSSTLELTSDVPGEPLVLAPSEQTTITLPMATWLSTSLTEEMASTDLDISSPSSPMSTFAIFPPMSTPSHELSKSEADTSAIRNTDSTTLDQHLGIRSLGRTGDLTTVPITPLTTTWTSVIEHSTQAQDTLSATMSPTHVTQSLKDQTSIPASASPSHLTEVYPELGTQGRSSSEATTFWKPSTDTLSREIETGPTNIQSTPPMDNTTTGSSSSGVTLGIAHLPIGTSSPAETSTNMALERRSSTATVSMAGTMGLLVTSAPGRSISQSLGRVSSVLSESTTEGVTDSSKGSSPRLNTQGNTALSSSLEPSYAEGSQMSTSIPLTSSPTTPDVEFIGGSTFWTKEVTTVMTSDISKSSARTESSSATLMSTALGSTENTGKEKLRTASMDLPSPTPSMEVTPWISLTLSNAPNTTDSLDLSHGVHTSSAGTLATDRSLNTGVTRASRLENGSDTSSKSLSMGNSTHTSMTYTEKSEVSSSIHPRPETSAPGAETTLTSTPGNRAISLTLPFSSIPVEEVISTGITSGPDINSAPMTHSPITPPTIVWTSTGTIEQSTQPLHAVSSEKVSVQTQSTPYVNSVAVSASPTHENSVSSGSSTSSPYSSASLESLDSTISRRNAITSWLWDLTTSLPTTTWPSTSLSEALSSGHSGVSNPSSTTTEFPLFSAASTSAAKQRNPETETHGPQNTAASTLNTDASSVTGLSETPVGASISSEVPLPMAITSRSDVSGLTSESTANPSLGTASSAGTKLTRTISLPTSESLVSFRMNKDPWTVSIPLGSHPTTNTETSIPVNSAGPPGLSTVASDVIDTPSDGAESIPTVSFSPSPDTEVTTISHFPEKTTHSFRTISSLTHELTSRVTPIPGDWMSSAMSTKPTGASPSITLGERRTITSAAPTTSPIVLTASFTETSTVSLDNETTVKTSDILDARKTNELPSDSSSSSDLINTSIASSTMDVTKTASISPTSISGMTASSSPSLFSSDRPQVPTSTTETNTATSPSVSSNTYSLDGGSNVGGTPSTLPPFTITHPVETSSALLAWSRPVRTFSTMVSTDTASGENPTSSNSVVTSVPAPGTWTSVGSTTDLPAMGFLKTSPAGEAHSLLASTIEPATAFTPHLSAAVVTGSSATSEASLLTTSESKAIHSSPQTPTTPTSGANWETSATPESLLVVTETSDTTLTSKILVTDTILFSTVSTPPSKFPSTGTLSGASFPTLLPDTPAIPLTATEPTSSLATSFDSTPLVTIASDSLGTVPETTLTMSETSNGDALVLKTVSNPDRSIPGITIQGVTESPLHPSSTSPSKIVAPRNTTYEGSITVALSTLPAGTTGSLVFSQSSENSETTALVDSSAGLERASVMPLTTGSQGMASSGGIRSGSTHSTGTKTFSSLPLTMNPGEVTAMSEITTNRLTATQSTAPKGIPVKPTSAESGLLTPVSASSSPSKAFASLTTAPPTWGIPQSTLTFEFSEVPSLDTKSASLPTPGQSLNTIPDSDASTASSSLSKSPEKNPRARMMTSTKAISASSFQSTGFTETPEGSASPSMAGHEPRVPTSGTGDPRYASESMSYPDPSKASSAMTSTSLASKLTTLFSTGQAARSGSSSSPISLSTEKETSFLSPTASTSRKTSLFLGPSMARQPNILVHLQTSALTLSPTSTLNMSQEEPPELTSSQTIAEEEGTTAETQTLTFTPSETPTSLLPVSSPTEPTARRKSSPETWASSISVPAKTSLVETTDGTLVTTIKMSSQAAQGNSTWPAPAEETGSSPAGTSPGSPEMSTTLKIMSSKEPSISPEIRSTVRNSPWKTPETTVPMETTVEPVTLQSTALGSGSTSISHLPTGTTSPTKSPTENMLATERVSLSPSPPEAWTNLYSGTPGGTRQSLATMSSVSLESPTARSITGTGQQSSPELVSKTTGMEFSMWHGSTGGTTGDTHVSLSTSSNILEDPVTSPNSVSSLTDKSKHKTETWVSTTAIPSTVLNNKIMAAEQQTSRSVDEAYSSTSSWSDQTSGSDITLGASPDVTNTLYITSTAQTTSLVSLPSGDQGITSLTNPSGGKTSSASSVTSPSIGLETLRANVSAVKSDIAPTAGHLSQTSSPAEVSILDVTTAPTPGISTTITTMGTNSISTTTPNPEVGMSTMDSTPATERRTTSTEHPSTWSSTAASDSWTVTDMTSNLKVARSPGTISTMHTTSFLASSTELDSMSTPHGRITVIGTSLVTPSSDASAVKTETSTSERTLSPSDTTASTPISTFSRVQRMSISVPDILSTSWTPSSTEAEDVPVSMVSTDHASTKTDPNTPLSTFLFDSLSTLDWDTGRSLSSATATTSAPQGATTPQELTLETMISPATSQLPFSIGHITSAVTPAAMARSSGVTFSRPDPTSKKAEQTSTQLPTTTSAHPGQVPRSAATTLDVIPHTAKTPDATFQRQGQTALTTEARATSDSWNEKEKSTPSAPWITEMMNSVSEDTIKEVTSSSSVLRTLNTLDINLESGTTSSPSWKSSPYERIAPSESTTDKEAIHPSTNTVETTGWVTSSEHASHSTIPAHSASSKLTSPVVTTSTREQAIVSMSTTTWPESTRARTEPNSFLTIELRDVSPYMDTSSTTQTSIISSPGSTAITKGPRTEITSSKRISSSFLAQSMRSSDSPSEAITRLSNFPAMTESGGMILAMQTSPPGATSLSAPTLDTSATASWTGTPLATTQRFTYSEKTTLFSKGPEDTSQPSPPSVEETSSSSSLVPIHATTSPSNILLTSQGHSPSSTPPVTSVFLSETSGLGKTTDMSRISLEPGTSLPPNLSSTAGEALSTYEASRDTKAIHHSADTAVTNMEATSSEYSPIPGHTKPSKATSPLVTSHIMGDITSSTSVFGSSETTEIETVSSVNQGLQERSTSQVASSATETSTVITHVSSGDATTHVTKTQATFSSGTSISSPHQFITSTNTFTDVSTNPSTSLIMTESSGVTITTQTGPTGAATQGPYLLDTSTMPYLTETPLAVTPDFMQSEKTTLISKGPKDVSWTSPPSVAETSYPSSLTPFLVTTIPPATSTLQGQHTSSPVSATSVLTSGLVKTTDMLNTSMEPVTNSPQNLNNPSNEILATLAATTDIETIHPSINKAVTNMGTASSAHVLHSTLPVSSEPSTATSPMVPASSMGDALASISIPGSETTDIEGEPTSSLTAGRKENSTLQEMNSTTESNIILSNVSVGAITEATKMEVPSFDATFIPTPAQSTKFPDIFSVASSRLSNSPPMTISTHMTTTQTGSSGATSKIPLALDTSTLETSAGTPSVVTEGFAHSKITTAMNNDVKDVSQTNPPFQDEASSPSSQAPVLVTTLPSSVAFTPQWHSTSSPVSMSSVLTSSLVKTAGKVDTSLETVTSSPQSMSNTLDDISVTSAATTDIETTHPSINTVVTNVGTTGSAFESHSTVSAYPEPSKVTSPNVTTSTMEDTTISRSIPKSSKTTRTETETTSSLTPKLRETSISQEITSSTETSTVPYKELTGATTEVSRTDVTSSSSTSFPGPDQSTVSLDISTETNTRLSTSPIMTESAEITITTQTGPHGATSQDTFTMDPSNTTPQAGIHSAMTHGFSQLDVTTLMSRIPQDVSWTSPPSVDKTSSPSSFLSSPAMTTPSLISSTLPEDKLSSPMTSLLTSGLVKITDILRTRLEPVTSSLPNFSSTSDKILATSKDSKDTKEIFPSINTEETNVKANNSGHESHSPALADSETPKATTQMVITTTVGDPAPSTSMPVHGSSETTNIKREPTYFLTPRLRETSTSQESSFPTDTSFLLSKVPTGTITEVSSTGVNSSSKISTPDHDKSTVPPDTFTGEIPRVFTSSIKTKSAEMTITTQASPPESASHSTLPLDTSTTLSQGGTHSTVTQGFPYSEVTTLMGMGPGNVSWMTTPPVEETSSVSSLMSSPAMTSPSPVSSTSPQSIPSSPLPVTALPTSVLVTTTDVLGTTSPESVTSSPPNLSSITHERPATYKDTAHTEAAMHHSTNTAVTNVGTSGSGHKSQSSVLADSETSKATPLMSTTSTLGDTSVSTSTPNISQTNQIQTEPTASLSPRLRESSTSEKTSSTTETNTAFSYVPTGAITQASRTEISSSRTSISDLDRPTIAPDISTGMITRLFTSPIMTKSAEMTVTTQTTTPGATSQGILPWDTSTTLFQGGTHSTVSQGFPHSEITTLRSRTPGDVSWMTTPPVEETSSGFSLMSPSMTSPSPVSSTSPESIPSSPLPVTALLTSVLVTTTNVLGTTSPEPVTSSPPNLSSPTQERLTTYKDTAHTEAMHASMHTNTAVANVGTSISGHESQSSVPADSHTSKATSPMGITFAMGDTSVSTSTPAFFETRIQTESTSSLIPGLRDTRTSEEINTVTETSTVLSEVPTTTTTEVSRTEVITSSRTTISGPDHSKMSPYISTETITRLSTFPFVTGSTEMAITNQTGPIGTISQATLTLDTSSTASWEGTHSPVTQRFPHSEETTTMSRSTKGVSWQSPPSVEETSSPSSPVPLPAITSHSSLYSAVSGSSPTSALPVTSLLTSGRRKTIDMLDTHSELVTSSLPSASSFSGEILTSEASTNTETIHFSENTAETNMGTTNSMHKLHSSVSIHSQPSGHTPPKVTGSMMEDAIVSTSTPGSPETKNVDRDSTSPLTPELKEDSTALVMNSTTESNTVFSSVSLDAATEVSRAEVTYYDPTFMPASAQSTKSPDISPEASSSHSNSPPLTISTHKTIATQTGPSGVTSLGQLTLDTSTIATSAGTPSARTQDFVDSETTSVMNNDLNDVLKTSPFSAEEANSLSSQAPLLVTTSPSPVTSTLQEHSTSSLVSVTSVPTPTLAKITDMDTNLEPVTRSPQNLRNTLATSEATTDTHTMHPSINTAVANVGTTSSPNEFYFTVSPDSDPYKATSAVVITSTSGDSIVSTSMPRSSAMKKIESETTFSLIFRLRETSTSQKIGSSSDTSTVFDKAFTAATTEVSRTELTSSSRTSIQGTEKPTMSPDTSTRSVTMLSTFAGLTKSEERTIATQTGPHRATSQGTLTWDTSITTSQAGTHSAMTHGFSQLDLSTLTSRVPEYISGTSPPSVEKTSSSSSLLSLPAITSPSPVPTTLPESRPSSPVHLTSLPTSGLVKTTDMLASVASLPPNLGSTSHKIPTTSEDIKDTEKMYPSTNIAVTNVGTTTSEKESYSSVPAYSEPPKVTSPMVTSFNIRDTIVSTSMPGSSEITRIEMESTFSLAHGLKGTSTSQDPIVSTEKSAVLHKLTTGATETSRTEVASSRRTSIPGPDHSTESPDISTEVIPSLPISLGITESSNMTIITRTGPPLGSTSQGTFTLDTPTTSSRAGTHSMATQEFPHSEMTTVMNKDPEILSWTIPPSIEKTSFSSSLMPSPAMTSPPVSSTLPKTIHTTPSPMTSLLTPSLVMTTDTLGTSPEPTTSSPPNLSSTSHEILTTDEDTTAIEAMHPSTSTAATNVETTSSGHGSQSSVLADSEKTKATAPMDTTSTMGHTTVSTSMSVSSETTKIKRESTYSLTPGLRETSISQNASFSTDTSIVLSEVPTGTTAEVSRTEVTSSGRTSIPGPSQSTVLPEISTRTMTRLFASPTMTESAEMTIPTQTGPSGSTSQDTLTLDTSTTKSQAKTHSTLTQRFPHSEMTTLMSRGPGDMSWQSSPSLENPSSLPSLLSLPATTSPPPISSTLPVTISSSPLPVTSLLTSSPVTTTDMLHTSPELVTSSPPKLSHTSDERLTTGKDTTNTEAVHPSTNTAASNVEIPSSGHESPSSALADSETSKATSPMFITSTQEDTTVAISTPHFLETSRIQKESISSLSPKLRETGSSVETSSAIETSAVLSEVSIGATTEISRTEVTSSSRTSISGSAESTMLPEISTTRKIIKFPTSPILAESSEMTIKTQTSPPGSTSESTFTLDTSTTPSLVITHSTMTQRLPHSEITTLVSRGAGDVPRPSSLPVEETSPPSSQLSLSAMISPSPVSSTLPASSHSSSASVTSLLTPGQVKTTEVLDASAEPETSSPPSLSSTSVEILATSEVTTDTEKIHPFSNTAVTKVGTSSSGHESPSSVLPDSETTKATSAMGTISIMGDTSVSTLTPALSNTRKIQSEPASSLTTRLRETSTSEETSLATEANTVLSKVSTGATTEVSRTEAISFSRTSMSGPEQSTMSQDISIGTIPRISASSVLTESAKMTITTQTGPSESTLESTLNLNTATTPSWVETHSIVIQGFPHPEMTTSMGRGPGGVSWPSPPFVKETSPPSSPLSLPAVTSPHPVSTTFLAHIPPSPLPVTSLLTSGPATTTDILGTSTEPGTSSSSSLSTTSHERLTTYKDTAHTEAVHPSTNTGGTNVATTSSGYKSQSSVLADSSPMCTTSTMGDTSVLTSTPAFLETRRIQTELASSLTPGLRESSGSEGTSSGTKMSTVLSKVPTGATTEISKEDVTSIPGPAQSTISPDISTRTVSWFSTSPVMTESAEITMNTHTSPLGATTQGTSTLDTSSTTSLTMTHSTISQGFSHSQMSTLMRRGPEDVSWMSPPLLEKTRPSFSLMSSPATTSPSPVSSTLPESISSSPLPVTSLLTSGLAKTTDMLHKSSEPVTNSPANLSSTSVEILATSEVTTDTEKTHPSSNRTVTDVGTSSSGHESTSFVLADSQTSKVTSPMVITSTMEDTSVSTSTPGFFETSRIQTEPTSSLTLGLRKTSSSEGTSLATEMSTVLSGVPTGATAEVSRTEVTSSSRTSISGFAQLTVSPETSTETITRLPTSSIMTESAEMMIKTQTDPPGSTPESTHTVDISTTPNWVETHSTVTQRFSHSEMTTLVSRSPGDMLWPSQSSVEETSSASSLLSLPATTSPSPVSSTLVEDFPSASLPVTSLLNPGLVITTDRMGISREPGTSSTSNLSSTSHERLTTLEDTVDTEDMQPSTHTAVTNVRTSISGHESQSSVLSDSETPKATSPMGTTYTMGETSVSISTSDFFETSRIQIEPTSSLTSGLRETSSSERISSATEGSTVLSEVPSGATTEVSRTEVISSRGTSMSGPDQFTISPDISTEAITRLSTSPIMTESAESAITIETGSPGATSEGTLTLDTSTTTFWSGTHSTASPGFSHSEMTTLMSRTPGDVPWPSLPSVEEASSVSSSLSSPAMTSTSFFSTLPESISSSPHPVTALLTLGPVKTTDMLRTSSEPETSSPPNLSSTSAEILATSEVTKDREKIHPSSNTPVVNVGTVIYKHLSPSSVLADLVTTKPTSPMATTSTLGNTSVSTSTPAFPETMMTQPTSSLTSGLREISTSQETSSATERSASLSGMPTGATTKVSRTEALSLGRTSTPGPAQSTISPEISTETITRISTPLTTTGSAEMTITPKTGHSGASSQGTFTLDTSSRASWPGTHSAATHRSPHSGMTTPMSRGPEDVSWPSRPSVEKTSPPSSLVSLSAVTSPSPLYSTPSESSHSSPLRVTSLFTPVMMKTTDMLDTSLEPVTTSPPSMNITSDESLATSKATMETEAIQLSENTAVTQMGTISARQEFYSSYPGLPEPSKVTSPVVTSSTIKDIVSTTIPASSEITRIEMESTSTLTPTPRETSTSQEIHSATKPSTVPYKALTSATIEDSMTQVMSSSRGPSPDQSTMSQDISTEVITRLSTSPIKTESTEMTITTQTGSPGATSRGTLTLDTSTTFMSGTHSTASQGFSHSQMTALMSRTPGDVPWLSHPSVEEASSASFSLSSPVMTSSSPVSSTLPDSIHSSSLPVTSLLTSGLVKTTELLGTSSEPETSSPPNLSSTSAEILAITEVTTDTEKLEMTNVVTSGYTHESPSSVLADSVTTKATSSMGITYPTGDTNVLTSTPAFSDTSRIQTKSKLSLTPGLMETSISEETSSATEKSTVLSSVPTGATTEVSRTEAISSSRTSIPGPAQSTMSSDTSMETITRISTPLTRKESTDMAITPKTGPSGATSQGTFTLDSSSTASWPGTHSATTQRFPQSVVTTPMSRGPEDVSWPSPLSVEKNSPPSSLVSSSSVTSPSPLYSTPSGSSHSSPVPVTSLFTSIMMKATDMLDASLEPETTSAPNMNITSDESLAASKATTETEAIHVFENTAASHVETTSATEELYSSSPGFSEPTKVISPVVTSSSIRDNMVSTTMPGSSGITRIEIESMSSLTPGLRETRTSQDITSSTETSTVLYKMPSGATPEVSRTEVMPSSRTSIPGPAQSTMSLDISDEVVTRLSTSPIMTESAEITITTQTGYSLATSQVTLPLGTSMTFLSGTHSTMSQGLSHSEMTNLMSRGPESLSWTSPRFVETTRSSSSLTSLPLTTSLSPVSSTLLDSSPSSPLPVTSLILPGLVKTTEVLDTSSEPKTSSSPNLSSTSVEIPATSEIMTDTEKIHPSSNTAVAKVRTSSSVHESHSSVLADSETTITIPSMGITSAVDDTTVFTSNPAFSETRRIPTEPTFSLTPGFRETSTSEETTSITETSAVLYGVPTSATTEVSMTEIMSSNRIHIPDSDQSTMSPDIITEVITRLSSSSMMSESTQMTITTQKSSPGATAQSTLTLATTTAPLARTHSTVPPRFLHSEMTTLMSRSPENPSWKSSLFVEKTSSSSSLLSLPVTTSPSVSSTLPQSIPSSSFSVTSLLTPGMVKTTDTSTEPGTSLSPNLSGTSVEILAASEVTTDTEKIHPSSSMAVTNVGTTSSGHELYSSVSIHSEPSKATYPVGTPSSMAETSISTSMPANFETTGFEAEPFSHLTSGFRKTNMSLDTSSVTPTNTPSSPGSTHLLQSSKTDFTSSAKTSSPDWPPASQYTEIPVDIITPFNASPSITESTGITSFPESRFTMSVTESTHHLSTDLLPSAETISTGTVMPSLSEAMTSFATTGVPRAISGSGSPFSRTESGPGDATLSTIAESLPSSTPVPFSSSTFTTTDSSTIPALHEITSSSATPYRVDTSLGTESSTTEGRLVMVSTLDTSSQPGRTSSSPILDTRMTESVELGTVTSAYQVPSLSTRLTRTDGIMEHITKIPNEAAHRGTIRPVKGPQTSTSPASPKGLHTGGTKRMETTTTALKTTTTALKTTSRATLTTSVYTPTLGTLTPLNASMQMASTIPTEMMITTPYVFPDVPETTSSLATSLGAETSTALPRTTPSVFNRESETTASLVSRSGAERSPVIQTLDVSSSEPDTTASWVIHPAETIPTVSKTTPNFFHSELDTVSSTATSHGADVSSAIPTNISPSELDALTPLVTISGTDTSTTFPTLTKSPHETETRTTWLTHPAETSSTIPRTIPNFSHHESDATPSIATSPGAETSSAIPIMTVSPGAEDLVTSQVTSSGTDRNMTIPTLTLSPGEPKTIASLVTHPEAQTSSAIPTSTISPAVSRLVTSMVTSLAAKTSTTNRALTNSPGEPATTVSLVTHPAQTSPTVPWTTSIFFHSKSDTTPSMTTSHGAESSSAVPTPTVSTEVPGVVTPLVTSSRAVISTTIPILTLSPGEPETTPSMATSHGEEASSAIPTPTVSPGVPGVVTSLVTSSRAVTSTTIPILTFSLGEPETTPSMATSHGTEAGSAVPTVLPEVPGMVTSLVASSRAVTSTTLPTLTLSPGEPETTPSMATSHGAEASSTVPTVSPEVPGVVTSLVTSSSGVNSTSIPTLILSPGELETTPSMATSHGAEASSAVPTPTVSPGVSGVVTPLVTSSRAVTSTTIPILTLSSSEPETTPSMATSHGVEASSAVLTVSPEVPGMVTSLVTSSRAVTSTTIPTLTISSDEPETTTSLVTHSEAKMISAIPTLAVSPTVQGLVTSLVTSSGSETSAFSNLTVASSQPETIDSWVAHPGTEASSVVPTLTVSTGEPFTNISLVTHPAESSSTLPRTTSRFSHSELDTMPSTVTSPEAESSSAISTTISPGIPGVLTSLVTSSGRDISATFPTVPESPHESEATASWVTHPAVTSTTVPRTTPNYSHSEPDTTPSIATSPGAEATSDFPTITVSPDVPDMVTSQVTSSGTDTSITIPTLTLSSGEPETTTSFITYSETHTSSAIPTLPVSPGASKMLTSLVISSGTDSTTTFPTLTETPYEPETTAIQLIHPAETNTMVPRTTPKFSHSKSDTTLPVAITSPGPEASSAVSTTTISPDMSDLVTSLVPSSGTDTSTTFPTLSETPYEPETTATWLTHPAETSTTVSGTIPNFSHRGSDTAPSMVTSPGVDTRSGVPTTTIPPSIPGVVTSQVTSSATDTSTAIPTLTPSPGEPETTASSATHPGTQTGFTVPIRTVPSSEPDTMASWVTHPPQTSTPVSRTTSSFSHSSPDATPVMATSPRTEASSAVLTTISPGAPEMVTSQITSSGAATSTTVPTLTHSPGMPETTALLSTHPRTETSKTFPASTVFPQVSETTASLTIRPGAETSTALPTQTTSSLFTLLVTGTSRVDLSPTASPGVSAKTAPLSTHPGTETSTMIPTSTLSLGLLETTGLLATSSSAETSTSTLTLTVSPAVSGLSSASITTDKPQTVTSWNTETSPSVTSVGPPEFSRTVTGTTMTLIPSEMPTPPKTSHGEGVSPTTILRTTMVEATNLATTGSSPTVAKTTTTFNTLAGSLFTPLTTPGMSTLASESVTSRTSYNHRSWISTTSSYNRRYWTPATSTPVTSTFSPGISTSSIPSSTAATVPFMVPFTLNFTITNLQYEEDMRHPGSRKFNATERELQGLLKPLFRNSSLEYLYSGCRLASLRPEKDSSATAVDAICTHRPDPEDLGLDRERLYWELSNLTNGIQELGPYTLDRNSLYVNGFTHRSSMPTTSTPGTSTVDVGTSGTPSSSPSPTTAGPLLMPFTLNFTITNLQYEEDMRRTGSRKFNTMESVLQGLLKPLFKNTSVGPLYSGCRLTLLRPEKDGAATGVDAICTHRLDPKSPGLNREQLYWELSKLTNDIEELGPYTLDRNSLYVNGFTHQSSVSTTSTPGTSTVDLRTSGTPSSLSSPTIMAAGPLLVPFTLNFTITNLQYGEDMGHPGSRKFNTTERVLQGLLGPIFKNTSVGPLYSGCRLTSLRSEKDGAATGVDAICIHHLDPKSPGLNRERLYWELSQLTNGIKELGPYTLDRNSLYVNGFTHRTSVPTSSTPGTSTVDLGTSGTPFSLPSPATAGPLLVLFTLNFTITNLKYEEDMHRPGSRKFNTTERVLQTLLGPMFKNTSVGLLYSGCRLTLLRSEKDGAATGVDAICTHRLDPKSPGVDREQLYWELSQLTNGIKELGPYTLDRNSLYVNGFTHWIPVPTSSTPGTSTVDLGSGTPSSLPSPTTAGPLLVPFTLNFTITNLKYEEDMHCPGSRKFNTTERVLQSLLGPMFKNTSVGPLYSGCRLTLLRSEKDGAATGVDAICTHRLDPKSPGVDREQLYWELSQLTNGIKELGPYTLDRNSLYVNGFTHQTSAPNTSTPGTSTVDLGTSGTPSSLPSPTSAGPLLVPFTLNFTITNLQYEEDMHHPGSRKFNTTERVLQGLLGPMFKNTSVGLLYSGCRLTLLRPEKNGAATGMDAICSHRLDPKSPGLNREQLYWELSQLTHGIKELGPYTLDRNSLYVNGFTHRSSVAPTSTPGTSTVDLGTSGTPSSLPSPTTAVPLLVPFTLNFTITNLQYGEDMRHPGSRKFNTTERVLQGLLGPLFKNSSVGPLYSGCRLISLRSEKDGAATGVDAICTHHLNPQSPGLDREQLYWQLSQMTNGIKELGPYTLDRNSLYVNGFTHRSSGLTTSTPWTSTVDLGTSGTPSPVPSPTTTGPLLVPFTLNFTITNLQYEENMGHPGSRKFNITESVLQGLLKPLFKSTSVGPLYSGCRLTLLRPEKDGVATRVDAICTHRPDPKIPGLDRQQLYWELSQLTHSITELGPYTLDRDSLYVNGFTQRSSVPTTSTPGTFTVQPETSETPSSLPGPTATGPVLLPFTLNFTITNLQYEEDMRRPGSRKFNTTERVLQGLLMPLFKNTSVSSLYSGCRLTLLRPEKDGAATRVDAVCTHRPDPKSPGLDRERLYWKLSQLTHGITELGPYTLDRHSLYVNGFTHQSSMTTTRTPDTSTMHLATSRTPASLSGPMTASPLLVLFTINFTITNLRYEENMHHPGSRKFNTTERVLQGLLRPVFKNTSVGPLYSGCRLTLLRPKKDGAATKVDAICTYRPDPKSPGLDREQLYWELSQLTHSITELGPYTLDRDSLYVNGFTQRSSVPTTSIPGTPTVDLGTSGTPVSKPGPSAASPLLVLFTLNFTITNLRYEENMQHPGSRKFNTTERVLQGLLRSLFKSTSVGPLYSGCRLTLLRPEKDGTATGVDAICTHHPDPKSPRLDREQLYWELSQLTHNITELGPYALDNDSLFVNGFTHRSSVSTTSTPGTPTVYLGASKTPASIFGPSAASHLLILFTLNFTITNLRYEENMWPGSRKFNTTERVLQGLLRPLFKNTSVGPLYSGCRLTLLRPEKDGEATGVDAICTHRPDPTGPGLDREQLYLELSQLTHSITELGPYTLDRDSLYVNGFTHRSSVPTTSTGVVSEEPFTLNFTINNLRYMADMGQPGSLKFNITDNVMQHLLSPLFQRSSLGARYTGCRVIALRSVKNGAETRVDLLCTYLQPLSGPGLPIKQVFHELSQQTHGITRLGPYSLDKDSLYLNGYNEPGPDEPPTTPKPATTFLPPLSEATTAMGYHLKTLTLNFTISNLQYSPDMGKGSATFNSTEGVLQHLLRPLFQKSSMGPFYLGCQLISLRPEKDGAATGVDTTCTYHPDPVGPGLDIQQLYWELSQLTHGVTQLGFYVLDRDSLFINGYAPQNLSIRGEYQINFHIVNWNLSNPDPTSSEYITLLRDIQDKVTTLYKGSQLHDTFRFCLVTNLTMDSVLVTVKALFSSNLDPSLVEQVFLDKTLNASFHWLGSTYQLVDIHVTEMESSVYQPTSSSSTQHFYLNFTITNLPYSQDKAQPGTTNYQRNKRNIEDALNQLFRNSSIKSYFSDCQVSTFRSVPNRHHTGVDSLCNFSPLARRVDRVAIYEEFLRMTRNGTQLQNFTLDRSSVLVDGYSPNRNEPLTGNSDLPFWAVILIGLAGLLGVITCLICGVLVTTRRRKKEGEYNVQQQCPGYYQSHLDLEDLQ

SEQ ID NO: 4548 - protein, 158 aa, Homo sapiens
MAAQGVGPGPGSAAPPGLEAARQKLALRRKKVLSTEEMELYELAQAAGGGIDPDVFKILVDLLKLNVAPLAVFQMLKSMCAGQRLASEPQDPAAVSLPTSSVPETRGRDKGSAALGGVLALAERSNHEGSSQRMPRQPSATRLPKGGGPGKSPTQGST

SEQ ID NO: 4549 - protein, 466 aa, Homo sapiens
MLRSTSTVTLLSGGAARTPGAPSRRANVCRLRLTVPPESPVPEQCEKKIERKEQLLDLSNGEPTRKLPQGVVYGVVRRSDQNQQKEMVVYGWSTSQLKEEMNYIKDVRATLEKVRKRMYGDYDEMRQKIRQLTQELSVSHAQQEYLENHIQTQSSALDRFNAMNSALASDSIGLQKTLVDVTLENSNIKDQIRNLQQTYEASMDKLREKQRQLEVAQVENQLLKMKVESSQEANAEVMREMTKKLYSQYEEKLQEEQRKHSAEKEALLEETNSFLKAIEEANKKMQAAEISLEEKDQRIGELDRLIERMEKERHQLQLQLLEHETEMSGELTDSDKERYQQLEEASASLRERIRHLDDMVHCQQKKVKQMVEEIESLKKKLQQKQLLILQLLEKISFLEGENNELQSRLDYLTETQAKTEVETREIGVGCDLLPSQTGRTREIVMPSRNYTPYTRVLELTMKKTLT

SEQ ID NO: 4550 - protein, 445 aa, Homo sapiens
MLRSTSTVTLLSGGAARTPGAPSRRANVCRLRLTVPPESPVPEQCEKKIERKEQLLDLSNGEPTRKLPQGVVYGVVRRSDQNQQKEMVVYGWSTSQLKEEMNYIKDVRATLEKVRKRMYGDYDEMRQKIRQLTQELSVSHAQQEYLENHIQTQSSALDRFNAMNSALASDSIGLQKTLVDVTLENSNIKDQIRNLQQTYEASMDKLREKQRQLEVAQVENQLLKMKVESSQEANAEVMREMTKKLYSQYEEKLQEEQRKHSAEKEALLEETNSFLKAIEEANKKMQAAEISLEEKDQRIGELDRLIERMEKERHQLQLQLLEHETEMSGELTDSDKERYQQLEEASASLRERIRHLDDMVHCQQKKVKQMVEEIESLKKKLQQKQLLILQLLEKISFLEGENNELQSRLDYLTETQAKTEVETREIGVGCDLLPRRCKQSSQRKN

SEQ ID NO: 4551 - protein, 435 aa, Homo sapiens
MLRSTSTVTLLSGGAARTPGAPSRRANVCRLRLTVPPESPVPEQCEKKIERKEQLLDLSNGEPTRKLPQGVVYGVVRRSDQNQQKEMVVYGWSTSQLKEEMNYIKDVSHAQQEYLENHIQTQSSALDRFNAMNSALASDSIGLQKTLVDVTLENSNIKDQIRNLQQTYEASMDKLREKQRQLEVAQVENQLLKMKVESSQEANAEVMREMTKKLYSQYEEKLQEEQRKHSAEKEALLEETNSFLKAIEEANKKMQAAEISLEEKDQRIGELDRLIERMEKERHQLQLQLLEHETEMSGELTDSDKERYQQLEEASASLRERIRHLDDMVHCQQKKVKQMVEEIESLKKKLQQKQLLILQLLEKISFLEGENNELQSRLDYLTETQAKTEVETREIGVGCDLLPSQTGRTREIVMPSRNYTPYTRVLELTMKKTLT

SEQ ID NO: 4552 - protein, 438 aa, Homo sapiens
MLRSTSTVTLLSGGAARTPGAPSRRANVCRLRLTVPPESPVPEQCEKKIERKEQLLDLSNGEPTRKLPQGVVYGVVRRSDQNQQKEMVVYGWSTSQLKEEMNYIKDVRATLEKVRKRMYGDYDEMRQKIRQLTQELSVSHAQQEYLENHIQTQSSALDRFNAMNSALASDSIGLQKTLVDVTLENSNIKDQIRNLQQTYEASMDKLREKQRQLEVAQVENQLLKMKVESSQEANAEVMREMTKKLYSQYEEKLQEEQRKHSAEKEALLEETNSFLKAIEEANKKMQAAEISLEEKDQRIGELDRLIERMEKERHQLQLQLLEHETEMSGELTDSDKERYQQLEEASASLRERIRHLDDMVHCQQKKVKQMVEENNELQSRLDYLTETQAKTEVETREIGVGCDLLPSQTGRTREIVMPSRNYTPYTRVLELTMKKTLT

SEQ ID NO: 4553 - protein, 390 aa, Homo sapiens
MLRSTSTVTLLSGGAARTPGAPSRRANVCRLRLTVPPESPVPEQCEKKIERKEQLLDLSNGEPTRKLPQGVVYGVVRRSDQNQQKEMVVYGWSTSQLKEEMNYIKDVRATLEKVRKRMYGDYDEMRQKIRQLTQELSVSHAQQEYLENHIQTQSSALDRFNAMNSALASDSIGLQKTLVDVTLENSNIKDQIRNLQQTYEASMDKLREKQRQLEVAQVENQLLKMKVESSQEANAEVMREMTKKLYSQYEEKLQEEQRKHSAEKEALLEETNSFLKAIEEANKKMQAAEISLEEKDQRIGELDRLIERMEKERHQLQLQLLEHETEMSGELTDSDKERYQQLEEASASLRERIRHLDDMVHCQQKKVKQMVEEIMSHELFSRFSLRLFGR

SEQ ID NO: 4554 - protein, 414 aa, Homo sapiens
MLRSTSTVTLLSGGAARTPGAPSRRANVCRLRLTVPPESPVPEQCEKKIERKEQLLDLSNGEPTRKLPQGVVYGVVRRSDQNQQKEMVVYGWSTSQLKEEMNYIKDVRATLEKVRKRMYGDYDEMRQKIRQLTQELSVSHAQQEYLENHIQTQSSALDRFNAMNSALASDSIGLQKTLVDVTLENSNIKDQIRNLQQTYEASMDKLREKQRQLEVAQVENQLLKMKVESSQEANAEVMREMTKKLYSQYEEKLQEEQRKHSAEKEALLEETNSFLKAIEEANKKMQAAEISLEEKDQRIGELDRLIERMEKERHQLQLQLLEHETEMSGELTDSDKERYQQLEEASASLRERIRHLDDMVHCQQKKVKQMVEEIESLKKKLQQKQLLILQLLEKISFLEGEGRKGLKGRLKMSC

SEQ ID NO: 4555 - protein, 407 aa, Homo sapiens
MLRSTSTVTLLSGGAARTPGAPSRRANVCRLRLTVPPESPVPEQCEKKIERKEQLLDLSNGEPTRKLPQGVVYGVVRRSDQNQQKEMVVYGWSTSQLKEEMNYIKDVRATLEKVRKRMYGDYDEMRQKIRQLTQELSVSHAQQEYLENHIQTQSSALDRFNAMNSALASDSIGLQKTLVDVTLENSNIKDQIRNLQQTYEASMDKLREKQRQLEVAQVENQLLKMKVESSQEANAEVMREMTKKLYSQYEEKLQEEQRKHSAEKEALLEETNSFLKAIEEANKKMQAAEISLEEKDQRIGELDRLIERMEKERHQLQLQLLEHETEMSGELTDSDKERYQQLEEASASLRERIRHLDDMVHCQQKKVKQMVEEIESLKKKLQQKQLLILQLLEKISFLEGEVTFSTK

SEQ ID NO: 4556 - protein, 379 aa, Homo sapiens
MLRSTSTVTLLSGGAARTPGAPSRRANVCRLRLTVPPESPVPEQCEKKIERKEQLLDLSNGEPTRKLPQGVVYGVVRRSDQNQQKEMVVYGWSTSQLKEEMNYIKDVRATLEKVRKRMYGDYDEMRQKIRQLTQELSVSHAQQEYLENHIQTQSSALDRFNAMNSALASDSIGLQKTLVDVTLENSNIKDQIRNLQQTYEASMDKLREKQRQLEVAQVENQLLKMKVESSQEANAEVMREMTKKLYSQYEEKLQEEQRKHSAEKEALLEETNSFLKAIEEANKKMQAAEISLEEKDQRIGELDRLIERMEKERHQLQLQLLEHETEMSGELTDSDKERYQQLEEASASLRERIRHLDDMVHCQQKKVKQMVEEVTFSTK

SEQ ID NO: 4557 - protein, 415 aa, Homo sapiens
MLRSTSTVTLLSGGAARTPGAPSRRANVCRLRLTVPPESPVPEQCEKKIERKEQLLDLSNGEPTRKLPQGVVYGVVRRSDQNQQKEMVVYGWSTSQLKEEMNYIKDVSHAQQEYLENHIQTQSSALDRFNAMNSALASDSIGLQKTLVDVTLENSNIKDQIRNLQQTYEASMDKLREKQRQLEVAQVENQLLKMKVESSQEANAEVMREMTKKLYSQYEEKLQEEQRKHSAEKEALLEETNSFLKAIEEANKKMQAAEISLEEKDQRIGELDRLIERMEKERHQLQLQLLEHETEMSGELTDSDKERYQQLEEASASLRERIRHLDDMVHCQQKKVKQMVEENNELQSRLDYLTETQAKTEVETREIGVGCDLLPRQSRKFEKVLNEFVQLLPLPHHLLWAFGNVCWRRHFGLLQ

SEQ ID NO: 4558 - protein, 397 aa, Homo sapiens
MLRSTSTVTLLSGGAARTPGAPSRRANVCRLRLTVPPESPVPEQCEKKIERKEQLLDLSNGEPTRKLPQGVVYGVVRRSDQNQQKEMVVYGWSTSQLKEEMNYIKDKTLVDVTLENSNIKDQIRNLQQTYEASMDKLREKQRQLEVAQVENQLLKMKVESSQEANAEVMREMTKKLYSQYEEKLQEEQRKHSAEKEALLEETNSFLKAIEEANKKMQAAEISLEEKDQRIGELDRLIERMEKERHQLQLQLLEHETEMSGELTDSDKERYQQLEEASASLRERIRHLDDMVHCQQKKVKQMVEEIESLKKKLQQKQLLILQLLEKISFLEGENNELQSRLDYLTETQAKTEVETREIGVGCDLLPSQTGRTREIVMPSRNYTPYTRVLELTMKKTLT

SEQ ID NO: 4559 - protein, 550 aa, Homo sapiens
MLRSTSTVTLLSGGAARTPGAPSRRANVCRLRLTVPPESPVPEQCEKKIERKEQLLDLSNGEPTRKLPQGVVYGVVRRSDQNQQKEMVVYGWSTSQLKEEMNYIKDVRATLEKVRKRMYGDYDEMRQKIRQLTQELSVSHAQQEYLENHIQTQSSALDRFNAMNSALASDSIGLQKTLVDVTLENSNIKDQIRNLQQTYEASMDKLREKQRQLEVAQVENQLLKMKVESSQEANAEVMREMTKKLYSQYEEKLQEEQRKHSAEKEALLEETNSFLKAIEEANKKMQAAEISLEEKDQRIGELDRLIERMEKERHQLQLQLLEHETEMSGELTDSDKERYQQLEEASASLRERIRHLDDMVHCQQKKVKQMVEEIESLKKKLQQKQLLILQLLEKISFLEGENNELQSRLDYLTETQAKTEVETREIGVGCDLLPRLPFRQNDSSSHCQKSGSPISSEERRRRDKQHLDDITAARLLPLHHMPTQLLSIEESLALQKQQKQNYEEMQAKLAAQKLAERLNIKMRSYNPEGESSGRYREVRDEDDDWSSDEF

SEQ ID NO: 4560 - protein, 819 aa, Homo sapiens
MSGTSKESLGHGGLPGLGKTCLTTMDTKLNMLNEKVDQLLHFQEDVTEKLQSMCRDMGHLERGLHRLEASRAPGPGGADGVPHIDTQAGWPEVLELVRAMQQDAAQHGARLEALFRMVAAVDRAIALVGATFQKSKVADFLMQGRVPWRRGSPGDSPEENKERVEEEGGKPKHVLSTSGVQSDAREPGEESQKADVLEGTAERLPPIRASGLGADPAQAVVSPGQGDGVPGPAQAFPGHLPLPTKVEAKAPETPSENLRTGLELAPAPGRVNVVSPSLEVAPGAGQGASSSRPDPEPLEEGTRLTPGPGPQCPGPPGLPAQARATHSGGETPPRISIHIQEMDTPGEMLMTGRGSLGPTLTTEAPAAAQPGKQGPPGTGRCLQAPGTEPGEQTPEGARELSPLQESSSPGGVKAEEEQRAGAEPGTRPSLARSDDNDHEVGALGLQQGKSPGAGNPEPEQDCAARAPVRAEAVRRMPPGAEAGSVVLDDSPAPPAPFEHRVVSVKETSISAGYEVCQHEVLGGGRFGQVHRCTEKSTGLPLAAKIIKVKSAKDREDVKNEINIMNQLSHVNLIQLYDAFESKHSCTLVMEYVDGGELFDRITDEKYHLTELDVVLFTRQICEGVHYLHQHYILHLDLKPENILCVNQTGHQIKIIDFGLARRYKPREKLKVNFGTPEFLAPEVVNYEFVSFPTDMWSVGVITYMLLSGLSPFLGETDAETMNFIVNCSWDFDADTFEGLSEEAKDFVSRLLVKEKSCRMSATQCLKHEWLNNLPAKASRSKTRLKSQLLLQKYIAQRKWKKHFYVVTAANRLRKFPTSP

SEQ ID NO: 4561 - protein, 478 aa, Homo sapiens
MDTPGEMLMTGRGSLGPTLTTEAPAAAQPGKQGPPGTGRCLQAPGTEPGEQTPEGARELSPLQESSSPGGVKAEEEQRAGAEPGTRPSLARSDDNDHEVGALGLQQGKSPGAGNPEPEQDCAARAPVRAEAVRRMPPGAEAGSVVLDDSPAPPAPFEHRVVSVKETSISAGYEVCQHEVLGGGRFGQVHRCTEKSTGLPLAAKIIKVKSAKDREDVKNEINIMNQLSHVNLIQLYDAFESKHSCTLVMEYVDGGELFDRITDEKYHLTELDVVLFTRQICEGVHYLHQHYILHLDLKPENILCVNQTGHQIKIIDFGLARRYKPREKLKVNFGTPEFLAPEVVNYEFVSFPTDMWSVGVITYMLLSGLSPFLGETDAETMNFIVNCSWDFDADTFEGLSEEAKDFVSRLLVKEKSCRMSATQCLKHEWLNNLPAKASRSKTRLKSQLLLQKYIAQRKWKKHFYVVTAANRLRKFPTSP

SEQ ID NO: 4562 - protein, 652 aa, Homo sapiens
MAAAALPPRPLLLLPLVLLLSGRPTRADSKVFGDLDQVRMTSEGSDCRCKCIMRPLSKDACSRVRSGRARVEDFYTVETVSSGTDCRCSCTAPPSSLNPCENEWKMEKLKKQAPELLKLQSMVDLLEGTLYSMDLMKVHAYVHKVASQMNTLEESIKANLSRENEVVKDSVRHLSEQLRHYENHSAIMLGIKKELSRLGLQLLQKDAAAAPATPATGTGSKAQDTARGKGKDISKYGSVQKSFADRGLPKPPKEKLLQVEKLRKESGKGSFLQPTAKPRALAQQQAVIRGFTYYKAGKQEVTEAVADNTLQGTSWLEQLPPKVEGRSNSAEPNSAEQDEAEPRSSERVDLASGTPTSIPATTTTATTTPTPTTSLLPTEPPSGPEVSSQGREASCEGTLRAVDPPVRHHSYGRHEGAWMKDPAARDDRIYVTNYYYGNSLVEFRNLENFKQGRWSNMYKLPYNWIGTGHVVYQGAFYYNRAFTKNIIKYDLRQRFVASWALLPDVVYEDTTPWKWRGHSDIDFAVDESGLWVIYPAVDDRDEAQPEVIVLSRLDPGDLSVHRETTWKTRLRRNSYGNCFLVCGILYAVDTYNQQEGQVAYAFDTHTGTDARPQLPFLNEHAYTTQIDYNPKERVLYAWDNGHQLTYTLHFVV

SEQ ID NO: 4563 - protein, 613 aa, Homo sapiens
MTSEGSDCRCKCIMRPLSKDACSRVRSGRARVEDFYTVETVSSGTDCRCSCTAPPSSLNPCENEWKMEKLKKQAPELLKLQSMVDLLEGTLYSMDLMKVHAYVHKVASQMNTLEESIKANLSRENEVVKDSVRHLSEQLRHYENHSAIMLGIKKELSRLGLQLLQKDAAAAPATPATGTGSKAQDTARGKGKDISKYGSVQKSFADRGLPKPPKEKLLQVEKLRKESGKGSFLQPTAKPRALAQQQAVIRGFTYYKAGKQEVTEAVADNTLQGTSWLEQLPPKVEGRSNSAEPNSAEQDEAEPRSSERVDLASGTPTSIPATTTTATTTPTPTTSLLPTEPPSGPEVSSQGREASCEGTLRAVDPPVRHHSYGRHEGAWMKDPAARDDRIYVTNYYYGNSLVEFRNLENFKQGRWSNMYKLPYNWIGTGHVVYQGAFYYNRAFTKNIIKYDLRQRFVASWALLPDVVYEDTTPWKWRGHSDIDFAVDESGLWVIYPAVDDRDEAQPEVIVLSRLDPGDLSVHRETTWKTRLRRNSYGNCFLVCGILYAVDTYNQQEGQVAYAFDTHTGTDARPQLPFLNEHAYTTQIDYNPKERVLYAWDNGHQLTYTLHFVV

SEQ ID NO: 4564 - protein, 438 aa, Homo sapiens
MSKRDKAGKDTARGKGKDISKYGSVQKSFADRGLPKPPKEKLLQVEKLRKESGKGSFLQPTAKPRALAQQQAVIRGFTYYKAGKQEVTEAVADNTLQGTSWLEQLPPKVEGRSNSAEPNSAEQDEAEPRSSERVDLASGTPTSIPATTTTATTTPTPTTSLLPTEPPSGPEVSSQGREASCEGTLRAVDPPVRHHSYGRHEGAWMKDPAARDDRIYVTNYYYGNSLVEFRNLENFKQGRWSNMYKLPYNWIGTGHVVYQGAFYYNRAFTKNIIKYDLRQRFVASWALLPDVVYEDTTPWKWRGHSDIDFAVDESGLWVIYPAVDDRDEAQPEVIVLSRLDPGDLSVHRETTWKTRLRRNSYGNCFLVCGILYAVDTYNQQEGQVAYAFDTHTGTDARPQLPFLNEHAYTTQIDYNPKERVLYAWDNGHQLTYTLHFVV

SEQ ID NO: 4565 - protein, 312 aa, Homo sapiens
MDTGNWSQVAEFIILGFPHLQGVQIYLFLLLLLIYLMTVLGNLLIFLVVCLDSRLHTPMYHFVSILSFSELGYTAATIPKMLANLLSEKKTISFSGCLLQIYFFHSLGATECYLLTAMAYDRYLAICRPLHYPTLMTPTLCAEIAIGCWLGGLAGPVVEISLISRLPFCGPNRIQHVFCDFPPVLSLACTDTSINVLVDFVINSCKILATFLLILCSYVQIICTVLRIPSAAGKRKAISTCASHFTVVLIFYGSILSMYVQLKKSYSLDYDQALAVVYSVLTPFLNPFIYSLRNKEIKEAVRRQLKRIGILA

SEQ ID NO: 4566 - protein, 524 aa, Homo sapiens
MSFICGLQSAARNHVFFRFNSLSNWRKCNTLASTSRGCHQVQVNHIVNKYQGLGVNQCDRWSFLPGNFHFYSTFNNKRTGGLSSTKSKEIWRITSKCTVWNDAFSRQLLIKEVTAVPSLSVLHPLSPASIRAIRNFHTSPRFQAAPVPLLLMILKPVQKLFAIIVGRGIRKWWQALPPNKKEVVKENIRKNKWKLFLGLSSFGLLFVVFYFTHLEVSPITGRSKLLLLGKEQFRLLSELEYEAWMEEFKNDMLTEKDARYLAVKEVLCHLIECNKDVPGISQINWVIHVVDSPIINAFVLPNGQMFVFTGFLNSVTDIHQLSFLLGHEIAHAVLGHAAEKAGMVHLLDFLGMIFLTMIWAICPRDSLALLCQWIQSKLQEYMFNRPYSRKLEAEADKIGLLLAAKACADIRASSVFWQQMEFVDSLHGQPKMPEWLSTHPSHGNRVEYLDRLIPQALKIREMCNCPPLSNPDPRLLFKLSTKHFLEESEKEDLNITKKQKMDTLPIQKQEQIPLTYIVEKRTGS

SEQ ID NO: 4567 - protein, 486 aa, Homo sapiens
MSFICGLQSAARNHVFFRFNSLSNWRKCNTLASTSRGCHQVQVNHIVNKYQGLGVNQCDRWSFLPGNFHFYSTFNNKRTGGLSSTKSKEIWRITSKCTVWNDAFSRQLLIKEVTAVPSLSVLHPLSPASIRAIRNFHTSPRFQAAPVPLLLMILKPVQKLFAIIVGRGIRKWWQALPPNKKEVVKENIRKNKWKLFLGLSSFGLLFVVFYFTHLEVSPITGRSKLLLLGKEQFRLLSELEYEAWMEEFKNDMLTEKDARYLAVKEVLCHLIECNKDVPGISQINWVIHVVDSPIINAFVLPNGQMFVFTGFLNSVTDIHQLSFLLGHEIAHAVLGHAAEKAGMVHLLDFLGMIFLTMIWAICPRDSLALLCQWIQSKLQEYMFNRPYSRKLEAEADKIGLLLAAKACADIRASSVFWQQMEFVDSLHGQPKMPEWLSTHPSHGNRVEYLDRLIPQLVREEKFIEQPEQIAELTLNSFIQNTEICRS

SEQ ID NO: 4568 - protein, 522 aa, Homo sapiens
MSSRPLESPPPYRPDEFKPNHYAPSNDIYGGEMHVRPMLSQPAYSFYPEDEILHFYKWTSPPGVIRILSMLIIVMCIAIFACVASTLAWDRGYGTSLLGGSVGYPYGGSGFGSYGSGYGYGYGYGYGYGGYTDPRAAKGFMLAMAAFCFIAALVIFVTSVIRSEMSRTRRYYLSVIIVSAILGIMVFIATIVYIMGVNPTAQSSGSLYGSQIYALCNQFYTPAATGLYVDQYLYHYCVVDPQEAIAIVLGFMIIVAFALIIFFAVKTRRKMDRYDKSNILWDKEHIYDEQPPNVEEWVKNVSAGTQDVPSPPSDYVERVDSPMAYSSNGKVNDKRFYPESSYKSTPVPEVVQELPLTSPVDDFRQPRYSSGGNFETPSKRAPAKGRAGRSKRTEQDHYETDYTTGGESCDELEEDWIREYPPITSDQQRQLYKRNFDTGLQEYKSLQSELDEINKELSRLDKELDDYREESEEYMAAADEYNRLKQVKGSADYKSKKNHCKQLKSKLSHIKKMVGDYDRQKT

SEQ ID NO: 4569 - protein, 468 aa, Homo sapiens
MSSRPLESPPPYRPDEFKPNHYAPSNDIYGGEMHVRPMLSQPAYSFYPEDEILHFYKWTSPPGVIRILSMLIIVMCIAIFACVASTLAWDRGYGTSLLGGSVGYPYGGSGFGSYGSGYGYGYGYGYGYGGYTDPRAAKGFMLAMAAFCFIAALVIFVTSVIRSEMSRTRRYYLSVIIVSAILGIMVFIATIVYIMGVNPTAQSSGSLYGSQIYALCNQFYTPAATGLYVDQYLYHYCVVDPQEVKNVSAGTQDVPSPPSDYVERVDSPMAYSSNGKVNDKRFYPESSYKSTPVPEVVQELPLTSPVDDFRQPRYSSGGNFETPSKRAPAKGRAGRSKRTEQDHYETDYTTGGESCDELEEDWIREYPPITSDQQRQLYKRNFDTGLQEYKSLQSELDEINKELSRLDKELDDYREESEEYMAAADEYNRLKQVKGSADYKSKKNHCKQLKSKLSHIKKMVGDYDRQKT

SEQ ID NO: 4570 - protein, 479 aa, Homo sapiens
MSSRPLESPPPYRPDEFKPNHYAPSNDIYGGEMHVRPMLSQPAYSFYPEDEILHFYKWTSPPGVIRILSMLIIVMCIAIFACVASTLAWDRGYGTSLLGGSVGYPYGGSGFGSYGSGYGYGYGYGYGYGGYTDPRAAKGFMLAMAAFCFIAALVIFVTSVIRSEMSRTRRYYLSVIIVSAILGIMVFIATIVYIMGVNPTAQSSGSLYGSQIYALCNQFYTPAATGLYVDQYLYHYCVVDPQEAIAIVLGFMIIVAFALIIFFAVKTRRKMDRYDKSNILWDKEHIYDEQPPNVEEWVKNVSAGTQDVPSPPSDYVERVDSPMAYSSNGKVNDKRFYPESSYKSTPVPEVVQELPLTSPVDDFRQPRYSSGGNFETPSKRAPAKGRAGRSKRTEQDHYETDYTTGGESCDELEEDWIREYPPITSDQQRQLYKRNFDTGLQEYKSLQSELDEINKELSRLDKELDDYREESEEYMVNST

SEQ ID NO: 4571 - protein, 271 aa, Homo sapiens
MIIVAFALIIFFAVKTRRKMDRYDKSNILWDKEHIYDEQPPNVEEWVKNVSAGTQDVPSPPSDYVERVDSPMAYSSNGKVNDKRFYPESSYKSTPVPEVVQELPLTSPVDDFRQPRYSSGGNFETPSKRAPAKGRAGRSKRTEQDHYETDYTTGGESCDELEEDWIREYPPITSDQQRQLYKRNFDTGLQEYKSLQSELDEINKELSRLDKELDDYREESEEYMAAADEYNRLKQVKGSADYKSKKNHCKQLKSKLSHIKKMVGDYDRQKT

SEQ ID NO: 4572 - protein, 200 aa, Homo sapiens
MAYSSNGKVNDKRFYPESSYKSTPVPEVVQELPLTSPVDDFRQPRYSSGGNFETPSKRAPAKGRAGRSKRTEQDHYETDYTTGGESCDELEEDWIREYPPITSDQQRQLYKRNFDTGLQEYKSLQSELDEINKELSRLDKELDDYREESEEYMAAADEYNRLKQVKGSADYKSKKNHCKQLKSKLSHIKKMVGDYDRQKT

SEQ ID NO: 4573 - protein, 69 aa, Homo sapiens
MSSRPLESPPPYRPDEFKPNHYAPSNDIYGGEMHVRPMLSQPAYSFYPEESLQAVKEQIVTHQEDGWRL

SEQ ID NO: 4574 - protein, 70 aa, Homo sapiens
MSSRPLESPPPYRPDEFKPNHYAPSNDIYGGEMHVRPMLSQPAYSFYPEDEMTIEKKVKSTWLLLMNTID

SEQ ID NO: 4575 - protein, 228 aa, Homo sapiens
MVKSSLQRILNSHCFAREKEGDKPSATIHASRTMPLLSLHSRGGSSSESSRVSLHCCSNPGPGPRWCSDAPHPPLKIPGGRGNSQRDHNLSANLFYSDDRLNVTEELTSNDKTRILNVQSRLTDAKRINWRTVLSGGSLYIEIPGGALPEGSKDSFAVLLEFAEEQLRADHVFICFHKNREDRAALLRTFSFLGFEIVRPGHPLVPKRPDACFMAYTFERESSGEEEE

SEQ ID NO: 4576 - protein, 639 aa, Homo sapiens
MLSYGERLGSPAVSPLPVRGGHVMRGTAFAYVPSPQVLHRIPGTSAYAFPSLGPVALAEHTCPCGEVLERHEPLPAKLALEEEQKPESRLVPKLRQAGAMLLKVPLMLTFLYLFVCSLDMLSSAFQLAGGKVAGDIFKDNAILSNPVAGLVVGILVTVLVQSSSTSTSIIVSMVSSGLLEVSSAIPIIMGSNIGTSVTNTIVALMQAGDRTDFRRAFAGATVHDCFNWLSVLVLLPLEAATGYLHHITRLVVASFNIHGGRDAPDLLKIITEPFTKLIIQLDESVITSIATGDESLRNHSLIQIWCHPDSLQAPTSMSRAEANSSQTLGNATMEKCNHIFVDTGLPDLAVGLILLAGSLVLLCTCLILLVKMLNSLLKGQVAKVIQKVINTDFPAPFTWVTGYFAMVVGASMTFVVQSSSVFTSAITPLIGLGVISIERAYPLTLGSNIGTTTTAILAALASPREKLSSAFQIALCHFFFNISGILLWYPVPCTRLPIRMAKALGKRTAKYRWFAVLYLLVCFLLLPSLVFGISMAGWQVMVGVGTPFGALLAFVVLINVLQSRSPGHLPKWLQTWDFLPRWMHSLKPLDHLITRATLCCARPEPRSPPLPPRVFLEELPPATPSPRLALPAHHNATRL

SEQ ID NO: 4577 - protein, 340 aa, Homo sapiens
MLSYGERLGSPAVSPLPVRGGHVMRGTAFAYVPSPQVLHRIPGTSAYAFPSLGPVALAEHTCPCGEVLERHEPLPAKLALEEEQKPESRLVPKLRQAGAMLLKVPLMLTFLYLFVCSLDMLSSAFQLAGGKVAGDIFKDNAILSNPVAGLVVGILVTVLVQSSSTSTSIIVSMVSSGLLEVSSAIPIIMGSNIGTSVTNTIVALMQAGDRTDFRRAFAGATVHDCFNWLSVLVLLPLEAATGYLHHITRLVVASFNIHGGRDAPDLLKIITEPFTKLIIQLDESVITSIATGDESLRNHSLIQIWCHPDSLQQNLEGREITHFDLRKKQAMEDSSVPHCP

SEQ ID NO: 4578 - protein, 184 aa, Homo sapiens
MKISCVLGKLLMLFELIHGLQDLSITCSESWLQVKLRRTPLLNDLQPLQNELSLGIGCPVNMVEVDFFGFLYLLTFCGIRVSEHGVGILIESLIVYEPTNFDFNLHIPVSCYVQRRFPIILVMRGRENDSRRECRRSVGQHRSLSHELEDLEIRPRVSYVNSVPLLSYLIVSLPKCKNKAVHSG

SEQ ID NO: 4579 - protein, 309 aa, Homo sapiens
MKSWNNTIILEFLLLGISEEPELQAFLFGLFLSMYLVTVLGNLLIILATISDSHLHTPMYFFLSNLSFVDICFVSTTVPKMLVNIQTHNKVITYAGCITQMCFFLLFVGLDNFLLTVMAYDRFVAICHPLHYMVIMNPQLCGLLVLASWIMSVLNSMLQSLMVLPLPFCTHMEIPHFFCEINQVVHLACSDTFLNDIVMYFAVALLGGGPLTGILYSYSKIVSSIRAISSAQGKYKAFSTCASHLSVVSLFYGTCLGVYLSSAATHNSHTGAAASVMYTVVTPMLNPFIYSLRNKHIKGAMKTFFRGKQ

SEQ ID NO: 4580 - protein, 507 aa, Homo sapiens
MAFNFGAPSGTSGTAAATAAPAGGFGGFGTTSTTAGSAFSFSAPTNTGTTGLFGGTQNKGFGFGTGFGTTTGTSTGLGTGLGTGLGFGGFNTQQQQQTTLGGLFSQPTQAPTQSNQLINTASALSAPTLLGDERDAILAKWNQLQAFWGTGKGYFNNNIPPVEFTQENPFCRFKAVGYSCMPSNKDEDGLVVLVFNKKETEIRSQQQQLVESLHKVLGGNQTLTVNVEGTKTLPDDQTEVVIYVVERSPNGTSRRVPATTLYAHFEQANIKTQLQQLGVTLSMTRTELSPAQIKQLLQNPPAGVDPIIWEQAKVDNPDSEKLIPVPMVGFKELLRRLKVQDQMTKQHQTRLDIISEDISELQKNQTTSVAKIAQYKRKLMDLSHRTLQVLIKQEIQRKSGYAIQADEEQLRVQLDTIQGELNAPTQFKGRLNELMSQIRMQNHFGAVRSEERYYIDADLLREIKQHLKQQQEGLSHLISIIKDDLEDIKLVEHGLNETIHIRGGVFS

SEQ ID NO: 4581 - protein, 291 aa, Homo sapiens
MPSNKDEDGLVVLVFNKKETEIRSQQQQLVESLHKVLGGNQTLTVNVEGTKTLPDDQTEVVIYVVERSPNGTSRRVPATTLYAHFEQANIKTQLQQLGVTLSMTRTELSPAQIKQLLQNPPAGVDPIIWEQAKVDNPDSEKLIPVPMVGFKELLRRLKVQDQMTKQHQTRLDVLIKQEIQRKSGYAIQADEEQLRVQLDTIQGELNAPTQFKGRLNELMSQIRMQNHFGAVRSEERYYIDADLLREIKQHLKQQQEGLSHLISIIKDDLEDIKLVEHGLNETIHIRGGVFS

SEQ ID NO: 4582 - protein, 459 aa, Homo sapiens
MAFNFGAPSGTSGTAAATAAPAGGFGGFGTTSTTAGSAFSFSAPTNTGTTALGGLFSQPTQAPTQSNQLINTASALSAPTLLGDERDAILAKWNQLQAFWGTGKGYFNNNIPPVEFTQENPFCRFKAVGYSCMPSNKDEDGLVVLVFNKKETEIRSQQQQLVESLHKVLGGNQTLTVNVEGTKTLPDDQTEVVIYVVERSPNGTSRRVPATTLYAHFEQANIKTQLQQLGVTLSMTRTELSPAQIKQLLQNPPAGVDPIIWEQAKVDNPDSEKLIPVPMVGFKELLRRLKVQDQMTKQHQTRLDIISEDISELQKNQTTSVAKIAQYKRKLMDLSHRTLQVLIKQEIQRKSGYAIQADEEQLRVQLDTIQGELNAPTQFKGRLNELMSQIRMQNHFGAVRSEERYYIDADLLREIKQHLKQQQEGLSHLISIIKDDLEDIKLVEHGLNETIHIRGGVFS

SEQ ID NO: 4583 - protein, 402 aa, Homo sapiens
MYSGNRSGGHGYWDGGGAAGAEGPAPAGTLSPAPLFSPGTYERLALLLGSIGLLGVGNNLLVLVLYYKFQRLRTPTHLLLVNISLSDLLVSLFGVTFTFVSCLRNGWVWDTVGCVWDGFSGSLFGIVSIATLTVLAYERYIRVVHARVINFSWAWRAITYIWLYSLAWAGAPLLGWNRYILDVHGLGCTVDWKSKDANDSSFVLFLFLGCLVVPLGVIAHCYGHILYSIRMLRCVEDLQTIQVIKILKYEKKLAKMCFLMIFTFLVCWMPYIVICFLVVNGHGHLVTPTISIVSYLFAKSNTVYNPVIYVFMIRKFRRSLLQLLCLRLLRCQRPAKDLPAAGSEMQIRPIVMSQKDGDRPKKKVTFNSSSIIFIITSDESLSVDDSDKTNGSKVDVIQVRPL

SEQ ID NO: 4584 - protein, 323 aa, Homo sapiens
MYSGNRSGGHGYWDGGGAAGAEGPAPAGTLSPAPLFSPGTYERLALLLGSIGLLGVGNNLLVLVLYYKFQRLRTPTHLLLVNISLSDLLVSLFGVTFTFVSCLRNGWVWDTVGCVWDGFSGSLFGWISQLQAATREARASMGPVQQGTICMQLRCVEDLQTIQVIKILKYEKKLAKMCFLMIFTFLVCWMPYIVICFLVVNGHGHLVTPTISIVSYLFAKSNTVYNPVIYVFMIRKFRRSLLQLLCLRLLRCQRPAKDLPAAGSEMQIRPIVMSQKDGDRPKKKVTFNSSSIIFIITSDESLSVDDSDKTNGSKVDVIQVRPL

SEQ ID NO: 4585 - protein, 841 aa, Homo sapiens
MNLLYRKTKLEWRQHKEEEAKRSSSKEVAPAGSAGPAAGQGPGVRVRDIASLRRSLRMGFMTMPASQEHTPHPCRSAMAPRSLSCHSVGSMDSVGGGPGGASGGLTEDSSTRRPPAKPRRHPSTKLSMVGPGSGAETPPSKKAGSQKPTPEGRESSRKVPPQKPRRSPNTQLSVSFDESCPPGPSPRGGNLPLQRLTRGSRVAGDPDVGAQEEPVYIEMVGDVFRGGGRSGGGLAGPPLGGGGPTPPAGADSDSEESEAIYEEMKYPLPEEAGEGRANGPPPLTATSPPQQPHALPPHAHRRPASALPSRRDGTPTKTTPCEIPPPFPNLLQHRPPLLAFPQAKSASRTPGDGVSRLPVLCHSKEPAGSTPAPQVPARERETPPPPPPPPAANLLLLGPSGRARSHSTPLPPQGSGQPRGERELPNSHSMICPKAAGAPAAPPAPAALLPGPPKDKAVSYTMVYSAVKVTTHSVLPAGPPLGAGEPKTEKEISVLHGMLCTSSRPPVPGKTSPHGGAMGAAAGVLHHRGCLASPHSLPDPTVGPLTPLWTYPATAAGLKRPPAYESLKAGGVLNKGCGVGAPSPMVKIQLQEQGTDGGAFASISCAHVIASAGTPEEEEEEVGAATFGAGWALQRKVLYGGRKAKELDKVEDGARAWNGSAEGPGKVEREDRGPGTSGIPVRSQGAEGLLARIHHGDRGGSRTALPIPCQTFPACHRNGDFTGGYRLGRSASTSGVRQVVLHTPRPCSQPRDALSQPHPALPLPLPLPPQPARERDGKLLEVIERKRCVCKEIKARHRPDRGLCKQESMPILPSWRRGPEPRKSGTPPCRRQHTVLWDTAI

SEQ ID NO: 4586 - protein, 842 aa, Homo sapiens
MNLLYRKTKLEWRQHKEEEAKRSSSKEVAPAGSAGPAAGQGPGVRVRDIASLRRSLRMGFMTMPASQEHTPHPCRSAMAPRSLSCHSVGSMDSVGGGPGGASGGLTEDSSTRRPPAKPRRHPSTKLSMVGPGSGAETPPSKKAGSQKPTPEGRESSRKVPPQKPRRSPNTQLSVSFDESCPPGPSPRGGNLPLQRLTRGSRVAGDPDVGAQEEPVYIEMVGDVFRGGGRSGGGLAGPPLGGGGPTPPAGADSDSEESEAIYEEMKYPLPEEAGEGRANGPPPLTATSPPQQPHALPPHAHRRPASALPSRRDGTPTKTTPCEIPPPFPNLLQHRPPLLAFPQAKSASRTPGDGVSRLPVLCHSKEPAGSTPAPQVPARERETPPPPPPPPAANLLLLGPSGRARSHSTPLPPQGSGQPRGERELPNSHSMICPKAAGAPAAPPAPAALLPGPPKDKAVSYTMVYSAVKVTTHSVLPAGPPLGAGEPKTEKEISVLHGMLCTSSRPPVPGKTSPHGGAMGAAAGVLHHRGCLASPHSLPDPTVGPLTPLWTYPATAAGLKRPPAYESLKAGGVLNKGCGVGAPSPMVKIQLQEQGTDGGAFASISCAHVIASAGTPEEEEEEVGAATFGAGWALQRKVLYGGRKAKELDTEVEDGARAWNGSAEGPGKVEREDRGPGTSGIPVRSQGAEGLLARIHHGDRGGSRTALPIPCQTFPACHRNGDFTGGYRLGRSASTSGVRQVVLHTPRPCSQPRDALSQPHPALPLPLPLPPQPARERDGKLLEVIERKRCVCKEIKARHRPDRGLCKQESMPILPSWRRGPEPRKSGTPPCRRQHTVLWDTAI

SEQ ID NO: 4587 - protein, 318 aa, Homo sapiens
MEGNQTWITDITLLGFQVGPALAILLCGLFSVFYTLTLLGNGVIFGIICLDSKLHTPMYFFLSHLAIIDMSYASNNVPKMLANLMNQKRTISFVPCIMQTFLYLAFAVTECLILVVMSYDRYVAICHPFQYTVIMSWRVCTILVLTSWSCGFALSLVHEILLLRLPFCGPRDVNHLFCEILSVLKLACADTWVNQVVIFATCVFVLVGPLSLILVSYMHILGAILKIQTKEGRIKAFSTCSSHLCVVGLFFGIAMVVYMVPDSNQREEQEKMLSLFHSVFNPMLNPLIYSLRNAQLKGALHRALQRKRSMRTVYGLCL

SEQ ID NO: 4588 - protein, 316 aa, Homo sapiens
MKISNNSLGFLPTTFILVGIPGLESEHLWISVPFSLIYIIIFLGNGIILHVIRTDIALHQPMYLFLAMLALAEVRVSASTLPTVLGIFLFGNTEISLEACLFPDVLHPFFIHDGASCAAGHVFGPLYSHLQPTELHSYPDTAQGLWHRSYYRTEKHYAHGSVAHSLMASALLWPQCPLTFLLSAPQSYLSCGNISVNNIYGIFIVTSTFGLDSLLIVISYGLILHTVLGIATGEGRKKALNTCGSHVCAVLAYYVPMIGLSIVHRLGHRVSPLLQAMMANAYLFFPPVVNPIVYSIKTKEIHGAIVRMLLEKRRRV

SEQ ID NO: 4589 - protein, 323 aa, Homo sapiens
MWQKNQTSLADFILEGLFDDSLTHLFLFSLTMVVFLIAVSGNTLTILLICIDPQLHTPMYFLLSQLSLMDLMHVSTIILKMATNYLSGKKSISFVGCATQHFLYLCLGGAECFLLAVMSYDRYVAICHPLRYAVLMNKKVGLMMAVMSWLGASVNSLIHMAILMHFPFCGPRKVYHFYCEFPAVVKLVCGDITVYETTVYISSILLLLPIFLISTSYVFILQSVIQMRSSGSKRNAFATCGSHLTVVSLWFGACIFSYMRPRSQCTLLQNKVGSVFYSIITPTLNSLIYTLRNKDVAKALRRVLRRDVITQCIQRLQLWLPRV

SEQ ID NO: 4590 - protein, 261 aa, Homo sapiens
MFEARLVQGSILKKVLEALKDLINEACWDISSSGVNLQSMDSSHVSLVQLTLRSEGFDTYRCDRNLAMGVNLTSMSKILKCAGNEDIITLRAEDNADTLALVFEAPNQEKVSDYEMKLMDLDVEQLGIPEQEYSCVVKMPSGEFARICRDLSHIGDAVVISCAKDGVKFSASGELGNGNIKLSQTSNVDKEEEAVTIEMNEPVQLTFALRYLNFFTKATPLSSTVTLSMSADVPLVVEYKIADMGHLKYYLAPKIEDEEGS

SEQ ID NO: 4591 - protein, 329 aa, Homo sapiens
MCALKGFLEENFYTYSVAKGNHSTVYEFILLGLTDNAELQVTLFGIFLVVYLASFMGNFGLIMLIQISPQLHTPMYFFLSHLAFVDFSFTSSVAPNTLVNFLCEVKSITFYACAIQVCCFITFVVCELYLLSIMAYDRYVAICNPLLYVILIPRKLCIKLIASTYVYGFTVGLVQTVATSYLSFCDSNVINHFYHDDVPLVALACSDTHVKELMLLIIAGFNTLCSLVIVLISYGFIFFAILRIHSAEGRQKAFSTSASHLTSITIFYGTIIFMYPQPKSSHSLNMDKVASVFNVVVIPTLNPLIYSLRNQEVKNALKRIIEKLCLAVK

SEQ ID NO: 4592 - protein, 314 aa, Homo sapiens
MLPSNITSTHPAVFLLVGIPGLEHLHAWISIPFCFAYTLALLGNCTLLFIIQADAALHEPMYLFLAMLATIDLVLSSTTLPKMLAIFWFRDQEINFFACLVQMFFLHSFSIMESAVLLAMAFDRYVAICKPLHYTTVLTGSLITKIGMAAVARAVTLMTPLPFLLRRFHYCRGPVIAHCYCEHMAVVRLACGDTSFNNIYGIAVAMFIVVLDLLFVILSYVFILQAVLQLASQEARYKAFGTCVSHIGAILSTYTPVVISSVMHRVARHAAPRVHILLAIFYLLFPPMVNPIIYGVKTKQIREYVLSLFQRKNM

SEQ ID NO: 4593 - protein, 335 aa, Homo sapiens
MAQVRALHKIMALFSANSIGAMNNSDTRIAGCFLTGIPGLEQLHIWLSIPFCIMYITALEGNGILICVILSQAILHEPMYIFLSMLASADVLLSTTTMPKALANLWLGYSLISFDGCLTQMFFIHFLFIHSAVLLAMAFDRYVAICSPLRYVTILTSKVIGKIVTAALSHSFIIMFPSIFLLEHLHYCQINIIAHTFCEHMGIAHLSCSDISINVWYGLAAALLSTGLDIMLITVSYIHILQAVFRLLSQDARSKALSTCGSHICVILLFYVPALFSVFAYRFGGRSVPCYVHILLASLYVVIPPMLNPVIYGVRTKPILEGAKQMFSNLAKGSK

SEQ ID NO: 4594 - protein, 374 aa, Homo sapiens
MKALIFAAAGLLLLLPTFCQSGMENDTNNLAKPTLPIKTFRGAPPNSFEEFPFSALEGWTGATITVKIKCPEESASHLHVKNATMGYLTSSLSTKLIPAIYLLVFVVGVPANAVTLWMLFFRTRSICTTVFYTNLAIADFLFCVTLPFKIAYHLNGNNWVFGEVLCRATTVIFYGNMYCSILLLACISINRYLAIVHPFTYRGLPKHTYALVTCGLVWATVFLYMLPFFILKQEYYLVQPDITTCHDVHNTCESSSPFQLYYFISLAFFGFLIPFVLIIYCYAAIIRTLNAYDHRWLWYVKASLLILVIFTICFAPSNIILIIHHANYYYNNTDGLYFIYLIALCLGSLNSCLDPFLYFLMSKTRNHSTAYLTK

SEQ ID NO: 4595 - protein, 352 aa, Homo sapiens
MENDTNNLAKPTLPIKTFRGAPPNSFEEFPFSALEGWTGATITVKIKCPEESASHLHVKNATMGYLTSSLSTKLIPAIYLLVFVVGVPANAVTLWMLFFRTRSICTTVFYTNLAIADFLFCVTLPFKIAYHLNGNNWVFGEVLCRATTVIFYGNMYCSILLLACISINRYLAIVHPFTYRGLPKHTYALVTCGLVWATVFLYMLPFFILKQEYYLVQPDITTCHDVHNTCESSSPFQLYYFISLAFFGFLIPFVLIIYCYAAIIRTLNAYDHRWLWYVKASLLILVIFTICFAPSNIILIIHHANYYYNNTDGLYFIYLIALCLGSLNSCLDPFLYFLMSKTRNHSTAYLTK

SEQ ID NO: 4596 - protein, 327 aa, Homo sapiens
MAIFNNTTSSSSNFLLTAFPGLECAHVWISIPVCCLYTIALLGNSMIFLVIITKRRLHKPMYYFLSMLAAVDLCLTITTLPTVLGVLWFHAREISFKACFIQMFFVHAFSLLESSVLVAMAFDRFVAICNPLNYATILTDRMVLVIGLVICIRPAVFLLPLLVAINTVSFHGGHELSHPFCYHPEVIKYTYSKPWISSFWGLFLQLYLNGTDVLFILFSYVLILRTVLGIVARKKQQKALSTCVCHICAVTIFYVPLISLSLAHRLFHSTPRVLCSTLANIYLLLPPVLNPIIYSLKTKTIRQAMFQLLQSKGSWGFNVRGLRGRWD

SEQ ID NO: 4597 - protein, 400 aa, Homo sapiens
MDSSAAPTNASNCTDALAYSSCSPAPSPGSWVNLSHLDGNLSDPCGPNRTDLGGRDSLCPPTGSPSMITAITIMALYSIVCVVGLFGNFLVMYVIVRYTKMKTATNIYIFNLALADALATSTLPFQSVNYLMGTWPFGTILCKIVISIDYYNMFTSIFTLCTMSVDRYIAVCHPVKALDFRTPRNAKIINVCNWILSSAIGLPVMFMATTKYRQGSIDCTLTFSHPTWYWENLLKICVFIFAFIMPVLIITVCYGLMILRLKSVRMLSGSKEKDRNLRRITRMVLVVVAVFIVCWTPIHIYVIIKALVTIPETTFQTVSWHFCIALGYTNSCLNPVLYAFLDENFKRCFREFCIPTSSNIEQQNSTRIRQNTRDHPSTANTVDRTNHQLENLEAETAPLP

SEQ ID NO: 4598 - protein, 392 aa, Homo sapiens
MDSSAAPTNASNCTDALAYSSCSPAPSPGSWVNLSHLDGNLSDPCGPNRTDLGGRDSLCPPTGSPSMITAITIMALYSIVCVVGLFGNFLVMYVIVRYTKMKTATNIYIFNLALADALATSTLPFQSVNYLMGTWPFGTILCKIVISIDYYNMFTSIFTLCTMSVDRYIAVCHPVKALDFRTPRNAKIINVCNWILSSAIGLPVMFMATTKYRQGSIDCTLTFSHPTWYWENLLKICVFIFAFIMPVLIITVCYGLMILRLKSVRMLSGSKEKDRNLRRITRMVLVVVAVFIVCWTPIHIYVIIKALVTIPETTFQTVSWHFCIALGYTNSCLNPVLYAFLDENFKRCFREFCIPTSSNIEQQNSTRIRQNTRDHPSTANTVDRTNHQVRSL

SEQ ID NO: 4599 - protein, 446 aa, Homo sapiens
MDSSAAPTNASNCTDALAYSSCSPAPSPGSWVNLSHLDGNLSDPCGPNRTDLGGRDSLCPPTGSPSMITAITIMALYSIVCVVGLFGNFLVMYVIVRYTKMKTATNIYIFNLALADALATSTLPFQSVNYLMGTWPFGTILCKIVISIDYYNMFTSIFTLCTMSVDRYIAVCHPVKALDFRTPRNAKIINVCNWILSSAIGLPVMFMATTKYRQGSIDCTLTFSHPTWYWENLLKICVFIFAFIMPVLIITVCYGLMILRLKSVRMLSGSKEKDRNLRRITRMVLVVVAVFIVCWTPIHIYVIIKALVTIPETTFQTVSWHFCIALGYTNSCLNPVLYAFLDENFKRCFREFCIPTSSNIEQQNSTRIRQNTRDHPSTANTVDRTNHQCLPIPSLSCWALEQGCLVVYPGPLQGPLVRYDLPAILHSSCLRGNTAPSPSGGAFLLS

SEQ ID NO: 4600 - protein, 403 aa, Homo sapiens
MDSSAAPTNASNCTDALAYSSCSPAPSPGSWVNLSHLDGNLSDPCGPNRTDLGGRDSLCPPTGSPSMITAITIMALYSIVCVVGLFGNFLVMYVIVRYTKMKTATNIYIFNLALADALATSTLPFQSVNYLMGTWPFGTILCKIVISIDYYNMFTSIFTLCTMSVDRYIAVCHPVKALDFRTPRNAKIINVCNWILSSAIGLPVMFMATTKYRQGSIDCTLTFSHPTWYWENLLKICVFIFAFIMPVLIITVCYGLMILRLKSVRMLSGSKEKDRNLRRITRMVLVVVAVFIVCWTPIHIYVIIKALVTIPETTFQTVSWHFCIALGYTNSCLNPVLYAFLDENFKRCFREFCIPTSSNIEQQNSTRIRQNTRDHPSTANTVDRTNHQGPPAKFVADQLAGSS

SEQ ID NO: 4601 - protein, 418 aa, Homo sapiens
MDSSAAPTNASNCTDALAYSSCSPAPSPGSWVNLSHLDGNLSDPCGPNRTDLGGRDSLCPPTGSPSMITAITIMALYSIVCVVGLFGNFLVMYVIVRYTKMKTATNIYIFNLALADALATSTLPFQSVNYLMGTWPFGTILCKIVISIDYYNMFTSIFTLCTMSVDRYIAVCHPVKALDFRTPRNAKIINVCNWILSSAIGLPVMFMATTKYRQGSIDCTLTFSHPTWYWENLLKICVFIFAFIMPVLIITVCYGLMILRLKSVRMLSGSKEKDRNLRRITRMVLVVVAVFIVCWTPIHIYVIIKALVTIPETTFQTVSWHFCIALGYTNSCLNPVLYAFLDENFKRCFREFCIPTSSNIEQQNSTRIRQNTRDHPSTANTVDRTNHQPPLAVSMAQIFTRYPPPTHREKTCNDYMKR

SEQ ID NO: 4602 - protein, 402 aa, Homo sapiens
MDSSAAPTNASNCTDALAYSSCSPAPSPGSWVNLSHLDGNLSDPCGPNRTDLGGRDSLCPPTGSPSMITAITIMALYSIVCVVGLFGNFLVMYVIVRYTKMKTATNIYIFNLALADALATSTLPFQSVNYLMGTWPFGTILCKIVISIDYYNMFTSIFTLCTMSVDRYIAVCHPVKALDFRTPRNAKIINVCNWILSSAIGLPVMFMATTKYRQGSIDCTLTFSHPTWYWENLLKICVFIFAFIMPVLIITVCYGLMILRLKSVRMLSGSKEKDRNLRRITRMVLVVVAVFIVCWTPIHIYVIIKALVTIPETTFQTVSWHFCIALGYTNSCLNPVLYAFLDENFKRCFREFCIPTSSNIEQQNSTRIRQNTRDHPSTANTVDRTNHQIRDPISNLPRVSVF

SEQ ID NO: 4603 - protein, 406 aa, Homo sapiens
MDSSAAPTNASNCTDALAYSSCSPAPSPGSWVNLSHLDGNLSDPCGPNRTDLGGRDSLCPPTGSPSMITAITIMALYSIVCVVGLFGNFLVMYVIVRYTKMKTATNIYIFNLALADALATSTLPFQSVNYLMGTWPFGTILCKIVISIDYYNMFTSIFTLCTMSVDRYIAVCHPVKALDFRTPRNAKIINVCNWILSSAIGLPVMFMATTKYRQGSIDCTLTFSHPTWYWENLLKICVFIFAFIMPVLIITVCYGLMILRLKSVRMLSGSKEKDRNLRRITRMVLVVVAVFIVCWTPIHIYVIIKALVTIPETTFQTVSWHFCIALGYTNSCLNPVLYAFLDENFKRCFREFCIPTSSNIEQQNSTRIRQNTRDHPSTANTVDRTNHQKIDLFQKSSLLNCEHTKG

SEQ ID NO: 4604 - protein, 397 aa, Homo sapiens
MDSSAAPTNASNCTDALAYSSCSPAPSPGSWVNLSHLDGNLSDPCGPNRTDLGGRDSLCPPTGSPSMITAITIMALYSIVCVVGLFGNFLVMYVIVRYTKMKTATNIYIFNLALADALATSTLPFQSVNYLMGTWPFGTILCKIVISIDYYNMFTSIFTLCTMSVDRYIAVCHPVKALDFRTPRNAKIINVCNWILSSAIGLPVMFMATTKYRQGSIDCTLTFSHPTWYWENLLKICVFIFAFIMPVLIITVCYGLMILRLKSVRMLSGSKEKDRNLRRITRMVLVVVAVFIVCWTPIHIYVIIKALVTIPETTFQTVSWHFCIALGYTNSCLNPVLYAFLDENFKRCFREFCIPTSSNIEQQNSTRIRQNTRDHPSTANTVDRTNHQRERRQKSDW

SEQ ID NO: 4605 - protein, 420 aa, Homo sapiens
MDSSAAPTNASNCTDALAYSSCSPAPSPGSWVNLSHLDGNLSDPCGPNRTDLGGRDSLCPPTGSPSMITAITIMALYSIVCVVGLFGNFLVMYVIVRYTKMKTATNIYIFNLALADALATSTLPFQSVNYLMGTWPFGTILCKIVISIDYYNMFTSIFTLCTMSVDRYIAVCHPVKALDFRTPRNAKIINVCNWILSSAIGLPVMFMATTKYRQGSIDCTLTFSHPTWYWENLLKICVFIFAFIMPVLIITVCYGLMILRLKSVRMLSGSKEKDRNLRRITRMVLVVVAVFIVCWTPIHIYVIIKALVTIPETTFQTVSWHFCIALGYTNSCLNPVLYAFLDENFKRCFREFCIPTSSNIEQQNSTRIRQNTRDHPSTANTVDRTNHQVELNLDCHCENAKPWPLSYNAGQSPFPFPGRV

SEQ ID NO: 4606 - protein, 493 aa, Homo sapiens
MCLHRRVPSEETYSLDRFAQNPPLFPPPSLPASESRMAHAPLLQRCGAARTGFCKKQQELWQRRKEAAEALGTRKVSVLLATSHSGARPAVSTMDSSAAPTNASNCTDALAYSSCSPAPSPGSWVNLSHLDGNLSDPCGPNRTDLGGRDSLCPPTGSPSMITAITIMALYSIVCVVGLFGNFLVMYVIVRYTKMKTATNIYIFNLALADALATSTLPFQSVNYLMGTWPFGTILCKIVISIDYYNMFTSIFTLCTMSVDRYIAVCHPVKALDFRTPRNAKIINVCNWILSSAIGLPVMFMATTKYRQGSIDCTLTFSHPTWYWENLLKICVFIFAFIMPVLIITVCYGLMILRLKSVRMLSGSKEKDRNLRRITRMVLVVVAVFIVCWTPIHIYVIIKALVTIPETTFQTVSWHFCIALGYTNSCLNPVLYAFLDENFKRCFREFCIPTSSNIEQQNSTRIRQNTRDHPSTANTVDRTNHQLENLEAETAPLP

SEQ ID NO: 4607 - protein, 389 aa, Homo sapiens
MDSSAAPTNASNCTDALAYSSCSPAPSPGSWVNLSHLDGNLSDPCGPNRTDLGGRDSLCPPTGSPSMITAITIMALYSIVCVVGLFGNFLVMYVIVRYTKMKTATNIYIFNLALADALATSTLPFQSVNYLMGTWPFGTILCKIVISIDYYNMFTSIFTLCTMSVDRYIAVCHPVKALDFRTPRNAKIINVCNWILSSAIGLPVMFMATTKYRQGSIDCTLTFSHPTWYWENLLKICVFIFAFIMPVLIITVCYGLMILRLKSVRMLSGSKEKDRNLRRITRMVLVVVAVFIVCWTPIHIYVIIKALVTIPETTFQTVSWHFCIALGYTNSCLNPVLYAFLDENFKRCFREFCIPTSSNIEQQNSTRIRQNTRDHPSTANTVDRTNHQS

SEQ ID NO: 4608 - protein, 300 aa, Homo sapiens
MKTATNIYIFNLALADALATSTLPFQSVNYLMGTWPFGTILCKIVISIDYYNMFTSIFTLCTMSVDRYIAVCHPVKALDFRTPRNAKIINVCNWILSSAIGLPVMFMATTKYRQGSIDCTLTFSHPTWYWENLLKICVFIFAFIMPVLIITVCYGLMILRLKSVRMLSGSKEKDRNLRRITRMVLVVVAVFIVCWTPIHIYVIIKALVTIPETTFQTVSWHFCIALGYTNSCLNPVLYAFLDENFKRCFREFCIPTSSNIEQQNSTRIRQNTRDHPSTANTVDRTNHQLENLEAETAPLP

SEQ ID NO: 4609 - protein, 319 aa, Homo sapiens
MMRAKSISTKAGKPSRYTKMKTATNIYIFNLALADALATSTLPFQSVNYLMGTWPFGTILCKIVISIDYYNMFTSIFTLCTMSVDRYIAVCHPVKALDFRTPRNAKIINVCNWILSSAIGLPVMFMATTKYRQGSIDCTLTFSHPTWYWENLLKICVFIFAFIMPVLIITVCYGLMILRLKSVRMLSGSKEKDRNLRRITRMVLVVVAVFIVCWTPIHIYVIIKALVTIPETTFQTVSWHFCIALGYTNSCLNPVLYAFLDENFKRCFREFCIPTSSNIEQQNSTRIRQNTRDHPSTANTVDRTNHQLENLEAETAPLP

SEQ ID NO: 4610 - protein, 314 aa, Homo sapiens
MKTATNIYIFNLALADALATSTLPFQSVNYLMGTWPFGTILCKIVISIDYYNMFTSIFTLCTMSVDRYIAVCHPVKALDFRTPRNAKIINVCNWILSSAIGLPVMFMATTKYRQGSIDCTLTFSHPTWYWENLLKICVFIFAFIMPVLIITVCYGLMILRLKSVRMLSGSKEKDRNLRRITRMVLVVVAVFIVCWTPIHIYVIIKALVTIPETTFQTVSWHFCIALGYTNSCLNPVLYAFLDENFKRCFREFCIPTSSNIEQQNSTRIRQNTRDHPSTANTVDRTNHQNYYIIHRCCCNTPLISQKPVLLWFCD

SEQ ID NO: 4611 - protein, 292 aa, Homo sapiens
MKTATNIYIFNLALADALATSTLPFQSVNYLMGTWPFGTILCKIVISIDYYNMFTSIFTLCTMSVDRYIAVCHPVKALDFRTPRNAKIINVCNWILSSAIGLPVMFMATTKYRQGSIDCTLTFSHPTWYWENLLKICVFIFAFIMPVLIITVCYGLMILRLKSVRMLSGSKEKDRNLRRITRMVLVVVAVFIVCWTPIHIYVIIKALVTIPETTFQTVSWHFCIALGYTNSCLNPVLYAFLDENFKRCFREFCIPTSSNIEQQNSTRIRQNTRDHPSTANTVDRTNHQVRSL

SEQ ID NO: 4612 - protein, 128 aa, Homo sapiens
MDSSAAPTNASNCTDALAYSSCSPAPSPGSWVNLSHLDGNLSDPCGPNRTDLGGRDSLCPPTGSPSMITAITIMALYSIVCVVGLFGNFLVMYVIVRYSWFVIGGPEGRRKQRRLGEDKRARGCGEKG

SEQ ID NO: 4613 - protein, 101 aa, Homo sapiens
MDSSAAPTNASNCTDALAYSSCSPAPSPGSWVNLSHLDGNLSDPCGPNRTDLGGRDSLCPPTGSPSMITAITIMALYSIVCVVGLFGNFLVMYVIVSSSWF

SEQ ID NO: 4614 - protein, 186 aa, Homo sapiens
MDSSAAPTNASNCTDALAYSSCSPAPSPGSWVNLSHLDGNLSDPCGPNRTDLGGRDSLCPPTGSPSMITAITIMALYSIVCVVGLFGNFLVMYVIVRFHRLYTNILSSNLVLGKPAEDLCFHLRLHYASAHHYRVLWTDDLAPQECPHALWLQRKGQESSKDHQDGAGGGGCVHRLLDSHSHLRHH

SEQ ID NO: 4615 - protein, 644 aa, Homo sapiens
MNAAASSYPMASLYVGDLHSDVTEAMLYEKFSPAGPVLSIRVCRDMITRRSLGYAYVNFQQPADAERALDTMNFDVIKGKPIRIMWSQRDPSLRKSGVGNVFIKNLDKSIDNKALYDTFSAFGNILSCKVVCDENGSKGYAFVHFETQEAADKAIEKMNGMLLNDRKVFVGRFKSRKEREAELGAKAKEFTNVYIKNFGEEVDDESLKELFSQFGKTLSVKVMRDPNGKSKGFGFVSYEKHEDANKAVEEMNGKEISGKIIFVGRAQKKVERQAELKRKFEQLKQERISRYQGVNLYIKNLDDTIDDEKLRKEFSPFGSITSAKVMLEDGRSKGFGFVCFSSPEEATKAVTEMNGRIVGSKPLYVALAQRKEERKAHLTNQYMQRVAGMRALPANAILNQFQPAAGGYFVPAVPQAQGRPPYYTPNQLAQMRPNPRWQQGGRPQGFQGMPSAIRQSGPRPTLRHLAPTGSECPDRLAMDFGGAGAAQQGLTDSCQSGGVPTAVQNLAPRAAVAAAAPRAVAPYKYASSVRSPHPAIQPLQAPQPAVHVQGQEPLTASMLAAAPPQEQKQMLGERLFPLIQTMHSNLAGKITGMLLEIDNSELLHMLESPESLRSKVDEAVAVLQAHHAKKEAAQKVGAVAAATS

SEQ ID NO: 4616 - protein, 631 aa, Homo sapiens
MNAAASSYPMASLYVGDLHSDVTEAMLYEKFSPAGPVLSIRVCRDMITRRSLGYAYVNFQQPADAERALDTMNFDVIKGKPIRIMWSQRDPSLRKSGVGNVFIKNLDKSIDNKALYDTFSAFGNILSCKVVCDENGSKGYAFVHFETQEAADKAIEKMNGMLLNDRKVFVGRFKSRKEREAELGAKAKEFTNVYIKNFGEEVDDESLKELFSQFGKTLSVKVMRDPNGKSKGFGFVSYEKHEDANKAVEEMNGKEISGKIIFVGRAQKKVERQAELKRKFEQLKQERISRYQGVNLYIKNLDDTIDDEKLRKEFSPFGSITSAKVMLEDGRSKGFGFVCFSSPEEATKAVTEMNGRIVGSKPLYVALAQRKEERKAHLTNQYMQRVAGMRALPANAILNQFQPAAGGYFVPAVPQAQGRPPYYTPNQLAQMRPNPRWQQGGRPQGFQGMPSAIRQSGPRPTLRHLAPTGNAPASRGLPTTTQRVGVPTAVQNLAPRAAVAAAAPRAVAPYKYASSVRSPHPAIQPLQAPQPAVHVQGQEPLTASMLAAAPPQEQKQMLGERLFPLIQTMHSNLAGKITGMLLEIDNSELLHMLESPESLRSKVDEAVAVLQAHHAKKEAAQKVGAVAAATS

SEQ ID NO: 4617 - protein, 660 aa, Homo sapiens
MNAAASSYPMASLYVGDLHSDVTEAMLYEKFSPAGPVLSIRVCRDMITRRSLGYAYVNFQQPADAERALDTMNFDVIKGKPIRIMWSQRDPSLRKSGVGNVFIKNLDKSIDNKALYDTFSAFGNILSCKVVCDENGSKGYAFVHFETQEAADKAIEKMNGMLLNDRKVFVGRFKSRKEREAELGAKAKEFTNVYIKNFGEEVDDESLKELFSQFGKTLSVKVMRDPNGKSKGFGFVSYEKHEDANKAVEEMNGKEISGKIIFVGRAQKKVERQAELKRKFEQLKQERISRYQGVNLYIKNLDDTIDDEKLRKEFSPFGSITSAKVMLEDGRSKGFGFVCFSSPEEATKAVTEMNGRIVGSKPLYVALAQRKEERKAHLTNQYMQRVAGMRALPANAILNQFQPAAGGYFVPAVPQAQGRPPYYTPNQLAQMRPNPRWQQGGRPQGFQGMPSAIRQSGPRPTLRHLAPTGNAPASRGLPTTTQRVGSECPDRLAMDFGGAGAAQQGLTDSCQSGGVPTAVQNLAPRAAVAAAAPRAVAPYKYASSVRSPHPAIQPLQAPQPAVHVQGQEPLTASMLAAAPPQEQKQMLGERLFPLIQTMHSNLAGKITGMLLEIDNSELLHMLESPESLRSKVDEAVAVLQAHHAKKEAAQKVGAVAAATS

SEQ ID NO: 4618 - protein, 354 aa, Homo sapiens
MMSYLKQPPYGMNGLGLAGPAMDLLHPSVGYPATPRKQRRERTTFTRSQLDVLEALFAKTRYPDIFMREEVALKINLPESRVQVWFKNRRAKCRQQQQSGSGTKSRPAKKKSSPVRESSGSESSGQFTPPAVSSSASSSSSASSSSANPAAAAAAGLGGNPVAAASSLSTPAASSIWSPASISPGSAPASVSVPEPLAAPSNTSCMQRSVAAGAATAAASYPMSYGQGGSYGQGYPTPSSSYFGGVDCSSYLAPMHSHHHPHQLSPMAPSSMAGHHHHHPHAHHPLSQSSGHHHHHHHHHHQGYGGSGLAFNSADCLDYKEPGAAAASSAWKLNFNSPDCLDYKDQASWRFQVL

SEQ ID NO: 4619 - protein, 445 aa, Homo sapiens
METRTEDGGLTRRPTLASSWDVAGGALTHSLLLTRAGLGPGDFDWEELLAPPAPGQDLVILKRNHNNKDENPCFLYLRCGPDGGEEIASIGILSSARNMEVYLGEEYCGTSRGKNVCTVLDDSEHEKIILYKKNLKLESSTHACKIKLLSFGERQCVFISKVVVHMRSVFANSSTSSPALGSRIDLDKVQTIMESMGSKLSPGAQQLMDMVRCQQRNCIPIGEQLQSVLGNSGYKHMIGLQSSSTLGTLNKSSSTPFPFRTGLTSGNVTENLQTYIDKSTQLPGGENSTKLDECKVMPQNHSFLENDLKNAMASFLPKKVSDNSNIPNSELLPFLQNLCSQVNHLHVGNKTECQENITKHGERILGVGMEEQSICSYLEKILSKNMELMEKKLMDYIDQRIHELQEHIDDKIALLLDLLQNPNSPPTGIPLRHYDSGERLSNGER

SEQ ID NO: 4620 - protein, 392 aa, Homo sapiens
MAAPLRIQSDWAQALRKDEGEAWLSCHPPGKPSLYGSLTCQGIGLDGIPEVTASEGFTVNEINKKSIHISCPKENASSKFLAPYTTFSRIHTKSITCLDISSRGGLGVSSSTDGTMKIWQASNGELRRVLEGHVFDVNCCRFFPSGLVVLSGGMDAQLKIWSAEDASCVVTFKGHKGGILDTAIVDRGRNVVSASRDGTARLWDCGRSACLGVLADCGSSINGVAVGAADNSINLGSPEQMPSEREVGTEAKMLLLAREDKKLQCLGLQSRQLVFLFIGSDAFNCCTFLSGFLLLAGTQDGNIYQLDVRSPRAPVQVIHRSGAPVLSLLSVRDGFIASQGDGSCFIVQQDLDYVTELTGADCDPVYKVATWEKQIYTCCRDGLVRRYQLSDL

SEQ ID NO: 4621 - protein, 375 aa, Homo sapiens
MLVPCFLYSLQNRKPSLYGSLTCQGIGLDGIPEVTASEGFTVNEINKKSIHISCPKENASSKFLAPYTTFSRIHTKSITCLDISSRGGLGVSSSTDGTMKIWQASNGELRRVLEGHVFDVNCCRFFPSGLVVLSGGMDAQLKIWSAEDASCVVTFKGHKGGILDTAIVDRGRNVVSASRDGTARLWDCGRSACLGVLADCGSSINGVAVGAADNSINLGSPEQMPSEREVGTEAKMLLLAREDKKLQCLGLQSRQLVFLFIGSDAFNCCTFLSGFLLLAGTQDGNIYQLDVRSPRAPVQVIHRSGAPVLSLLSVRDGFIASQGDGSCFIVQQDLDYVTELTGADCDPVYKVATWEKQIYTCCRDGLVRRYQLSDL

SEQ ID NO: 4622 - protein, 277 aa, Homo sapiens
MKIWQASNGELRRVLEGHVFDVNCCRFFPSGLVVLSGGMDAQLKIWSAEDASCVVTFKGHKGGILDTAIVDRGRNVVSASRDGTARLWDCGRSACLGVLADCGSSINGVAVGAADNSINLGSPEQMPSEREVGTEAKMLLLAREDKKLQCLGLQSRQLVFLFIGSDAFNCCTFLSGFLLLAGTQDGNIYQLDVRSPRAPVQVIHRSGAPVLSLLSVRDGFIASQGDGSCFIVQQDLDYVTELTGADCDPVYKVATWEKQIYTCCRDGLVRRYQLSDL

SEQ ID NO: 4623 - protein, 453 aa, Homo sapiens
MDWKEVLRRRLATPNTCPNKKKSEQELKDEEMDLFTKYYSEWKGGRKNTNEFYKTIPRFYYRLPAEDEVLLQKLREESRAVFLQRKSRELLDNEELQNLWFLLDKHQTPPMIGEEAMINYENFLKVGEKAGAKCKQFFTAKVFAKLLHTDSYGRISIMQFFNYVMRKVWLHQTRIGLSLYDVAGQGYLRESDLENYILELIPTLPQLDGLEKSFYSFYVCTAVRKFFFFLDPLRTGKIKIQDILACSFLDDLLELRDEELSKESQETNWFSAPSALRVYGQYLNLDKDHNGMLSKEELSRYGTATMTNVFLDRVFQECLTYDGEMDYKTYLDFVLALENRKEPAALQYIFKLLDIENKGYLNVFSLNYFFRAIQELMKIHGQDPVSFQDVKDEIFDMVKPKDPLKISLQDLINSNQGDTVTTILIDLNGFWTYENREALVANDSENSADLDDT

SEQ ID NO: 4624 - protein, 343 aa, Homo sapiens
MIGEEAMINYENFLKVGEKAGAKCKQFFTAKVFAKLLHTDSYGRISIMQFFNYVMRKVWLHQTRIGLSLYDVAGQGYLRESDLENYILELIPTLPQLDGLEKSFYSFYVCTAVRKFFFFLDPLRTGKIKIQDILACSFLDDLLELRDEELSKESQETNWFSAPSALRVYGQYLNLDKDHNGMLSKEELSRYGTATMTNVFLDRVFQECLTYDGEMDYKTYLDFVLALENRKEPAALQYIFKLLDIENKGYLNVFSLNYFFRAIQELMKIHGQDPVSFQDVKDEIFDMVKPKDPLKISLQDLINSNQGDTVTTILIDLNGFWTYENREALVANDSENSADLDDT

SEQ ID NO: 4625 - protein, 376 aa, Homo sapiens
MNRSFHKSQTLRFYDCSAVEVKSKFGAEFRRFSLDRHKPGKFEDFYKLVVHTHHISNSDVTIGYADVHGDLLPINNDDNFCKAVSSANPLLRVFIQKREEAERGSLGAGSLCRRRRALGALRDEGPRRRAHLDIGLPRDFRPVSSIIDVDLVPETHRRVRLHRHGCEKPLGFYIRDGASVRVTPHGLEKVPGIFISRMVPGGLAESTGLLAVNDEVLEVNGIEVAGKTLDQVTDMMIANSHNLIVTVKPANQRNNVVRGGRALGSSGPPSDGTAGFVGPPAPRVLQNFHPDEAESDEDNDVVIEGTLEPARPPQTPGAPAGSLSRVNGAGLAQRLQRDLALDGGLQRLLSSLRADPRHSLALPPGGVEEHGPAVTL

SEQ ID NO: 4626 - protein, 107 aa, Homo sapiens
MNRSFHKSQTLRFYDCSAVEVKSKFGAEFRRFSLDRHKPGKFEDFYKLVVHTHHISNSDVTIGYADVHGDLLPINNDDNFCKAVSSANPLLRVFIQKRDDGALRPGT

SEQ ID NO: 4627 - protein, 397 aa, Homo sapiens
MRSPSAAWLLGAAILLAASLSCSGTIQGTNRSSKGRSLIGKVDGTSHVTGKGVTVETVFSVDEFSASVLTGKLTTVFLPIVYTIVFVVGLPSNGMALWVFLFRTKKKHPAVIYMANLALADLLSVIWFPLKIAYHIHGNNWIYGEALCNVLIGFFYGNMYCSILFMTCLSVQRYWVIVNPMGHSRKKANIAIGISLAIWLLILLVTIPLYVVKQTIFIPALNITTCHDVLPEQLLVGDMFNYFLSLAIGVFLFPAFLTASAYVLMIRMLRSSAMDENSEKKRKRAIKLIVTVLAMYLICFTPSNLLLVVHYFLIKSQGQSHVYALYIVALCLSTLNSCIDPFVYYFVSHDFRDHAKNALLCRSVRTVKQMQVSLTSKKHSRKSSSYSSSSTTVKTSY

SEQ ID NO: 4628 - protein, 1184 aa, Homo sapiens
MMQLLQLLLGLLGPGGYLFLLGDCQEVTTLTVKYQVSEEVPSGTVIGKLSQELGREERRRQAGAAFQVLQLPQALPIQVDSEEGLLSTGRRLDREQLCRQWDPCLVSFDVLATGDLALIHVEIQVLDINDHQPRFPKGEQELEISESASLRTRIPLDRALDPDTGPNTLHTYTLSPSEHFALDVIVGPDETKHAELIVVKELDREIHSFFDLVLTAYDNGNPPKSGTSLVKVNVLDSNDNSPAFAESSLALEIQEDAAPGTLLIKLTATDPDQGPNGEVEFFLSKHMPPEVLDTFSIDAKTGQVILRRPLDYEKNPAYEVDVQARDLGPNPIPAHCKVLIKVLDVNDNIPSIHVTWASQPSLVSEALPKDSFIALVMADDLDSGHNGLVHCWLSQELGHFRLKRTNGNTYMLLTNATLDREQWPKYTLTLLAQDQGLQPLSAKKQLSIQISDINDNAPVFEKSRYEVSTRENNLPSLHLITIKAHDADLGINGKVSYRIQDSPVAHLVAIDSNTGEVTAQRSLNYEEMAGFEFQVIAEDSGQPMLASSVSVWVSLLDANDNAPEVVQPVLSDGKASLSVLVNASTGHLLVPIETPNGLGPAGTDTPPLATHSSRPFLLTTIVARDADSGANGEPLYSIRSGNEAHLFILNPHTGQLFVNVTNASSLIGSEWELEIVVEDQGSPPLQTRALLRVMFVTSVDHLRDSARKPGALSMSMLTVICLAVLLGIFGLILALFMSICRTEKKDNRAYNCREAESTYRQQPKRPQKHIQKADIHLVPVLRGQAGEPCEVGQSHKDVDKEAMMEAGWDPCLQAPFHLTPTLYRTLRNQGNQGAPAESREVLQDTVNLLFNHPRQRNASRENLNLPEPQPATGQPRSRPLKVAGSPTGRLAGDQGSEEAPQRPPASSATLRRQRHLNGKVSPEKESGPRQILRSLVRLSVAAFAERNPVEELTVDSPPVQQISQLLSLLHQGQFQPKPNHRGNKYLAKPGGSRSAIPDTDGPSARAGGQTDPEQEEGPLDPEEDLSVKQLLEEELSSLLDPSTGLALDRLSAPDPAWMARLSLPLTTNYRDNVISPDAAATEEPRTFQTFGKAEAPELSPTGTRLASTFVSEMSSLLEMLLEQRSSMPVEAASEALRRLSVCGRTLSLDLATSAASGMKVQGDPGGKTGTEGKSRGSSSSSRCL

SEQ ID NO: 4629 - protein, 631 aa, Homo sapiens
MNPSTPSYPTASLYVGDLHPDVTEAMLYEKFSPAGPILSIRICRDLITSGSSNYAYVNFQHTKDAEHALDTMNFDVIKGKPVRIMWSQRDPSLRKSGVGNIFVKNLDKSINNKALYDTVSAFGNILSCNVVCDENGSKGYGFVHFETHEAAERAIKKMNGMLLNGRKVFVGQFKSRKEREAELGARAKEFPNVYIKNFGEDMDDERLKDLFGKFGPALSVKVMTDESGKSKGFGFVSFERHEDAQKAVDEMNGKELNGKQIYVGRAQKKVERQTELKRTFEQMKQDRITRYQVVNLYVKNLDDGIDDERLRKAFSPFGTITSAKVMMEGGRSKGFGFVCFSSPEEATKAVTEMNGRIVATKPLYVALAQRKEERQAYLTNEYMQRMASVRAVPNQRAPPSGYFMTAVPQTQNHAAYYPPSQIARLRPSPRWTAQGARPHPFQNKPSAIRPGAPRVPFSTMRPASSQVPRVMSTQRVANTSTQTVGPRPAAAAAAAATPAVRTVPRYKYAAGVRNPQQHRNAQPQVTMQQLAVHVQGQETLTASRLASAPPQKQKQMLGERLFPLIQAMHPTLAGKITGMLLEIDNSELLYMLESPESLRSKVDEAVAVLQAHQAKEATQKAVNSATGVPTV

SEQ ID NO: 4630 - protein, 377 aa, Homo sapiens
MAADLGPWNDTINGTWDGDELGYRCRFNEDFKYVLLPVSYGVVCVPGLCLNAVALYIFLCRLKTWNASTTYMFHLAVSDALYAASLPLLVYYYARGDHWPFSTVLCKLVRFLFYTNLYCSILFLTCISVHRCLGVLRPLRSLRWGRARYARRVAGAVWVLVLACQAPVLYFVTTSARGGRVTCHDTSAPELFSRFVAYSSVMLGLLFAVPFAVILVCYVLMARRLLKPAYGTSGGLPRAKRKSVRTIAVVLAVFALCFLPFHVTRTLYYSFRSLDLSCHTLNAINMAYKVTRPLASANSCLDPVLYFLAGQRLVRFARDAKPPTGPSPATPARRRLGLRRSDRTDMQRIEDVLGSSEDSRRTESTPAGSENTKDIRL

SEQ ID NO: 4631 - protein, 948 aa, Homo sapiens
MVSRCSCLGVQCLLLSLLLLAAWEVGSGQLHYSVYEEARHGTFVGRIAQDLGLELAELVQRLFRVASKRHGDLLEVNLQNGILFVNSRIDREELCGRSVECSIHLEVIVDRPLQVFHVDVEVKDINDNPPRFSVTEQKLSIPESRLLDSRFPLEGASDADVGENALLTYKLSPNEYFVLDIINKKDKDKFPVLVLRKLLDREENPQLKLLLTATDGGKPEFTGSVSLLILVLDANDNAPIFDRPVYEVKMYENQVNQTLVIRLNASDSDEGINKEMMYSFSSLVPPTIRRKFWINERTGEIKVNDAIDFEDSNTYEIHVDVTDKGNPPMVGHCTVLVELLDENDNSPEVIVTSLSLPVKEDAQVGTVIALISVSDHDSGANGQVTCSLTPHVPFKLVSTYKNYYSLVLDSALDRERVSAYELVVTARDGGSPPLWATASVSVEVADVNDNAPAFAQSEYTVFVKENNPPGCHIFTVSAWDADAQENALVSYSLVERRLGERSLSSYVSVHAESGKVYALQPLDHEELELLQFQVSARDGGVPPLGSNLTLQVFVLDENDNAPALLASPAGSAGGAVSELVLRSVVAGHVVAKVRAVDADSGYNAWLSYELQSAAVGARIPFRVGLYTGEISTTRALDETDSPRQRLLVLVKDHGEPSLTATATVLVSLVEGSQAPKASSRASVGVAPEVALVDVNVYLIIAICAVSSLLVLTLLLYTALRCSAAPTEGACGPVKPTLVCSSAVGSWSYSQQRRQRVCSGEGLPKADLMAFSPSLPPCPMVDVDGEDQSIGGDHSRKPRQPNPDWRYSASLRAGMHSSVHLEEAGILRAGPGGPDQQWPTVSSATPEPEAGEVSPPVGAGVNSNSWTFKYGPGNPKQSGPGELPDKFIIPGSPAIISIRQEPTNSQIDKSDFITFGKKEETKKKKKKKKGNKTQEKKEKGNSTTDNSDQ

SEQ ID NO: 4632 - protein, 685 aa, Homo sapiens
MVSRCSCLGVQCLLLSLLLLAAWEVGSGQLHYSVYEEARHGTFVGRIAQDLGLELAELVQRLFRVASKRHGDLLEVNLQNGILFVNSRIDREELCGRSVECSIHLEVIVDRPLQVFHVDVEVKDINDNPPRFSVTEQKLSIPESRLLDSRFPLEGASDADVGENALLTYKLSPNEYFVLDIINKKDKDKFPVLVLRKLLDREENPQLKLLLTATDGGKPEFTGSVSLLILVLDANDNAPIFDRPVYEVKMYENQVNQTLVIRLNASDSDEGINKEMMYSFSSLVPPTIRRKFWINERTGEIKVNDAIDFEDSNTYEIHVDVTDKGNPPMVGHCTVLVELLDENDNSPEVIVTSLSLPVKEDAQVGTVIALISVSDHDSGANGQVTCSLTPHVPFKLVSTYKNYYSLVLDSALDRERVSAYELVVTARDGGSPPLWATASVSVEVADVNDNAPAFAQSEYTVFVKENNPPGCHIFTVSAWDADAQENALVSYSLVERRLGERSLSSYVSVHAESGKVYALQPLDHEELELLQFQPRQPNPDWRYSASLRAGMHSSVHLEEAGILRAGPGGPDQQWPTVSSATPEPEAGEVSPPVGAGVNSNSWTFKYGPGNPKQSGPGELPDKFIIPGSPAIISIRQEPTNSQIDKSDFITFGKKEETKKKKKKKKGNKTQEKKEKGNSTTDNSDQ

SEQ ID NO: 4633 - protein, 844 aa, Homo sapiens
MVSRCSCLGVQCLLLSLLLLAAWEVGSGQLHYSVYEEARHGTFVGRIAQDLGLELAELVQRLFRVASKRHGDLLEVNLQNGILFVNSRIDREELCGRSVECSIHLEVIVDRPLQVFHVDVEVKDINDNPPRFSVTEQKLSIPESRLLDSRFPLEGASDADVGENALLTYKLSPNEYFVLDIINKKDKDKFPVLVLRKLLDREENPQLKLLLTATDGGKPEFTGSVSLLILVLDANDNAPIFDRPVYEVKMYENQVNQTLVIRLNASDSDEGINKEMMYSFSSLVPPTIRRKFWINERTGEIKVNDAIDFEDSNTYEIHVDVTDKGNPPMVGHCTVLVELLDENDNSPEVIVTSLSLPVKEDAQVGTVIALISVSDHDSGANGQVTCSLTPHVPFKLVSTYKNYYSLVLDSALDRERVSAYELVVTARDGGSPPLWATASVSVEVADVNDNAPAFAQSEYTVFVKENNPPGCHIFTVSAWDADAQENALVSYSLVERRLGERSLSSYVSVHAESGKVYALQPLDHEELELLQFQVSARDGGVPPLGSNLTLQVFVLDENDNAPALLASPAGSAGGAVSELVLRSVVAGHVVAKVRAVDADSGYNAWLSYELQSAAVGARIPFRVGLYTGEISTTRALDETDSPRQRLLVLVKDHGEPSLTATATVLVSLVEGSQAPKASSRASVGVAPEVALVDVNVYLIIAICAVSSLLVLTLLLYTALRCSAAPTEGACGPVKPTLVCSSAVGSWSYSQQRRQRVCSGEGLPKADLMAFSPSLPPCPMVDVDGEDQSIGGDHSRKVGYYVFIFLLCFMNNIFSYRIFSNMYQNISFLSTFHLCLNISSDTFVI

SEQ ID NO: 4634 - protein, 950 aa, Homo sapiens
MVFSRRGGLGARDLLLWLLLLAAWEVGSGQLHYSIPEEAKHGTFVGRVAQDLGLELAELVPRLFRVASKTHRDLLEVNLQNGILFVNSRIDREELCQWSAECSIHLELIADRPLQVFHVEVKVKDINDNPPVFRGREQIIFIPESRLLNSRFPIEGAADADIGANALLTYTLSPSDYFSLDVEASDELSKSLWLELRKYLDREETPELHLLLTATDGGKPELQGTVELLITVLDVNDNAPLFDQAVYRVHLLETTANGTLVTTLNASDADEGVNGEVVFSFDSGISRDIQEKFKVDSSSGEIRLIDKLDYEETKSYEIQVKAVDKGSPPMSNHCKVLVKVLDVNDNAPELAVTSLYLPIREDAPLSTVIALITVSDRDSGANGQVTCSLMPHVPFKLVSTFKNYYSLVLDSALDRESLSVYELVVTARDGGSPSLWATARVSVEVADVNDNAPAFAQPEYTVFVKENNPPGCHIFTVSARDADAQENALVSYSLVERRVGERALSNYVSVHAESGKVYALQPLDHEELELLQFQVSARDAGVPPLGSNVTLQVFVLDENDNAPALLAPRVGGTIGAVSELVPRLVGAGHVVAKVRAVDADSGYNAWLSYELQPAAGGARIPFRVGLYTGEISTTRVLDEADLSRYRLLVLVKDHGEPALTATATVLVSLVESGQAPKASSRASVGVAGPEAALVDVNVYLIIAICAVSSLLVLTLLLYTALRCSVPPTEGAYVPGKPTLVCSSALGSWSNSQQRRQRVCSSEGPPKTDLMAFSPGLSPSLNTSERNEQPEANLDLSGNPRQPNPDWRYSASLRAGMHSSVHLEEAGILRAGPGGPDQQWPTVSSATPEPEAGEVSPPVGAGVNSNSWTFKYGPGNPKQSGPGELPDKFIIPGSPAIISIRQEPTNSQIDKSDFITFGKKEETKKKKKKKKGNKTQEKKEKGNSTTDNSDQ

SEQ ID NO: 4635 - protein, 686 aa, Homo sapiens
MVFSRRGGLGARDLLLWLLLLAAWEVGSGQLHYSIPEEAKHGTFVGRVAQDLGLELAELVPRLFRVASKTHRDLLEVNLQNGILFVNSRIDREELCQWSAECSIHLELIADRPLQVFHVEVKVKDINDNPPVFRGREQIIFIPESRLLNSRFPIEGAADADIGANALLTYTLSPSDYFSLDVEASDELSKSLWLELRKYLDREETPELHLLLTATDGGKPELQGTVELLITVLDVNDNAPLFDQAVYRVHLLETTANGTLVTTLNASDADEGVNGEVVFSFDSGISRDIQEKFKVDSSSGEIRLIDKLDYEETKSYEIQVKAVDKGSPPMSNHCKVLVKVLDVNDNAPELAVTSLYLPIREDAPLSTVIALITVSDRDSGANGQVTCSLMPHVPFKLVSTFKNYYSLVLDSALDRESLSVYELVVTARDGGSPSLWATARVSVEVADVNDNAPAFAQPEYTVFVKENNPPGCHIFTVSARDADAQENALVSYSLVERRVGERALSNYVSVHAESGKVYALQPLDHEELELLQFQPRQPNPDWRYSASLRAGMHSSVHLEEAGILRAGPGGPDQQWPTVSSATPEPEAGEVSPPVGAGVNSNSWTFKYGPGNPKQSGPGELPDKFIIPGSPAIISIRQEPTNSQIDKSDFITFGKKEETKKKKKKKKGNKTQEKKEKGNSTTDNSDQ

SEQ ID NO: 4636 - protein, 807 aa, Homo sapiens
MVFSRRGGLGARDLLLWLLLLAAWEVGSGQLHYSIPEEAKHGTFVGRVAQDLGLELAELVPRLFRVASKTHRDLLEVNLQNGILFVNSRIDREELCQWSAECSIHLELIADRPLQVFHVEVKVKDINDNPPVFRGREQIIFIPESRLLNSRFPIEGAADADIGANALLTYTLSPSDYFSLDVEASDELSKSLWLELRKYLDREETPELHLLLTATDGGKPELQGTVELLITVLDVNDNAPLFDQAVYRVHLLETTANGTLVTTLNASDADEGVNGEVVFSFDSGISRDIQEKFKVDSSSGEIRLIDKLDYEETKSYEIQVKAVDKGSPPMSNHCKVLVKVLDVNDNAPELAVTSLYLPIREDAPLSTVIALITVSDRDSGANGQVTCSLMPHVPFKLVSTFKNYYSLVLDSALDRESLSVYELVVTARDGGSPSLWATARVSVEVADVNDNAPAFAQPEYTVFVKENNPPGCHIFTVSARDADAQENALVSYSLVERRVGERALSNYVSVHAESGKVYALQPLDHEELELLQFQVSARDAGVPPLGSNVTLQVFVLDENDNAPALLAPRVGGTIGAVSELVPRLVGAGHVVAKVRAVDADSGYNAWLSYELQPAAGGARIPFRVGLYTGEISTTRVLDEADLSRYRLLVLVKDHGEPALTATATVLVSLVESGQAPKASSRASVGVAGPEAALVDVNVYLIIAICAVSSLLVLTLLLYTALRCSVPPTEGAYVPGKPTLVCSSALGSWSNSQQRRQRVCSSEGPPKTDLMAFSPGLSPSLNTSERNEQPEANLDLSGNVSPTFEFWL

SEQ ID NO: 4637 - protein, 948 aa, Homo sapiens
MASSIRRGRGAWTRLLSLLLLAAWEVGSGQLRYSVPEEAKHGTFVGRIAQDLGLELEELVPRLFRVASKRHGDLLEVNLQNGILFVNSRIDREELCGRSAECSIHVEVIVDRPLQVFHVEVEVKDINDNPPIFPMTVKTIRFPESRLLDSRFPLEGASDADIGVNALLSYKLSSSEFFFLDIQANDELSESLSLVLGKSLDREETAEVNLLLVATDGGKPELTGTVQILIKVLDVNDNEPTFAQSVYKVKLLENTANGTLVVKLNASDADEGPNSEIVYSLGSDVSSTIQTKFTIDPISGEIRTKGKLDYEEAKSYEIQVTATDKGTPSMSGHCKISLKLVDINDNTPEVSITSLSLPISENASLGTVIALITVSDRDSGTNGHVTCSLTPHVPFKLVSTFKNYYSLVLDSALDRESVSAYELVVTARDGGSPSLWATTSVSIEVADVNDNAPAFAQPEYTVFVKENNPPGCHIFTVSAWDADAQENALVSYSLVERRVGERALSSYVSVHAESGKVYALQPLDHEEVELLQFQVSARDAGVPPLGSNVTLQVFVLDENDNAPALLAPRAGTAAGAVSELVPWSVGAGHVVAKVRAVDADSGYNAWLSYELQLGTGSARIPFRVGLYTGEISTTRALDEADSPRHRLLVLVKDHGEPALTATATVLVSLVESGQAPKASSRAWVGAAGSEATLVDVNVYLIIAICAVSSLLVLTVLLYTALRCSVPPTEGARAPGKPTLVCSSAVGSWSYSQQRRQRVCSGEDPPKTDLMAFSPSLSQGPDSAEEKQLSESEYVGKPRQPNPDWRYSASLRAGMHSSVHLEEAGILRAGPGGPDQQWPTVSSATPEPEAGEVSPPVGAGVNSNSWTFKYGPGNPKQSGPGELPDKFIIPGSPAIISIRQEPTNSQIDKSDFITFGKKEETKKKKKKKKGNKTQEKKEKGNSTTDNSDQ

SEQ ID NO: 4638 - protein, 824 aa, Homo sapiens
MASSIRRGRGAWTRLLSLLLLAAWEVGSGQLRYSVPEEAKHGTFVGRIAQDLGLELEELVPRLFRVASKRHGDLLEVNLQNGILFVNSRIDREELCGRSAECSIHVEVIVDRPLQVFHVEVEVKDINDNPPIFPMTVKTIRFPESRLLDSRFPLEGASDADIGVNALLSYKLSSSEFFFLDIQANDELSESLSLVLGKSLDREETAEVNLLLVATDGGKPELTGTVQILIKVLDVNDNEPTFAQSVYKVKLLENTANGTLVVKLNASDADEGPNSEIVYSLGSDVSSTIQTKFTIDPISGEIRTKGKLDYEEAKSYEIQVTATDKGTPSMSGHCKISLKLVDINDNTPEVSITSLSLPISENASLGTVIALITVSDRDSGTNGHVTCSLTPHVPFKLVSTFKNYYSLVLDSALDRESVSAYELVVTARDGGSPSLWATTSVSIEVADVNDNAPAFAQPEYTVFVKENNPPGCHIFTVSAWDADAQENALVSYSLVERRVGERALSSYVSVHAESGKVYALQPLDHEEVELLQFQVSARDAGVPPLGSNVTLQVFVLDENDNAPALLAPRAGTAAGAVSELVPWSVGAGHVVAKVRAVDADSGYNAWLSYELQLGTGSARIPFRVGLYTGEISTTRALDEADSPRHRLLVLVKDHGEPALTATATVLVSLVESGQAPKASSRAWVGAAGSEATLVDVNVYLIIAICAVSSLLVLTVLLYTALRCSVPPTEGARAPGKPTLVCSSAVGSWSYSQQRRQRVCSGEDPPKTDLMAFSPSLSQGPDSAEEKQLSESEYVGKVSLLLFLANSKIVLFKKFYMISTSYLDS

SEQ ID NO: 4639 - protein, 808 aa, Homo sapiens
MASSIRRGRGAWTRLLSLLLLAAWEVGSGQLRYSVPEEAKHGTFVGRIAQDLGLELEELVPRLFRVASKRHGDLLEVNLQNGILFVNSRIDREELCGRSAECSIHVEVIVDRPLQVFHVEVEVKDINDNPPIFPMTVKTIRFPESRLLDSRFPLEGASDADIGVNALLSYKLSSSEFFFLDIQANDELSESLSLVLGKSLDREETAEVNLLLVATDGGKPELTGTVQILIKVLDVNDNEPTFAQSVYKVKLLENTANGTLVVKLNASDADEGPNSEIVYSLGSDVSSTIQTKFTIDPISGEIRTKGKLDYEEAKSYEIQVTATDKGTPSMSGHCKISLKLVDINDNTPEVSITSLSLPISENASLGTVIALITVSDRDSGTNGHVTCSLTPHVPFKLVSTFKNYYSLVLDSALDRESVSAYELVVTARDGGSPSLWATTSVSIEVADVNDNAPAFAQPEYTVFVKENNPPGCHIFTVSAWDADAQENALVSYSLVERRVGERALSSYVSVHAESGKVYALQPLDHEEVELLQFQVSARDAGVPPLGSNVTLQVFVLDENDNAPALLAPRAGTAAGAVSELVPWSVGAGHVVAKVRAVDADSGYNAWLSYELQLGTGSARIPFRVGLYTGEISTTRALDEADSPRHRLLVLVKDHGEPALTATATVLVSLVESGQAPKASSRAWVGAAGSEATLVDVNVYLIIAICAVSSLLVLTVLLYTALRCSVPPTEGARAPGKPTLVCSSAVGSWSYSQQRRQRVCSGEDPPKTDLMAFSPSLSQGPDSAEEKQLSESEYVGKIWNFNLQIQLAS

SEQ ID NO: 4640 - protein, 639 aa, Homo sapiens
MEIIRSNFKSNLHKVYQAIEEADFFAIDGEFSGISDGPSVSALTNGFDTPEERYQKLKKHSMDFLLFQFGLCTFKYDYTDSKYITKSFNFYVFPKPFNRSSPDVKFVCQSSSIDFLASQGFDFNKVFRNGIPYLNQEEERQLREQYDEKRSQANGAGALSYVSPNTSKCPVTIPEDQKKFIDQVVEKIEDLLQSEENKNLDLEPCTGFQRKLIYQTLSWKYPKGIHVETLETEKKERYIVISKVDEEERKRREQQKHAKEQEELNDAVGFSRVIHAIANSGKLVIGHNMLLDVMHTVHQFYCPLPADLSEFKEMTTCVFPRLLDTKLMASTQPFKDIINNTSLAELEKRLKETPFNPPKVESAEGFPSYDTASEQLHEAGYDAYITGLCFISMANYLGSFLSPPKIHVSARSKLIEPFFNKLFLMRVMDIPYLNLEGPDLQPKRDHVLHVTFPKEWKTSDLYQLFSAFGNIQISWIDDTSAFVSLSQPEQVKIAVNTSKYAESYRIQTYAEYMGRKQEEKQIKRKWTEDSWKEADSKRLNPQCIPYTLQNHYYRNNSFTAPSTVGKRNLSPSQEEAGLEDGVSGEISDTELEQTDSCAEPLSEGRKKAKKLKRMKKELSPAGSISKNSPATLFEVPDTW

SEQ ID NO: 4641 - protein, 578 aa, Homo sapiens
MDFLLFQFGLCTFKYDYTDSKYITKSFNFYVFPKPFNRSSPDVKFVCQSSSIDFLASQGFDFNKVFRNGIPYLNQEEERQLREQYDEKRSQANGAGALSYVSPNTSKCPVTIPEDQKKFIDQVVEKIEDLLQSEENKNLDLEPCTGFQRKLIYQTLSWKYPKGIHVETLETEKKERYIVISKVDEEERKRREQQKHAKEQEELNDAVGFSRVIHAIANSGKLVIGHNMLLDVMHTVHQFYCPLPADLSEFKEMTTCVFPRLLDTKLMASTQPFKDIINNTSLAELEKRLKETPFNPPKVESAEGFPSYDTASEQLHEAGYDAYITGLCFISMANYLGSFLSPPKIHVSARSKLIEPFFNKLFLMRVMDIPYLNLEGPDLQPKRDHVLHVTFPKEWKTSDLYQLFSAFGNIQISWIDDTSAFVSLSQPEQVKIAVNTSKYAESYRIQTYAEYMGRKQEEKQIKRKWTEDSWKEADSKRLNPQCIPYTLQNHYYRNNSFTAPSTVGKRNLSPSQEEAGLEDGVSGEISDTELEQTDSCAEPLSEGRKKAKKLKRMKKELSPAGSISKNSPATLFEVPDTW

SEQ ID NO: 4642 - protein, 593 aa, Homo sapiens
MEIIRSNFKSNLHKVYQAIEEADFFAIDGEFSGISDGPSVSALTNGFDTPEERSSPDVKFVCQSSSIDFLASQGFDFNKVFRNGIPYLNQEEERQLREQYDEKRSQANGAGALSYVSPNTSKCPVTIPEDQKKFIDQVVEKIEDLLQSEENKNLDLEPCTGFQRKLIYQTLSWKYPKGIHVETLETEKKERYIVISKVDEEERKRREQQKHAKEQEELNDAVGFSRVIHAIANSGKLVIGHNMLLDVMHTVHQFYCPLPADLSEFKEMTTCVFPRLLDTKLMASTQPFKDIINNTSLAELEKRLKETPFNPPKVESAEGFPSYDTASEQLHEAGYDAYITGLCFISMANYLGSFLSPPKIHVSARSKLIEPFFNKLFLMRVMDIPYLNLEGPDLQPKRDHVLHVTFPKEWKTSDLYQLFSAFGNIQISWIDDTSAFVSLSQPEQVKIAVNTSKYAESYRIQTYAEYMGRKQEEKQIKRKWTEDSWKEADSKRLNPQCIPYTLQNHYYRNNSFTAPSTVGKRNLSPSQEEAGLEDGVSGEISDTELEQTDSCAEPLSEGRKKAKKLKRMKKELSPAGSISKNSPATLFEVPDTW

SEQ ID NO: 4643 - protein, 464 aa, Homo sapiens
MEIIRSNFKSNLHKVYQAIEEADFFAIDGEFSGISDGPSVSALTNGFDTPEERYQKLKKKERYIVISKVDEEERKRREQQKHAKEQEELNDAVGFSRVIHAIANSGKLVIGHNMLLDVMHTVHQFYCPLPADLSEFKEMTTCVFPRLLDTKLMASTQPFKDIINNTSLAELEKRLKETPFNPPKVESAEGFPSYDTASEQLHEAGYDAYITGLCFISMANYLGSFLSPPKIHVSARSKLIEPFFNKLFLMRVMDIPYLNLEGPDLQPKRDHVLHVTFPKEWKTSDLYQLFSAFGNIQISWIDDTSAFVSLSQPEQVKIAVNTSKYAESYRIQTYAEYMGRKQEEKQIKRKWTEDSWKEADSKRLNPQCIPYTLQNHYYRNNSFTAPSTVGKRNLSPSQEEAGLEDGVSGEISDTELEQTDSCAEPLSEGRKKAKKLKRMKKELSPAGSISKNSPATLFEVPDTW

SEQ ID NO: 4644 - protein, 435 aa, Homo sapiens
MAMGLMCGRRELLRLLQSGRRVHSVAGPSQWLGKPLTTRLLFPVAPCCCRPHYLFLAASGPRSLSTSAISFAEVQVQAPPVVAATPSPTAVPEVASGETADVVQTAAEQSFAELGLGSYTPVGLIQNLLEFMHVDLGLPWWGAIAACTVFARCLIFPLIVTGQREAARIHNHLPEIQKFSSRIREAKLAGDHIEYYKASSEMALYQKKHGIKLYKPLILPVTQAPIFISFFIALREMANLPVPSLQTGGLWWFQDLTVSDPIYILPLAVTATMWAVLELGAETGVQSSDLQWMRNVIRMMPLITLPITMHFPTAVFMYWLSSNLFSLVQVSCLRIPAVRTVLKIPQRVVHDLDKLPPREGFLESFKKGWKNAEMTRQLREREQRMRNQLELAARGPLRQTFTHNPLLQPGKDNPPNIPSSSSKPKSKYPWHDTLG

SEQ ID NO: 4645 - protein, 419 aa, Homo sapiens
MRGTQVHSVAGPSQWLGKPLTTRLLFPVAPCCCRPHYLFLAASGPRSLSTSAISFAEVQVQAPPVVAATPSPTAVPEVASGETADVVQTAAEQSFAELGLGSYTPVGLIQNLLEFMHVDLGLPWWGAIAACTVFARCLIFPLIVTGQREAARIHNHLPEIQKFSSRIREAKLAGDHIEYYKASSEMALYQKKHGIKLYKPLILPVTQAPIFISFFIALREMANLPVPSLQTGGLWWFQDLTVSDPIYILPLAVTATMWAVLELGAETGVQSSDLQWMRNVIRMMPLITLPITMHFPTAVFMYWLSSNLFSLVQVSCLRIPAVRTVLKIPQRVVHDLDKLPPREGFLESFKKGWKNAEMTRQLREREQRMRNQLELAARGPLRQTFTHNPLLQPGKDNPPNIPSSSSKPKSKYPWHDTLG

SEQ ID NO: 4646 - protein, 263 aa, Homo sapiens
MAMGLMCGRRELLRLLQSGRRVHSVAGPSQWLGKPLTTRLLFPVAPCCCRPHYLFLAASGPRSLSTSAISFAEVQVQAPPVVAATPSPTAVPEVASGETADVVQTAAEQSFAELGLGSYTPVGLIQNLLEFMHVDLGLPWWGAIAAFFARCLIFPLIVTGQREAARIHNHLPEIQKFSSRIREAKLAGDHIEYYKASSEMALYQKKHGIKLYKPLILPVTQVSKNISFLISSSTHEISSLCFMCPRSPKKQVVVDYTWLSVVG

SEQ ID NO: 4647 - protein, 935 aa, Homo sapiens
MANRLQRGDRSRLLLLLCIFLGTLRGFRARQIRYSVPEETEKGSFVGNISKDLGLEPRELAKRGVRIVSRGKTQLFAVNPRSGSLITAGRIDREELCETVSSCFLNMELLVEDTLKIYGVEVEIIDINDNAPSFQEDEVEIKVSEHAIPGARFALPNARDPDVGVNSLQSYQLSPNNYFSLQLRGRTDGAKNPELVLEGSLDREKEAAHLLLLTALDGGDPIRKGAVPIRVVVLDVNDHIPMFTQSVYRVSVPENISSGTRVLMVNATDPDEGINGEVMYSFRNMESKASEIFQLDSQTGEVQVRGSLDFEKYRFYEMEIQGQDGGGLFTTTTMLITVVDVNDNAPEITITSSINSILENSPPGTVIALLNVQDQDSGENGQVSCFIPNHLPFKLEKTYGNYYKLITSRVLDRELVQSYNITLTATDQGSPPLSAETHVWLNVADDNDNPPVFPHSSYSAYIPENNPRGASIFSVTALDPDSKQNALVTYSLTDDTVQGVPLSSYVSINSNTGVLYALQSFDYEQFRDLELRVIARDSGDPPLSSNVSLSLFVLDQNDNAPEILYPALPTDGSTGVELAPRSAEPGYLVTKVVAVDKDSGQNAWLSYRLLKASEPGLFAVGEHTGEVRTARALLDRDALKQSLVVAVQDHGQPPLSATVTLTVAVADSIPEVLADLGSLESLANSETSDLSLYLVVAVAAVSCIFLVFVIVLLALRLWRWHKSRLLQASEGGLAGMPTSHFVGVDGVQAFLQTYSHEVSLIADSQKSHLIFPQPNYGDTLISQESCEKSEPLLIAEDSAIILGKCDPTSNQQAPPNTDWRFSQAQRPGTSGSQNGDDTGTWPNNQFDTEMLQAMILASASEAADGSSTLGGGAGTMGLSARYGPQFTLQHVPDYRQNVYIPGSNATLTNAAGKRDGKAPAGGNGNKKKSGKKEKK

SEQ ID NO: 4648 - protein, 837 aa, Homo sapiens
MANRLQRGDRSRLLLLLCIFLGTLRGFRARQIRYSVPEETEKGSFVGNISKDLGLEPRELAKRGVRIVSRGKTQLFAVNPRSGSLITAGRIDREELCETVSSCFLNMELLVEDTLKIYGVEVEIIDINDNAPSFQEDEVEIKVSEHAIPGARFALPNARDPDVGVNSLQSYQLSPNNYFSLQLRGRTDGAKNPELVLEGSLDREKEAAHLLLLTALDGGDPIRKGAVPIRVVVLDVNDHIPMFTQSVYRVSVPENISSGTRVLMVNATDPDEGINGEVMYSFRNMESKASEIFQLDSQTGEVQVRGSLDFEKYRFYEMEIQGQDGGGLFTTTTMLITVVDVNDNAPEITITSSINSILENSPPGTVIALLNVQDQDSGENGQVSCFIPNHLPFKLEKTYGNYYKLITSRVLDRELVQSYNITLTATDQGSPPLSAETHVWLNVADDNDNPPVFPHSSYSAYIPENNPRGASIFSVTALDPDSKQNALVTYSLTDDTVQGVPLSSYVSINSNTGVLYALQSFDYEQFRDLELRVIARDSGDPPLSSNVSLSLFVLDQNDNAPEILYPALPTDGSTGVELAPRSAEPGYLVTKVVAVDKDSGQNAWLSYRLLKASEPGLFAVGEHTGEVRTARALLDRDALKQSLVVAVQDHGQPPLSATVTLTVAVADSIPEVLADLGSLESLANSETSDLSLYLVVAVAAVSCIFLVFVIVLLALRLWRWHKSRLLQASEGGLAGMPTSHFVGVDGVQAFLQTYSHEVSLIADSQKSHLIFPQPNYGDTLISQESCEKSEPLLIAEDSAIILGKCDPTSNQVRFISLPPNCWCLGTSLLRRCFLSLL

SEQ ID NO: 4649 - protein, 750 aa, Homo sapiens
MANRLQRGDRSRLLLLLCIFLGTLRGFRARQIRYSVPEETEKGSFVGNISKDLGLEPRELAKRGVRIVSRGKTQLFAVNPRSGSLITAGRIDREELCETVSSCFLNMELLVEDTLKIYGVEVEIIDINDNAPSFQEDEVEIKVSEHAIPGARFALPNARDPDVGVNSLQSYQLSPNNYFSLQLRGRTDGAKNPELVLEGSLDREKEAAHLLLLTALDGGDPIRKGAVPIRVVVLDVNDHIPMFTQSVYRVSVPENISSGTRVLMVNATDPDEGINGEVMYSFRNMESKASEIFQLDSQTGEVQVRGSLDFEKYRFYEMEIQGQDGGGLFTTTTMLITVVDVNDNAPEITITSSINSILENSPPGTVIALLNVQDQDSGENGQVSCFIPNHLPFKLEKTYGNYYKLITSRVLDRELVQSYNITLTATDQGSPPLSAETHVWLNVADDNDNPPVFPHSSYSAYIPENNPRGASIFSVTALDPDSKQNALVTYSLTDDTVQGVPLSSYVSINSNTGVLYALQSFDYEQFRDLELRVIARDSGDPPLSSNVSLSLFVLDQNDNAPEILYPALPTDGSTGVELAPRSAEPGYLVTKVVAVDKDSGQNAWLSYRLLKASEPGLFAVGEHTGEQAPPNTDWRFSQAQRPGTSGSQNGDDTGTWPNNQFDTEMLQAMILASASEAADGSSTLGGGAGTMGLSARYGPQFTLQHVPDYRQNVYIPGSNATLTNAAGKRDGKAPAGGNGNKKKSGKKEKK

SEQ ID NO: 4650 - protein, 938 aa, Homo sapiens
MLRKVRSWTEIWRWATLLFLFYHLGYVCGQIRYPVPEESQEGTFVGNVAQDFLLDTDSLSARRLQVAGEVNQRHFRVDLDSGALLIKNPIDREALCGLSASCIVPLEFVTEGPLEMYRAEVEIVDVNDHAPRFPRQQLDLEIGEAAPPGQRFPLEKAQDADVGSNSISSYRLSSNEHFALDVKKRSDGSLVPELLLEKPLDREKQSDYRLVLTAVDGGNPPRSGTAELRVSVLDVNDNAPAFQQSSYRISVLESAPAGMVLIQLNASDPDLGPSGNVTFYFSGHTPDRVRNLFSLHPTTGKLTLLGPLDFESENYYEFDVRARDGGSPAMEQHCSLRVDLLDVNDNAPYITVTSELGTLPESAEPGTVVALISVQDPDSGSNGDVSLRIPDHLPFALKSAFRNQFSLVTAGPLDREAKSSYDIMVTASDAGNPPLSTHRTIFLNISDVNDNPPSFFQRSHEVFVPENNRPGDLLCSLAASDPDSGLNALISYSLLEPRNRDVSASSFISLNPQTGAVHATRSFDYEQTQTLQFEVQARDRGNPPLSSTVTVRLFVLDLNDNAPAVLRPRARPGSLCPQALPPSVGAGHLITKVTAVDLDSGYNAWVSYQLLEAPDPSLFAVSRYAGEVRTAVPIPADLPPQKLVIVVKDSGSPPLSTSVTLLVSLEEDTHPVVPDLRESSAPREGESRLTLYLAVSLVAICFVSFGSFVALLSKCLRGAACGVTCFPAGTCACLTRSRRREGLPPSNGILRIQLGSDDPIKFVDVGGHSHGCTPLASAPTRSDSFMMVKSPSAPMAGEPVRPSCPPSDLLYGLEQAPPNTDWRFSQAQRPGTSGSQNGDDTGTWPNNQFDTEMLQAMILASASEAADGSSTLGGGAGTMGLSARYGPQFTLQHVPDYRQNVYIPGSNATLTNAAGKRDGKAPAGGNGNKKKSGKKEKK

SEQ ID NO: 4651 - protein, 871 aa, Homo sapiens
MLRKVRSWTEIWRWATLLFLFYHLGYVCGQIRYPVPEESQEGTFVGNVAQDFLLDTDSLSARRLQVAGEVNQRHFRVDLDSGALLIKNPIDREALCGLSASCIVPLEFVTEGPLEMYRAEVEIVDVNDHAPRFPRQQLDLEIGEAAPPGQRFPLEKAQDADVGSNSISSYRLSSNEHFALDVKKRSDGSLVPELLLEKPLDREKQSDYRLVLTAVDGGNPPRSGTAELRVSVLDVNDNAPAFQQSSYRISVLESAPAGMVLIQLNASDPDLGPSGNVTFYFSGHTPDRVRNLFSLHPTTGKLTLLGPLDFESENYYEFDVRARDGGSPAMEQHCSLRVDLLDVNDNAPYITVTSELGTLPESAEPGTVVALISVQDPDSGSNGDVSLRIPDHLPFALKSAFRNQFSLVTAGPLDREAKSSYDIMVTASDAGNPPLSTHRTIFLNISDVNDNPPSFFQRSHEVFVPENNRPGDLLCSLAASDPDSGLNALISYSLLEPRNRDVSASSFISLNPQTGAVHATRSFDYEQTQTLQFEVQARDRGNPPLSSTVTVRLFVLDLNDNAPAVLRPRARPGSLCPQALPPSVGAGHLITKVTAVDLDSGYNAWVSYQLLEAPDPSLFAVSRYAGEVRTAVPIPADLPPQKLVIVVKDSGSPPLSTSVTLLVSLEEDTHPVVPDLRESSAPREGESRLTLYLAVSLVAICFVSFGSFVALLSKCLRGAACGVTCFPAGTCACLTRSRRREGLPPSNGILRIQLGSDDPIKFVDVGGHSHGCTPLASAPTRSDSFMMVKSPSAPMAGEPVRPSCPPSDLLYGLEVRPLQAQQMLEGYSDPGIWLGHVLESTGLSVSAHSDVTIFVRGNYVVDAVLCNCFVN

SEQ ID NO: 4652 - protein, 598 aa, Homo sapiens
MLKLVGGGGGQDWACSVAGTSLGGEEAAFEVARPGDQGKAGGGSPGWGCAGIPDSAPGAGVLQAGAVGPARGGQGAEEVGESAGGGEERRVRHPQAPALRLLNRKPQGGSGEIKTPENDLQRGRLSRGPRTAPPAPGMGDRSGQQERSVPHSPGAPVGTSAAAVNGLLHNGFHPPPVQPPHVCSRGPVGGSDAAPQRLPLLPELQPQPLLPQHDSPAKKCRLRRRMDSGRKNRPPFPWFGMDIGGTLVKLVYFEPKDITAEEEQEEVENLKSIRKYLTSNTAYGKTGIRDVHLELKNLTMCGRKGNLHFIRFPSCAMHRFIQMGSEKNFSSLHTTLCATGGGAFKFEEDFRMIADLQLHKLDELDCLIQGLLYVDSVGFNGKPECYYFENPTNPELCQKKPYCLDNPYPMLLVNMGSGVSILAVYSKDNYKRVTGTSLGGGTFLGLCCLLTGCETFEEALEMAAKGDSTNVDKLVKDIYGGDYERFGLQGSAVASSFGNMMSKEKRDSISKEDLARATLVTITNNIGSIARMCALNENIDRVVFVGNFLRINMVSMKLLAYAMDFWSKGQLKALFLEHEGYFGAVGALLELFKMTDDK

SEQ ID NO: 4653 - protein, 373 aa, Homo sapiens
MKLINGKKQTFPWFGMDIGGTLVKLVYFEPKDITAEEEQEEVENLKSIRKYLTSNTAYGKTGIRDVHLELKNLTMCGRKGNLHFIRFPSCAMHRFIQMGSEKNFSSLHTTLCATGGGAFKFEEDFRMIADLQLHKLDELDCLIQGLLYVDSVGFNGKPECYYFENPTNPELCQKKPYCLDNPYPMLLVNMGSGVSILAVYSKDNYKRVTGTSLGGGTFLGLCCLLTGCETFEEALEMAAKGDSTNVDKLVKDIYGGDYERFGLQGSAVASSFGNMMSKEKRDSISKEDLARATLVTITNNIGSIARMCALNENIDRVVFVGNFLRINMVSMKLLAYAMDFWSKGQLKALFLEHEGYFGAVGALLELFKMTDDK

SEQ ID NO: 4654 - protein, 314 aa, Homo sapiens
MKLINGKKQTFPWFGMDIGGTLVKLVYFEPKDITAEEEQEEVENLKSIRKYLTSNTAYGKTGIRDVHLELKNLTMCGRKGNLHFIRFPSCAMHRFIQMGSEKNFSSLHTTLCATGGGAFKFEEDFRMIADLQLHKLDELDCLIQGLLYVDSVGFNGKPECYYFENPTNPELCQKKPYCLDNPYPMLLVNMGSGVSILAVYSKDNYKRVTGTSFGNMMSKEKRDSISKEDLARATLVTITNNIGSIARMCALNENIDRVVFVGNFLRINMVSMKLLAYAMDFWSKGQLKALFLEHEGYFGAVGALLELFKMTDDK

SEQ ID NO: 4655 - protein, 400 aa, Homo sapiens
MAKSKHALLPFCHGMMQQEGLHQMQSLDLGLLSLQNSFPWFGMDIGGTLVKLVYFEPKDITAEEEQEEVENLKSIRKYLTSNTAYGKTGIRDVHLELKNLTMCGRKGNLHFIRFPSCAMHRFIQMGSEKNFSSLHTTLCATGGGAFKFEEDFRMIADLQLHKLDELDCLIQGLLYVDSVGFNGKPECYYFENPTNPELCQKKPYCLDNPYPMLLVNMGSGVSILAVYSKDNYKRVTGTSLGGGTFLGLCCLLTGCETFEEALEMAAKGDSTNVDKLVKDIYGGDYERFGLQGSAVASSFGNMMSKEKRDSISKEDLARATLVTITNNIGSIARMCALNENIDRVVFVGNFLRINMVSMKLLAYAMDFWSKGQLKALFLEHEGYFGAVGALLELFKMTDDK

SEQ ID NO: 4656 - protein, 502 aa, Homo sapiens
MAQRCVCVLALVAMLLLVFPTVSRSMGPRSGEHQRASRIPSQFSKEERVAMKEALKGAIQIPTVTFSSEKSNTTALAEFGKYIHKVFPTVVSTSFIQHEVVEEYSHLFTIQGSDPSLQPYLLMAHFDVVPAPEEGWEVPPFSGLERDGIIYGRGTLDDKNSVMALLQALELLLIRKYIPRRSFFISLGHDEESSGTGAQRISALLQSRGVQLAFIVDEGGFILDDFIPNFKKPIALIAVSEKGSMNLMLQVNMTSGHSSAPPKETSIGILAAAVSRLEQTPMPIIFGSGTVVTVLQQLANEFPFPVNIILSNPWLFEPLISRFMERNPLTNAIIRTTTALTIFKAGVKFNVIPPVAQATVNFRIHPGQTVQEVLELTKNIVADNRVQFHVLSAFDPLPVSPSDDKALGYQLLRQTVQSVFPEVNITAPVTSIGNTDSRFFTNLTTGIYRFYPIYIQPEDFKRIHGVNEKISVQAYETQVKFIFELIQNADTDQEPVSHLHKL

SEQ ID NO: 4657 - protein, 361 aa, Homo sapiens
MAQRCVCVLALVAMLLLVFPTVSRSMGPRSGEHQRASRIPSQFSKEERVAMKEALKGAIQIPTVTFSSEKSNTTALAEFGKYIHKVFPTVVSTSFIQHEVVEEYSHLFTIQGSDPSLQPYLLMAHFDVVPAPEEGWEVPPFSGLERDGIIYGRGTLDDKNSVMALLQALELLLIRKYIPRRSFFISLGHDEESSGTGAQRISALLQSRGVQLAFIVDEGGFILDDFIPNFKKPIALIAVSEKGSMNLMLQVNMTSGHSSAPPKETSIGILAAAVSRLEQTPMPIIFGSGTVVTVLQQLANEVYGEKSLNQCNNQDHHGTHHIQSRGQVQCHPPSGPGHSQLPDSPWTDSPRGPRTHEEHCG

SEQ ID NO: 4658 - protein, 1888 aa, Homo sapiens
MTGCPASSRRRGFGLFFFLRLHRLLLLFLVLRGTLANKLNVPQVLLPFGREPGRVPFLLEAQRGCYTWHSTHHDAVTVEPLYENGTLCSQKAVLIAESTQPIRLSSIILAREIVTDHELRCDVKVDVINSIEIVSRARELYVDDSPLELMVRALDAEGNTFSSLAGMMFEWSIAQDNESAREELSSKIRILKYSEAEYAPPIYIAEMEKEEKQGDVILVSGIRTGAAVVKVRIHEPFYKKVAAALIRLLVLENIFLIPSHDIYLLVGTYIKYQVAKMVQGRVTEVKFPLEHYILELQDHRVALNGSHSEKVAILDDKTAMVTASQLGQTNLVFVHKNVHMRSVSGLPNCTIYVVEPGFLGFTVQPGNRWSLEVGQVYVITVDVFDKSSTKVYISDNLRITYDFPKEYFEEQLTTVNGSYHIVKALKDGVVVINASLTSIIYQNKDIQPIKFLIKHQQEVKIYFPIMLTPKFLAFPHHPMGMLYRYKVQVEGGSGNFTWTSSNETVVIVTTKGVVTAGQVRGNSTVLARDVQNPFRYGEIKIHVLKLNKMELLPFHADVEIGQIIEIPIAMYHINKETKEAMAFTDCSHLSLDLNMDKQGVFTLLKEGIQRPGPMHCSSTHIAAKSLGHTLVTVSVNECDKYLESSATFAAYEPLKALNPVEVALVTWQSVKEMVFEGGPRPWILEPSRFFLELNAEKTEKIGIAQVWLPSKRKQNQYIYRIQCLDLGEQVLTFRIGNHPGVLNPSPAVEVLQVRFICAHPASMSVTPVYKVPAGAQPCPLPQHNKWLIPVSRLRDTVLELAVFDQHRRKFDNFSSLMLEWKSSNETLAHFEDYKSVEMVAKDDGSGQTRLHGHQILKVHQIKGTVLIGVNFVGYSEKKSPKEISNLPRSVDVELLLVDDVTVVPENATIYNHPDVKETFSLVEGSGYFLVNSSEQGVVTITYMEAESSVELVPLHPGFFTLEVYDLCLAFLGPATAHLRVSDIQELELDLIDKVEIDKTVLVTVRVLGSSKRPFQNKYFRNMELKLQLASAIVTLTPMEQQDEYSENYILRATTIGQTTLVAIAKDKMGRKYTSTPRHIEVFPPFRLLPEKMTLIPMNMMQVMSEGGPQPQSIVHFSISNQTVAVVNRRGQVTGKIVGTAVVHGTIQTVNEDTGKVIVFSQDEVQIEVVQLRAVRILAAATRLITATKMPVYVMGVTSTQTPFSFSNANPGLTFHWSMSKRDVLDLVPRHSEVFLQLPVEHNFAMVVHTKAAGRTSIKVTVHCMNSSSGQFEGNLLELSDEVQILVFEKLQLFYPECQPEQILMPINSQLKLHTNREGAAFVSSRVLKCFPNSSVIEEDGEGLLKAGSIAGTAVLEVTSIEPFGVNQTTITGVQVAPVTYLRVSSQPKLYTAQGRTLSAFPLGMSLTFTVQFYNSIGEKFHTHNTQLYLALNRDDLLHIGPGNKNYTYMAQAVNRGLTLVGLWDRRHPGMADYIPVAVEHAIEPDTKLTFVGDIICFSTHLVSQHGEPGIWMISANNILQTDIVTGVGVARSPGTAMIFHDIPGVVKTYREVVVNASSRLMLSYDLKTYLTNTLNSTVFKLFITTGRNGVNLKGFCTPNQALAITKVLLPATLMLCHVQFSNTLLDIPASKVFQVHSDFSMEKGVYVCIIKVRPQSEELLQALSVADTSVYGWATLVSERSKNGMQRILIPFIPAFYINQSELVLSHKQDIGEIRVLGVDRVLRKLEVISSSPVLVVAGHSHSPLTPGLAIYSVRVVNFTSFQQMASPVFINISCVLTSQSEAVVVRAMKDKLGADHCEDSAILKRFTGSYQILLLTLFAVLASTASIFLAYNAFLNKIQTVPVVYVPTLGTPQPGFFNSTSSPPHFMSLQPPLAQSRLQHWLWSIRH

SEQ ID NO: 4659 - protein, 1736 aa, Homo sapiens
MTGCPASSRRRGFGLFFFLRLHRLLLLFLVLRGTLANKLNVPQVLLPFGREPGRVPFLLEAQRGCYTWHSTHHDAVTVEPLYENGTLCSQKAVLIAESTQPIRLSSIILAREIVTDHELRCDVKVDVINSIEIVSRARELYVDDSPLELMVRALDAEGNTFSSLAGMMFEWSIAQDNESAREELSSKIRILKYSEAEYAPPIYIAEMEKEEKQGDVILVSGIRTGAAVVKVRIHEPFYKKVAAALIRLLVLENIFLIPSHDIYLLVGTYIKYQVAKMVQGRVTEVKFPLEHYILELQDHRVALNGSHSEKVAILDDKTAMVTASQLGQTNLVFVHKNVHMRSVSGLPNCTIYVVEPGFLGFTVQPGNRWSLEVGQVYVITVDVFDKSSTKVYISDNLRITYDFPKEYFEEQLTTVNGSYHIVKALKDGVVVINASLTSIIYQNKDIQPIKFLIKHQQEVKIYFPIMLTPKFLAFPHHPMGMLYRYKVQVEGGSGNFTWTSSNETVVIVTTKGVVTAGQVRGNSTVLARDVQNPFRYGEIKIHVLKLNKMELLPFHADVEIGQIIEIPIAMYHINKETKEAMAFTDCSHLSLDLNMDKQGVFTLLKEGIQRPGPMHCSSTHIAAKSLGHTLVTVSVNECDKYLESSATFAAYEPLKALNPVEVALVTWQSVKEMVFEGGPRPWILEPSRFFLELNAEKTEKIGIAQVWLPSKRKQNQYIYRIQCLDLGEQVLTFRIGNHPGVLNPSPAVEVLQVRFICAHPASMSVTPVYKVPAGAQPCPLPQHNKWLIPVSRLRDTVLELAVFDQHRRKFDNFSSLMLEWKSSNETLAHFEDYKSVEMVAKDDGSGQTRLHGHQILKVHQIKGTVLIGVNFVGYSEKKSPKEISNLPRSVDVELLLVDDVTVVPENATIYNHPDVKETFSLVEGSGYFLVNSSEQGVVTITYMEAESSVELVPLHPGFFTLEVYDLCLAFLGPATAHLRVSDIQELELDLIDKVEIDKTVLVTVRVLGSSKRPFQNKYFRNMELKLQLASAIVTLTPMEQQDEYSENYILRATTIGQTTLVAIAKDKMGRKYTSTPRHIEVFPPFRLLPEKMTLIPMNMMQVMSEGGPQPQSIVHFSISNQTVAVVNRRGQVTGKIVGTAVVHGTIQTVNEDTGKVIVFSQDEVQIEVVQLRAVRILAAATRLITATKMPVYVMGVTSTQTPFSFSNANPGLTFHWSMSKRDVLDLVPRHSEVFLQLPVEHNFAMVVHTKAAGRTSIKVTVHCMNSSSGQFEGNLLELSDEVQILVFEKLQLFYPECQPEQILMPINSQLKLHTNREGAAFVSSRVLKCFPNSSVIEEDGEGLLKAGSIAGTAVLEVTSIEPFGVNQTTITGVQVAPVTYLRVSSQPKLYTAQGRTLSAFPLGMSLTFTVQFYNSIGEKFHTHNTQLYLALNRDDLLHIGPGNKNYTYMAQAVNRGLTLVGLWDRRHPGMADYIPVAVEHAIEPDTKLTFVGDIICFSTHLVSQHGEPGIWMISANNILQTDIVTGVGVARSPGTAMIFHDIPGVVKTYREVVVNASSRLMLSYDLKTYLTNTLNSTVFKLFITTGRNGVNLKGFCTPNQALAITKVLLPATLMLCHVQFSNTLLDIPASKVFQVHSDFSMEKDHCEDSAILKRFTGSYQILLLTLFAVLASTASIFLAYNAFLNKIQTVPVVYVPTLGTPQPGFFNSTSSPPHFMSLQPPLAQSRLQHWLWSIRH

SEQ ID NO: 4660 - protein, 98 aa, Homo sapiens
MRKMNTLLLVSLSFLYLKEVMGLKCNTCIYTEGWKCMAGRGTCIAKENELCSTTAYFRGDKHMYSTHMCKYKCREEESSKRGLLRVTLCCDRNFCNVF

SEQ ID NO: 4661 - protein, 239 aa, Homo sapiens
MQDPNADTEWNDILRKKGILPPKESLKELEEEAEEEQRILQQSVVKTYEDMTLEELEDHEDEFNEEDERAIEMYRRRRLAEWKATKLKNKFGEVLEISGKDYVQEVTKAGEGLWVILHLYKQGIPLCALINQHLSGLARKFPDVKFIKAISTTCIPNYPDRNLPTIFVYLEGDIKAQFIGPLVFGGMNLTRDELEWKLSESGAIMTDLEENPKKPIEDVLLSSVRRSVLMKRDSDSEGD

SEQ ID NO: 4662 - protein, 636 aa, Homo sapiens
MAQSTATSPDGGTTFEHLWSSLEPDSTYFDLPQSSRGNNEVVGGTDSSMDVFHLEGMTTSVMAQFNLLSSTMDQMSSRAASASPYTPEHAASVPTHSPYAQPSSTFDTMSPAPVIPSNTDYPGPHHFEVTFQQSSTAKSATWTYSPLLKKLYCQIAKTCPIQIKVSTPPPPGTAIRAMPVYKKAEHVTDVVKRCPNHELGRDFNEGQSAPASHLIRVEGNNLSQYVDDPVTGRQSVVVPYEPPQVGTEFTTILYNFMCNSSCVGGMNRRPILIIITLEMRDGQVLGRRSFEGRICACPGRDRKADEDHYREQQALNESSAKNGAASKRAFKQSPPAVPALGAGVKKRRHGDEDTYYLQVRGRENFEILMKLKESLELMELVPQPLVDSYRQQQQLLQRPSHLQPPSYGPVLSPMNKVHGGMNKLPSVNQLVGQPPPHSSAATPNLGPVGPGMLNNHGHAVPANGEMSSSHSAQSMVSGSHCTPPPPYHADPSLVSFLTGLGCPNCIEYFTSQGLQSIYHLQNLTIEDLGALKIPEQYRMTIWRGLQDLKQGHDYSTAQQLLRSSNAATISIGGSGELQRQRVMEAVHFRVRHTITIPNRGGPGGGPDEWADFGFDLPDCKARKQPIKEEFTEAEIH

SEQ ID NO: 4663 - protein, 499 aa, Homo sapiens
MAQSTATSPDGGTTFEHLWSSLEPDSTYFDLPQSSRGNNEVVGGTDSSMDVFHLEGMTTSVMAQFNLLSSTMDQMSSRAASASPYTPEHAASVPTHSPYAQPSSTFDTMSPAPVIPSNTDYPGPHHFEVTFQQSSTAKSATWTYSPLLKKLYCQIAKTCPIQIKVSTPPPPGTAIRAMPVYKKAEHVTDVVKRCPNHELGRDFNEGQSAPASHLIRVEGNNLSQYVDDPVTGRQSVVVPYEPPQVGTEFTTILYNFMCNSSCVGGMNRRPILIIITLEMRDGQVLGRRSFEGRICACPGRDRKADEDHYREQQALNESSAKNGAASKRAFKQSPPAVPALGAGVKKRRHGDEDTYYLQVRGRENFEILMKLKESLELMELVPQPLVDSYRQQQQLLQRPSHLQPPSYGPVLSPMNKVHGGMNKLPSVNQLVGQPPPHSSAATPNLGPVGPGMLNNHGHAVPANGEMSSSHSAQSMVSGSHCTPPPPYHADPSLVRTWGP

SEQ ID NO: 4664 - protein, 476 aa, Homo sapiens
MAQSTATSPDGGTTFEHLWSSLEPDSTYFDLPQSSRGNNEVVGGTDSSMDVFHLEGMTTSVMAQFNLLSSTMDQMSSRAASASPYTPEHAASVPTHSPYAQPSSTFDTMSPAPVIPSNTDYPGPHHFEVTFQQSSTAKSATWTYSPLLKKLYCQIAKTCPIQIKVSTPPPPGTAIRAMPVYKKAEHVTDVVKRCPNHELGRDFNEGQSAPASHLIRVEGNNLSQYVDDPVTGRQSVVVPYEPPQVGTEFTTILYNFMCNSSCVGGMNRRPILIIITLEMRDGQVLGRRSFEGRICACPGRDRKADEDHYREQQALNESSAKNGAASKRAFKQSPPAVPALGAGVKKRRHGDEDTYYLQVRGRENFEILMKLKESLELMELVPQPLVDSYRQQQQLLQRPPRDAQQPWPRSASQQRRDEQQPQRPVHGLGVPLHSATPLPRRPQPRQFFNRIGVSKLHRVFHLPRVTEHLPPAEPDH

SEQ ID NO: 4665 - protein, 403 aa, Homo sapiens
MAQSTATSPDGGTTFEHLWSSLEPDSTYFDLPQSSRGNNEVVGGTDSSMDVFHLEGMTTSVMAQFNLLSSTMDQMSSRAASASPYTPEHAASVPTHSPYAQPSSTFDTMSPAPVIPSNTDYPGPHHFEVTFQQSSTAKSATWTYSPLLKKLYCQIAKTCPIQIKVSTPPPPGTAIRAMPVYKKAEHVTDVVKRCPNHELGRDFNEGQSAPASHLIRVEGNNLSQYVDDPVTGRQSVVVPYEPPQVGTEFTTILYNFMCNSSCVGGMNRRPILIIITLEMRDGQVLGRRSFEGRICACPGRDRKADEDHYREQQALNESSAKNGAASKRAFKQSPPAVPALGAGVKKRRHGDEDTYYLQVRGRENFEILMKLKESLELMELVPQPLVDSYRQQQQLLQRPTWGP

SEQ ID NO: 4666 - protein, 555 aa, Homo sapiens
MAQSTATSPDGGTTFEHLWSSLEPDSTYFDLPQSSRGNNEVVGGTDSSMDVFHLEGMTTSVMAQFNLLSSTMDQMSSRAASASPYTPEHAASVPTHSPYAQPSSTFDTMSPAPVIPSNTDYPGPHHFEVTFQQSSTAKSATWTYSPLLKKLYCQIAKTCPIQIKVSTPPPPGTAIRAMPVYKKAEHVTDVVKRCPNHELGRDFNEGQSAPASHLIRVEGNNLSQYVDDPVTGRQSVVVPYEPPQVGTEFTTILYNFMCNSSCVGGMNRRPILIIITLEMRDGQVLGRRSFEGRICACPGRDRKADEDHYREQQALNESSAKNGAASKRAFKQSPPAVPALGAGVKKRRHGDEDTYYLQVRGRENFEILMKLKESLELMELVPQPLVDSYRQQQQLLQRPPRDAQQPWPRSASQQRRDEQQPQRPVHGLGVPLHSATPLPRRPQPRDLGALKIPEQYRMTIWRGLQDLKQGHDYSTAQQLLRSSNAATISIGGSGELQRQRVMEAVHFRVRHTITIPNRGGPGGGPDEWADFGFDLPDCKARKQPIKEEFTEAEIH

SEQ ID NO: 4667 - protein, 540 aa, Homo sapiens
MAQSTATSPDGGTTFEHLWSSLEPDSTYFDLPQSSRGNNEVVGGTDSSMDVFHLEGMTTSVMAQFNLLSSTMDQMSSRAASASPYTPEHAASVPTHSPYAQPSSTFDTMSPAPVIPSNTDYPGPHHFEVTFQQSSTAKSATWTYSPLLKKLYCQIAKTCPIQIKVSTPPPPGTAIRAMPVYKKAEHVTDVVKRCPNHELGRDFNEGQSAPASHLIRVEGNNLSQYVDDPVTGRQSVVVPYEPPQVGTEFTTILYNFMCNSSCVGGMNRRPILIIITLEMRDGQVLGRRSFEGRICACPGRDRKADEDHYREQQALNESSAKNGAASKRAFKQSPPAVPALGAGVKKRRHGDEDTYYLQVRGRENFEILMKLKESLELMELVPQPLVDSYRQQQQLLQRPFLTGLGCPNCIEYFTSQGLQSIYHLQNLTIEDLGALKIPEQYRMTIWRGLQDLKQGHDYSTAQQLLRSSNAATISIGGSGELQRQRVMEAVHFRVRHTITIPNRGGPGGGPDEWADFGFDLPDCKARKQPIKEEFTEAEIH

SEQ ID NO: 4668 - protein, 587 aa, Homo sapiens
MLYVGDPARHLATAQFNLLSSTMDQMSSRAASASPYTPEHAASVPTHSPYAQPSSTFDTMSPAPVIPSNTDYPGPHHFEVTFQQSSTAKSATWTYSPLLKKLYCQIAKTCPIQIKVSTPPPPGTAIRAMPVYKKAEHVTDVVKRCPNHELGRDFNEGQSAPASHLIRVEGNNLSQYVDDPVTGRQSVVVPYEPPQVGTEFTTILYNFMCNSSCVGGMNRRPILIIITLEMRDGQVLGRRSFEGRICACPGRDRKADEDHYREQQALNESSAKNGAASKRAFKQSPPAVPALGAGVKKRRHGDEDTYYLQVRGRENFEILMKLKESLELMELVPQPLVDSYRQQQQLLQRPSHLQPPSYGPVLSPMNKVHGGMNKLPSVNQLVGQPPPHSSAATPNLGPVGPGMLNNHGHAVPANGEMSSSHSAQSMVSGSHCTPPPPYHADPSLVSFLTGLGCPNCIEYFTSQGLQSIYHLQNLTIEDLGALKIPEQYRMTIWRGLQDLKQGHDYSTAQQLLRSSNAATISIGGSGELQRQRVMEAVHFRVRHTITIPNRGGPGGGPDEWADFGFDLPDCKARKQPIKEEFTEAEIH

SEQ ID NO: 4669 - protein, 450 aa, Homo sapiens
MLYVGDPARHLATAQFNLLSSTMDQMSSRAASASPYTPEHAASVPTHSPYAQPSSTFDTMSPAPVIPSNTDYPGPHHFEVTFQQSSTAKSATWTYSPLLKKLYCQIAKTCPIQIKVSTPPPPGTAIRAMPVYKKAEHVTDVVKRCPNHELGRDFNEGQSAPASHLIRVEGNNLSQYVDDPVTGRQSVVVPYEPPQVGTEFTTILYNFMCNSSCVGGMNRRPILIIITLEMRDGQVLGRRSFEGRICACPGRDRKADEDHYREQQALNESSAKNGAASKRAFKQSPPAVPALGAGVKKRRHGDEDTYYLQVRGRENFEILMKLKESLELMELVPQPLVDSYRQQQQLLQRPSHLQPPSYGPVLSPMNKVHGGMNKLPSVNQLVGQPPPHSSAATPNLGPVGPGMLNNHGHAVPANGEMSSSHSAQSMVSGSHCTPPPPYHADPSLVRTWGP

SEQ ID NO: 4670 - protein, 427 aa, Homo sapiens
MLYVGDPARHLATAQFNLLSSTMDQMSSRAASASPYTPEHAASVPTHSPYAQPSSTFDTMSPAPVIPSNTDYPGPHHFEVTFQQSSTAKSATWTYSPLLKKLYCQIAKTCPIQIKVSTPPPPGTAIRAMPVYKKAEHVTDVVKRCPNHELGRDFNEGQSAPASHLIRVEGNNLSQYVDDPVTGRQSVVVPYEPPQVGTEFTTILYNFMCNSSCVGGMNRRPILIIITLEMRDGQVLGRRSFEGRICACPGRDRKADEDHYREQQALNESSAKNGAASKRAFKQSPPAVPALGAGVKKRRHGDEDTYYLQVRGRENFEILMKLKESLELMELVPQPLVDSYRQQQQLLQRPPRDAQQPWPRSASQQRRDEQQPQRPVHGLGVPLHSATPLPRRPQPRQFFNRIGVSKLHRVFHLPRVTEHLPPAEPDH

SEQ ID NO: 4671 - protein, 565 aa, Homo sapiens
MDQMSSRAASASPYTPEHAASVPTHSPYAQPSSTFDTMSPAPVIPSNTDYPGPHHFEVTFQQSSTAKSATWTYSPLLKKLYCQIAKTCPIQIKVSTPPPPGTAIRAMPVYKKAEHVTDVVKRCPNHELGRDFNEGQSAPASHLIRVEGNNLSQYVDDPVTGRQSVVVPYEPPQVGTEFTTILYNFMCNSSCVGGMNRRPILIIITLEMRDGQVLGRRSFEGRICACPGRDRKADEDHYREQQALNESSAKNGAASKRAFKQSPPAVPALGAGVKKRRHGDEDTYYLQVRGRENFEILMKLKESLELMELVPQPLVDSYRQQQQLLQRPSHLQPPSYGPVLSPMNKVHGGMNKLPSVNQLVGQPPPHSSAATPNLGPVGPGMLNNHGHAVPANGEMSSSHSAQSMVSGSHCTPPPPYHADPSLVSFLTGLGCPNCIEYFTSQGLQSIYHLQNLTIEDLGALKIPEQYRMTIWRGLQDLKQGHDYSTAQQLLRSSNAATISIGGSGELQRQRVMEAVHFRVRHTITIPNRGGPGGGPDEWADFGFDLPDCKARKQPIKEEFTEAEIH

SEQ ID NO: 4672 - protein, 350 aa, Homo sapiens
MLYVGDPARHLATAQFNLLSSTMDQMSSRAASASPYTPEHAASVPTHSPYAQPSSTFDTMSPAPVIPSNTDYPGPHHFEVTFQQSSTAKSATWTYSPLLKKLYCQIAKTCPIQIKVSTPPPPGTAIRAMPVYKKAEHVTDVVKRCPNHELGRDFNEGQSAPASHLIRVEGNNLSQYVDDPVTGRQSVVVPYEPPQVGTEFTTILYNFMCNSSCVGGMNRRPILIIITLEMRDGQVLGRRSFEGRICACPGRDRKADEDHYREQQALNESSAKNGAASKRAFKQSPPAVPALGAGVKKRRHGDEDTYYLQVRGRENFEILMKLKESLELMELVPQPLVDSYRQQQQLLQRP

SEQ ID NO: 4673 - protein, 555 aa, Homo sapiens
MAQSTATSPDGGTTFEHLWSSLEPDSTYFDLPQSSRGNNEVVGGTDSSMDVFHLEGMTTSVMAQFNLLSSTMDQMSSRAASASPYTPEHAASVPTHSPYAQPSSTFDTMSPAPVIPSNTDYPGPHHFEVTFQQSSTAKSATWTYSPLLKKLYCQIAKTCPIQIKVSTPPPPGTAIRAMPVYKKAEHVTDVVKRCPNHELGRDFNEGQSAPASHLIRVEGNNLSQYVDDPVTGRQSVVVPYEPPQVGTEFTTILYNFMCNSSCVGGMNRRPILIIITLEMRDGQVLGRRSFEGRICACPGRDRKADEDHYREQQALNESSAKNGAASKRAFKQSPPAVPALGAGVKKRRHGDEDTYYLQVRGRENFEILMKLKESLELMELVPQPLVDSYRQQQQLLQRPPRDAQQPWPRSASQRRDEQQPQRPVHGLGVPLHSATPLPRRPQPRQDLGALKIPEQYRMTIWRGLQDLKQGHDYSTAQQLLRSSNAATISIGGSGELQRQRVMEAVHFRVRHTITIPNRGGPGGGPDEWADFGFDLPDCKARKQPIKEEFTEAEIH

SEQ ID NO: 4674 - protein, 195 aa, Homo sapiens
MAQEKMKLGFKSLPSSTTADGNILRRVNSAPLINGLGFNSQVLQADMLRIRTNRTTFRNRRSLLLPPPPFHGSISRLHQIKQEEAMDLINRETMSEWKLQSEIQISHSWEEGLKLVKWHFNINQKRFSKAQPTCFLLILPNCQKIMCIYFQLLLMETTAMLDLLVIRQLKSALSQTLLCHLLILVLICSSRQTFN

SEQ ID NO: 4675 - protein, 152 aa, Homo sapiens
MAQEKMKLGFKSLPSSTTADGNILRRVNSAPLINGLGFNSQVLQADMLRIRTNRTTFRNRRSLLLPPPPFHGSISRLHQIKQEEAMDLINRETMSEWKLQSEIQISHSWEEGLKLNDNGLQKSSSLKCIDLTPVSSMASSIKKTGKSTSSYF

SEQ ID NO: 4676 - protein, 115 aa, Homo sapiens
MAYFPGTGRTDQETQLDLSLCGREPESLENLFLDPDMAQEKMKLGFKSLPSSTTADGNILRRVNSAPLINGLGFNSQVLQADMLRIRTNRTTFRNRRSLEITSPTSVEQKPKDLF

SEQ ID NO: 4677 - protein, 724 aa, Homo sapiens
MSAEGYQYRALYDYKKEREEDIDLHLGDILTVNKGSLVALGFSDGQEARPEEIGWLNGYNETTGERGDFPGTYVEYIGRKKISPPTPKPRPPRPLPVAPGSSKTEADVEQQALTLPDLAEQFAPPDIAPPLLIKLVEAIEKKGLECSTLYRTQSSSNLAELRQLLDCDTPSVDLEMIDVHVLADAFKRYLLDLPNPVIPAAVYSEMISLAPEVQSSEEYIQLLKKLIRSPSIPHQYWLTLQYLLKHFFKLSQTSSKNLLNARVLSEIFSPMLFRFSAASSDNTENLIKVIEILISTEWNERQPAPALPPKPPKPTTVANNGMNNNMSLQDAEWYWGDISREEVNEKLRDTADGTFLVRDASTKMHGDYTLTLRKGGNNKLIKIFHRDGKYGFSDPLTFSSVVELINHYRNESLAQYNPKLDVKLLYPVSKYQQDQVVKEDNIEAVGKKLHEYNTQFQEKSREYDRLYEEYTRTSQEIQMKRTAIEAFNETIKIFEEQCQTQERYSKEYIEKFKREGNEKEIQRIMHNYDKLKSRISEIIDSRRRLEEDLKKQAAEYREIDKRMNSIKPDLIQLRKTRDQYLMWLTQKGVRQKKLNEWLGNENTEDQYSLVEDDEDLPHHDEKTWNVGSSNRNKAENLLRGKRDGTFLVRESSKQGCYACSVVVDGEVKHCVINKTATGYGFAEPYNLYSSLKELVLHYQHTSLVQHNDSLNVTLAYPVYAQQRR

SEQ ID NO: 4678 - protein, 454 aa, Homo sapiens
MYNTVWNMEDLDLEYAKTDINCGTDLMFYIEMDPPALPPKPPKPTTVANNGMNNNMSLQDAEWYWGDISREEVNEKLRDTADGTFLVRDASTKMHGDYTLTLRKGGNNKLIKIFHRDGKYGFSDPLTFSSVVELINHYRNESLAQYNPKLDVKLLYPVSKYQQDQVVKEDNIEAVGKKLHEYNTQFQEKSREYDRLYEEYTRTSQEIQMKRTAIEAFNETIKIFEEQCQTQERYSKEYIEKFKREGNEKEIQRIMHNYDKLKSRISEIIDSRRRLEEDLKKQAAEYREIDKRMNSIKPDLIQLRKTRDQYLMWLTQKGVRQKKLNEWLGNENTEDQYSLVEDDEDLPHHDEKTWNVGSSNRNKAENLLRGKRDGTFLVRESSKQGCYACSVVVDGEVKHCVINKTATGYGFAEPYNLYSSLKELVLHYQHTSLVQHNDSLNVTLAYPVYAQQRR

SEQ ID NO: 4679 - protein, 424 aa, Homo sapiens
MHNLQTLPPKPPKPTTVANNGMNNNMSLQDAEWYWGDISREEVNEKLRDTADGTFLVRDASTKMHGDYTLTLRKGGNNKLIKIFHRDGKYGFSDPLTFSSVVELINHYRNESLAQYNPKLDVKLLYPVSKYQQDQVVKEDNIEAVGKKLHEYNTQFQEKSREYDRLYEEYTRTSQEIQMKRTAIEAFNETIKIFEEQCQTQERYSKEYIEKFKREGNEKEIQRIMHNYDKLKSRISEIIDSRRRLEEDLKKQAAEYREIDKRMNSIKPDLIQLRKTRDQYLMWLTQKGVRQKKLNEWLGNENTEDQYSLVEDDEDLPHHDEKTWNVGSSNRNKAENLLRGKRDGTFLVRESSKQGCYACSVVVDGEVKHCVINKTATGYGFAEPYNLYSSLKELVLHYQHTSLVQHNDSLNVTLAYPVYAQQRR

SEQ ID NO: 4680 - protein, 732 aa, Homo sapiens
MSAEGYQYRALYDYKKEREEDIDLHLGDILTVNKGSLVALGFSDGQEARPEEIGWLNGYNETTGERGDFPGTYVEYIGRKKISPPTPKPRPPRPLPVAPGSSKTEADVEQQALTLPDLAEQFAPPDIAPPLLIKLVEAIEKKGLECSTLYRTQSSSNLAELRQLLDCDTPSVDLEMIDVHVLADAFKRYLLDLPNPVIPAAVYSEMISLAPEVQSSEEYIQLLKKLIRSPSIPHQYWLTLQYLLKHFFKLSQTSSKNLLNARVLSEIFSPMLFRFSAASSDNTENLIKVIEILISTEWNERQPAPALPPKPPKPTTVANNGMNNNMSLQDAEWYWGDISREEVNEKLRDTADGTFLVRDASTKMHGDYTLTLRKGGNNKLIKIFHRDGKYGFSDPLTFSSVVELINHYRNESLAQYNPKLDVKLLYPVSKYQQDQVVKEDNIEAVGKKLHEYNTQFQEKSREYDRLYEEYTRTSQEIQMKRTAIEAFNETIKIFEEQCQTQERYSKEYIEKFKREGNEKEIQRIMHNYDKLKSRISEIIDSRRRLEEDLKKQAAEYREIDKRMNSIKPDLIQLRKTRDQYLMWLTQKGVRQKKLNEWLGNENTEENFLSCLPSQYSLVEDDEDLPHHDEKTWNVGSSNRNKAENLLRGKRDGTFLVRESSKQGCYACSVVVDGEVKHCVINKTATGYGFAEPYNLYSSLKELVLHYQHTSLVQHNDSLNVTLAYPVYAQQRR

SEQ ID NO: 4681 - protein, 361 aa, Homo sapiens
MHGDYTLTLRKGGNNKLIKIFHRDGKYGFSDPLTFSSVVELINHYRNESLAQYNPKLDVKLLYPVSKYQQDQVVKEDNIEAVGKKLHEYNTQFQEKSREYDRLYEEYTRTSQEIQMKRTAIEAFNETIKIFEEQCQTQERYSKEYIEKFKREGNEKEIQRIMHNYDKLKSRISEIIDSRRRLEEDLKKQAAEYREIDKRMNSIKPDLIQLRKTRDQYLMWLTQKGVRQKKLNEWLGNENTEDQYSLVEDDEDLPHHDEKTWNVGSSNRNKAENLLRGKRDGTFLVRESSKQGCYACSVVVDGEVKHCVINKTATGYGFAEPYNLYSSLKELVLHYQHTSLVQHNDSLNVTLAYPVYAQQRR

SEQ ID NO: 4682 - protein, 535 aa, Homo sapiens
MGSSATEIEELENTTFKYLTGEQTEKMWQRLKGILRCLVKQLERGDVNVVDLKKNIEYAASVLEAVYIDETRRLLDTEDELSDIQTDSVPSEVRDWLASTFTRKMGMTKKKPEEKPKFRSIVHAVQAGIFVERMYRKTYHMVGLAYPAAVIVTLKDVDKWSFDVFALNEASGEHSLKFMIYELFTRYDLINRFKIPVSCLITFAEALEVGYSKYKNPYHNLIHAADVTQTVHYIMLHTGIMHWLTELEILAMVFAAAIHDYEHTGTTNNFHIQTRSDVAILYNDRSVLENHHVSAAYRLMQEEEMNILINLSKDDWRDLRNLVIEMVLSTDMSGHFQQIKNIRNSLQQPEGIDRAKTMSLILHAADISHPAKSWKLHYRWTMALMEEFFLQGDKEAELGLPFSPLCDRKSTMVAQSQIGFIDFIVEPTFSLLTDSTEKIVIPLIEEASKAETSSYVASSSTTIVGLHIADALRRSNTKGSMSDGSYSPDYSLAAVDLKSFKNNLVDIIQQNKERWKELAAQEARTSSQKCEFIHQ

SEQ ID NO: 4683 - protein, 519 aa, Homo sapiens
MDDHVTIRKKHLQRPIFRLRCLVKQLERGDVNVVDLKKNIEYAASVLEAVYIDETRRLLDTEDELSDIQTDSVPSEVRDWLASTFTRKMGMTKKKPEEKPKFRSIVHAVQAGIFVERMYRKTYHMVGLAYPAAVIVTLKDVDKWSFDVFALNEASGEHSLKFMIYELFTRYDLINRFKIPVSCLITFAEALEVGYSKYKNPYHNLIHAADVTQTVHYIMLHTGIMHWLTELEILAMVFAAAIHDYEHTGTTNNFHIQTRSDVAILYNDRSVLENHHVSAAYRLMQEEEMNILINLSKDDWRDLRNLVIEMVLSTDMSGHFQQIKNIRNSLQQPEGIDRAKTMSLILHAADISHPAKSWKLHYRWTMALMEEFFLQGDKEAELGLPFSPLCDRKSTMVAQSQIGFIDFIVEPTFSLLTDSTEKIVIPLIEEASKAETSSYVASSSTTIVGLHIADALRRSNTKGSMSDGSYSPDYSLAAVDLKSFKNNLVDIIQQNKERWKELAAQEARTSSQKCEFIHQ

SEQ ID NO: 4684 - protein, 501 aa, Homo sapiens
MGKKINKLFCFNFLVQCFRGKSKPSKCQIRKKVKNHIERLLDTEDELSDIQTDSVPSEVRDWLASTFTRKMGMTKKKPEEKPKFRSIVHAVQAGIFVERMYRKTYHMVGLAYPAAVIVTLKDVDKWSFDVFALNEASGEHSLKFMIYELFTRYDLINRFKIPVSCLITFAEALEVGYSKYKNPYHNLIHAADVTQTVHYIMLHTGIMHWLTELEILAMVFAAAIHDYEHTGTTNNFHIQTRSDVAILYNDRSVLENHHVSAAYRLMQEEEMNILINLSKDDWRDLRNLVIEMVLSTDMSGHFQQIKNIRNSLQQPEGIDRAKTMSLILHAADISHPAKSWKLHYRWTMALMEEFFLQGDKEAELGLPFSPLCDRKSTMVAQSQIGFIDFIVEPTFSLLTDSTEKIVIPLIEEASKAETSSYVASSSTTIVGLHIADALRRSNTKGSMSDGSYSPDYSLAAVDLKSFKNNLVDIIQQNKERWKELAAQEARTSSQKCEFIHQ

SEQ ID NO: 4685 - protein, 545 aa, Homo sapiens
MGSSATEIEELENTTFKYLTGEQTEKMWQRLKGILRCLVKQLERGDVNVVDLKKNIEYAASVLEAVYIDETRRLLDTEDELSDIQTDSVPSEVRDWLASTFTRKMGMTKKKPEEKPKFRSIVHAVQAGIFVERMYRKTYHMVGLAYPAAVIVTLKDVDKWSFDVFALNEASGEHSLKFMIYELFTRYDLINRFKIPVSCLITFAEALEVGYSKYKNPYHNLIHAADVTQTVHYIMLHTGIMHWLTELEILAMVFAAAIHDYEHTGTTNNFHIQTRSDVAILYNDRSVLENHHVSAAYRLMQEEEMNILINLSKDDWRDLRNLVIEMVLSTDMSGHFQQIKNIRNSLQQPEGIDRAKTMSLILHAADISHPAKSWKLHYRWTMALMEEFFLQGDKEAELGLPFSPLCDRKSTMVAQSQIGFIDFIVEPTFSLLTDSTEKIVIPLIEEASKAETSSYVASSSTTIVGLHIADALRRSNTKGSMSDGSYSPDYSLAAVDLKSFKNNLVDIIQQNKERWKELAAQGESDLHKNSEDLVNAEEKHDETHS

SEQ ID NO: 4686 - protein, 552 aa, Homo sapiens
MGSSATEIEELENTTFKYLTGEQTEKMWQRLKGILRCLVKQLERGDVNVVDLKKNIEYAASVLEAVYIDETRRLLDTEDELSDIQTDSVPSEVRDWLASTFTRKMGMTKKKPEEKPKFRSIVHAVQAGIFVERMYRKTYHMVGLAYPAAVIVTLKDVDKWSFDVFALNEASGEHSLKFMIYELFTRYDLINRFKIPVSCLITFAEALEVGYSKYKNPYHNLIHAADVTQTVHYIMLHTGIMHWLTELEILAMVFAAAIHDYEHTGTTNNFHIQTRSDVAILYNDRSVLENHHVSAAYRLMQEEEMNILINLSKDDWRDLRNLVIEMVLSTDMSGHFQQIKNIRNSLQQPEGIDRAKTMSLILHAADISHPAKSWKLHYRWTMALMEEFFLQGDKEAELGLPFSPLCDRKSTMVAQSQIGFIDFIVEPTFSLLTDSTEKIVIPLIEEASKAETSSYVASSSTTIVGLHIADALRRSNTKGSMSDGSYSPDYSLAAVDLKSFKNNLVDIIQQNKERWKELAAQGSVVYEALLPSLSVFTSPLRVWITSSRFLLL

SEQ ID NO: 4687 - protein, 529 aa, Homo sapiens
MDDHVTIRKKHLQRPIFRLRCLVKQLERGDVNVVDLKKNIEYAASVLEAVYIDETRRLLDTEDELSDIQTDSVPSEVRDWLASTFTRKMGMTKKKPEEKPKFRSIVHAVQAGIFVERMYRKTYHMVGLAYPAAVIVTLKDVDKWSFDVFALNEASGEHSLKFMIYELFTRYDLINRFKIPVSCLITFAEALEVGYSKYKNPYHNLIHAADVTQTVHYIMLHTGIMHWLTELEILAMVFAAAIHDYEHTGTTNNFHIQTRSDVAILYNDRSVLENHHVSAAYRLMQEEEMNILINLSKDDWRDLRNLVIEMVLSTDMSGHFQQIKNIRNSLQQPEGIDRAKTMSLILHAADISHPAKSWKLHYRWTMALMEEFFLQGDKEAELGLPFSPLCDRKSTMVAQSQIGFIDFIVEPTFSLLTDSTEKIVIPLIEEASKAETSSYVASSSTTIVGLHIADALRRSNTKGSMSDGSYSPDYSLAAVDLKSFKNNLVDIIQQNKERWKELAAQGESDLHKNSEDLVNAEEKHDETHS

SEQ ID NO: 4688 - protein, 536 aa, Homo sapiens
MDDHVTIRKKHLQRPIFRLRCLVKQLERGDVNVVDLKKNIEYAASVLEAVYIDETRRLLDTEDELSDIQTDSVPSEVRDWLASTFTRKMGMTKKKPEEKPKFRSIVHAVQAGIFVERMYRKTYHMVGLAYPAAVIVTLKDVDKWSFDVFALNEASGEHSLKFMIYELFTRYDLINRFKIPVSCLITFAEALEVGYSKYKNPYHNLIHAADVTQTVHYIMLHTGIMHWLTELEILAMVFAAAIHDYEHTGTTNNFHIQTRSDVAILYNDRSVLENHHVSAAYRLMQEEEMNILINLSKDDWRDLRNLVIEMVLSTDMSGHFQQIKNIRNSLQQPEGIDRAKTMSLILHAADISHPAKSWKLHYRWTMALMEEFFLQGDKEAELGLPFSPLCDRKSTMVAQSQIGFIDFIVEPTFSLLTDSTEKIVIPLIEEASKAETSSYVASSSTTIVGLHIADALRRSNTKGSMSDGSYSPDYSLAAVDLKSFKNNLVDIIQQNKERWKELAAQGSVVYEALLPSLSVFTSPLRVWITSSRFLLL

SEQ ID NO: 4689 - protein, 511 aa, Homo sapiens
MGKKINKLFCFNFLVQCFRGKSKPSKCQIRKKVKNHIERLLDTEDELSDIQTDSVPSEVRDWLASTFTRKMGMTKKKPEEKPKFRSIVHAVQAGIFVERMYRKTYHMVGLAYPAAVIVTLKDVDKWSFDVFALNEASGEHSLKFMIYELFTRYDLINRFKIPVSCLITFAEALEVGYSKYKNPYHNLIHAADVTQTVHYIMLHTGIMHWLTELEILAMVFAAAIHDYEHTGTTNNFHIQTRSDVAILYNDRSVLENHHVSAAYRLMQEEEMNILINLSKDDWRDLRNLVIEMVLSTDMSGHFQQIKNIRNSLQQPEGIDRAKTMSLILHAADISHPAKSWKLHYRWTMALMEEFFLQGDKEAELGLPFSPLCDRKSTMVAQSQIGFIDFIVEPTFSLLTDSTEKIVIPLIEEASKAETSSYVASSSTTIVGLHIADALRRSNTKGSMSDGSYSPDYSLAAVDLKSFKNNLVDIIQQNKERWKELAAQGESDLHKNSEDLVNAEEKHDETHS

SEQ ID NO: 4690 - protein, 518 aa, Homo sapiens
MGKKINKLFCFNFLVQCFRGKSKPSKCQIRKKVKNHIERLLDTEDELSDIQTDSVPSEVRDWLASTFTRKMGMTKKKPEEKPKFRSIVHAVQAGIFVERMYRKTYHMVGLAYPAAVIVTLKDVDKWSFDVFALNEASGEHSLKFMIYELFTRYDLINRFKIPVSCLITFAEALEVGYSKYKNPYHNLIHAADVTQTVHYIMLHTGIMHWLTELEILAMVFAAAIHDYEHTGTTNNFHIQTRSDVAILYNDRSVLENHHVSAAYRLMQEEEMNILINLSKDDWRDLRNLVIEMVLSTDMSGHFQQIKNIRNSLQQPEGIDRAKTMSLILHAADISHPAKSWKLHYRWTMALMEEFFLQGDKEAELGLPFSPLCDRKSTMVAQSQIGFIDFIVEPTFSLLTDSTEKIVIPLIEEASKAETSSYVASSSTTIVGLHIADALRRSNTKGSMSDGSYSPDYSLAAVDLKSFKNNLVDIIQQNKERWKELAAQGSVVYEALLPSLSVFTSPLRVWITSSRFLLL

SEQ ID NO: 4691 - protein, 288 aa, Homo sapiens
MKLPIFIADAFTARAFRGNPAAVCLLENELDEDMHQKIAREMNLSETAFIRKLHPTDNFAQSSCFGLRWFTPASEVPLCGHATLASAAVLFHKIKNMNSTLTFVTLSGELRARRAEDGIVLDLPLYPAHPQDFHEVEDLIKTAIGNTLVQDICYSPDTQKLLVRLSDVYNRSFLENLKVNTENLLQVENTGKVKGLILTLKGEPGGQTQAFDFYSRYFAPWVGVAEDPVTGSAHAVLSSYWSQHLGKKEMHAFQCSHRGGELGISLRPDGRVDIRGGAAVVLEGTLTA

SEQ ID NO: 4692 - protein, 280 aa, Homo sapiens
MKLPIFIADAFTARAFRGNPAAVCLLENELDEDMHQKIAREMNLSETAFIRKLHPTDNFAQSSCFGLRWFTPASEVPLCGHATLASAAVLFHKIKNMNSTLTFVTLSGELRARRAEDGIVLDLPLYPAHPQDFHEVEDLIKTAIGNTLVQDICYSPDTQKLLVRLSDVYNRSFLENLKVNTENLLQVENTGKVKGLILTLKGEPGGQTQAFDFYSRYFAPWVGVAEDPVTGSAHAVLSSYWSQHLGKKEMHGRTALYQFLFYLPNSKLVFLLICTIPLKM

SEQ ID NO: 4693 - protein, 204 aa, Homo sapiens
MEAAGSPAATETGKYIASTQRPDGTWRKQRRVKEGYVPQEEVPVYENKYVKFFKSKPELPPGLSPEATAPVTPSRPEGGEPGLSKTAKRNLKRKEKRRQQQEKGEAEALSRTLDKVSLEETAQLPSAPQGSRAAPTAASDQPDSAATTEKAKKIKNLKKKLRQVEELQQRIQAGEVSQPSKEQLEKLARRRALEEELEDLELGL

SEQ ID NO: 4694 - protein, 203 aa, Homo sapiens
MATPYVTDETGGKYIASTQRPDGTWRKQRRVKEGYVPQEEVPVYENKYVKFFKSKPELPPGLSPEATAPVTPSRPEGGEPGLSKTAKRNLKRKEKRRQQQEKGEAEALSRTLDKVSLEETAQLPSAPQGSRAAPTAASDQPDSAATTEKAKKIKNLKKKLRQVEELQQRIQAGEVSQPSKEQLEKLARRRALEEELEDLELGL

SEQ ID NO: 4695 - protein, 229 aa, Homo sapiens
MSQGDSNPAAIPHAAEDIQGDDRWMSQHNRFVLDCKDKEPDVLFVGDSMVQLMQQYEIWRELFSPLHALNFGIGGDTTRHVLWRLKNGELENIKPKVIVVWVGTNNHENTAEEVAGGIEAIVQLINTRQPQAKIIVLGLLPRGEKPNPLRQKNAKVNQLLKVSLPKLANVQLLDTDGGFVHSDGAISCHDMFDFLHLTGGGYAKICKPLHELIMQLLEETPEEKQTTIA

SEQ ID NO: 4696 - protein, 155 aa, Homo sapiens
MSQGDSNPAAIPHAAEDIQGDDRWMSQHNRFVLDCKDKEPDVLFVGDSMVQLMQQYEIWRELFSPLHALNFGIGGDTTRHVLWRLKNGELENIKPKVIVVWVGTNNHENTAEEVAGGIEAIVQLINTRQPQAKIIVLIIYWQDEQDYHERKVQMD

SEQ ID NO: 4697 - protein, 132 aa, Homo sapiens
MSQGDSNPAAIPHAAEDIQGDDRWMSQHNRFVLDCKDKEPDVLFVGDSMVQLMQQYEIWRELFSPLHALNFGIGGDTTRHVLWRLKNGELENIKPKVIVVWVGTNNHENTAEEVAGGIEAIVQLINTRQPQA

SEQ ID NO: 4698 - protein, 202 aa, Homo sapiens
MSQGDSNPAAIPHAAEDIQGDDRWMSQHNRFVLDCKDKEPDVLFVGDSMVQLMQQYEIWRELFSPLHALNFGIGGDTTRHVLWRLKNGELENIKPKVIVVWVGTNNHENTAEEVAGGIEAIVQLINTRQPQAKIIVLGKAAASKYSISEIVRLEQGSVNWSIGTYPDDTPATTRPAILQLFTGKMSRITMKEKSRWTEEILH

SEQ ID NO: 4699 - protein, 95 aa, Homo sapiens
MGPSRLVRGPRPQGMRSPYRRPGMGWPRPRFPRMFKCSRRRYQQGLRGRTASSAAINPATRAMGINNTHTDTTIVWIFPPQVLRHLRQPGIFLIL

SEQ ID NO: 4700 - protein, 941 aa, Homo sapiens
MGQACGHSILCRSQQYPAARPAEPRGQQVFLKPDEPPPPPQPCADSLQDALLSLGSVIDISGLQRAVKEALSAVLPRVETVYTYLLDGESQLVCEDPPHELPQEGKVREAIISQKRLGCNGLGFSDLPGKPLARLVAPLAPDTQVLVMPLADKEAGAVAAVILVHCGQLSDNEEWSLQAVEKHTLVALRRVQVLQQRGPREAPRAVQNPPEGTAEDQKGGAAYTDRDRKILQLCGELYDLDASSLQLKVLQYLQQETRASRCCLLLVSEDNLQLSCKVIGDKVLGEEVSFPLTGCLGQVVEDKKSIQLKDLTSEDVQQLQSMLGCELQAMLCVPVISRATDQVVALACAFNKLEGDLFTDEDEHVIQHCFHYTSTVLTSTLAFQKEQKLKCECQALLQVAKNLFTHLDDVSVLLQEIITEARNLSNAEICSVFLLDQNELVAKVFDGGVVDDESYEIRIPADQGIAGHVATTGQILNIPDAYAHPLFYRGVDDSTGFRTRNILCFPIKNENQEVIGVAELVNKINGPWFSKFDEDLATAFSIYCGISIAHSLLYKKVNEAQYRSHLANEMMMYHMKVSDDEYTKLLHDGIQPVAAIDSNFASFTYTPRSLPEDDTSMAILSMLQDMNFINNYKIDCPTLARFCLMVKKGYRDPPYHNWMHAFSVSHFCYLLYKNLELTNYLEDIEIFALFISCMCHDLDHRGTNNSFQVASKSVLAALYSSEGSVMERHHFAQAIAILNTHGCNIFDHFSRKDYQRMLDLMRDIILATDLAHHLRIFKDLQKMAEVGYDRNNKQHHRLLLCLLMTSCDLSDQTKGWKTTRKIAELIYKEFFSQGDLEKAMGNRPMEMMDREKAYIPELQISFMEHIAMPIYKLLQDLFPKAAELYERVASNREHWTKVSHKFTIRGLPSNNSLDFLDEEYEVPDLDGTRAPINGCCSLDAE

SEQ ID NO: 4701 - protein, 920 aa, Homo sapiens
MRRQPAASLDPLAKEPGPPGSRDDRLEDALLSLGSVIDISGLQRAVKEALSAVLPRVETVYTYLLDGESQLVCEDPPHELPQEGKVREAIISQKRLGCNGLGFSDLPGKPLARLVAPLAPDTQVLVMPLADKEAGAVAAVILVHCGQLSDNEEWSLQAVEKHTLVALRRVQVLQQRGPREAPRAVQNPPEGTAEDQKGGAAYTDRDRKILQLCGELYDLDASSLQLKVLQYLQQETRASRCCLLLVSEDNLQLSCKVIGDKVLGEEVSFPLTGCLGQVVEDKKSIQLKDLTSEDVQQLQSMLGCELQAMLCVPVISRATDQVVALACAFNKLEGDLFTDEDEHVIQHCFHYTSTVLTSTLAFQKEQKLKCECQALLQVAKNLFTHLDDVSVLLQEIITEARNLSNAEICSVFLLDQNELVAKVFDGGVVDDESYEIRIPADQGIAGHVATTGQILNIPDAYAHPLFYRGVDDSTGFRTRNILCFPIKNENQEVIGVAELVNKINGPWFSKFDEDLATAFSIYCGISIAHSLLYKKVNEAQYRSHLANEMMMYHMKVSDDEYTKLLHDGIQPVAAIDSNFASFTYTPRSLPEDDTSMAILSMLQDMNFINNYKIDCPTLARFCLMVKKGYRDPPYHNWMHAFSVSHFCYLLYKNLELTNYLEDIEIFALFISCMCHDLDHRGTNNSFQVASKSVLAALYSSEGSVMERHHFAQAIAILNTHGCNIFDHFSRKDYQRMLDLMRDIILATDLAHHLRIFKDLQKMAEVGYDRNNKQHHRLLLCLLMTSCDLSDQTKGWKTTRKIAELIYKEFFSQGDLEKAMGNRPMEMMDREKAYIPELQISFMEHIAMPIYKLLQDLFPKAAELYERVASNREHWTKVSHKFTIRGLPSNNSLDFLDEEYEVPDLDGTRAPINGCCSLDAE

SEQ ID NO: 4702 - protein, 934 aa, Homo sapiens
MVLVLHHILIAVVQFLRRGQQVFLKPDEPPPPPQPCADSLQDALLSLGSVIDISGLQRAVKEALSAVLPRVETVYTYLLDGESQLVCEDPPHELPQEGKVREAIISQKRLGCNGLGFSDLPGKPLARLVAPLAPDTQVLVMPLADKEAGAVAAVILVHCGQLSDNEEWSLQAVEKHTLVALRRVQVLQQRGPREAPRAVQNPPEGTAEDQKGGAAYTDRDRKILQLCGELYDLDASSLQLKVLQYLQQETRASRCCLLLVSEDNLQLSCKVIGDKVLGEEVSFPLTGCLGQVVEDKKSIQLKDLTSEDVQQLQSMLGCELQAMLCVPVISRATDQVVALACAFNKLEGDLFTDEDEHVIQHCFHYTSTVLTSTLAFQKEQKLKCECQALLQVAKNLFTHLDDVSVLLQEIITEARNLSNAEICSVFLLDQNELVAKVFDGGVVDDESYEIRIPADQGIAGHVATTGQILNIPDAYAHPLFYRGVDDSTGFRTRNILCFPIKNENQEVIGVAELVNKINGPWFSKFDEDLATAFSIYCGISIAHSLLYKKVNEAQYRSHLANEMMMYHMKVSDDEYTKLLHDGIQPVAAIDSNFASFTYTPRSLPEDDTSMAILSMLQDMNFINNYKIDCPTLARFCLMVKKGYRDPPYHNWMHAFSVSHFCYLLYKNLELTNYLEDIEIFALFISCMCHDLDHRGTNNSFQVASKSVLAALYSSEGSVMERHHFAQAIAILNTHGCNIFDHFSRKDYQRMLDLMRDIILATDLAHHLRIFKDLQKMAEVGYDRNNKQHHRLLLCLLMTSCDLSDQTKGWKTTRKIAELIYKEFFSQGDLEKAMGNRPMEMMDREKAYIPELQISFMEHIAMPIYKLLQDLFPKAAELYERVASNREHWTKVSHKFTIRGLPSNNSLDFLDEEYEVPDLDGTRAPINGCCSLDAE

SEQ ID NO: 4703 - protein, 932 aa, Homo sapiens
MKKQRIQEGKSLAHRRGQQVFLKPDEPPPPPQPCADSLQDALLSLGSVIDISGLQRAVKEALSAVLPRVETVYTYLLDGESQLVCEDPPHELPQEGKVREAIISQKRLGCNGLGFSDLPGKPLARLVAPLAPDTQVLVMPLADKEAGAVAAVILVHCGQLSDNEEWSLQAVEKHTLVALRRVQVLQQRGPREAPRAVQNPPEGTAEDQKGGAAYTDRDRKILQLCGELYDLDASSLQLKVLQYLQQETRASRCCLLLVSEDNLQLSCKVIGDKVLGEEVSFPLTGCLGQVVEDKKSIQLKDLTSEDVQQLQSMLGCELQAMLCVPVISRATDQVVALACAFNKLEGDLFTDEDEHVIQHCFHYTSTVLTSTLAFQKEQKLKCECQALLQVAKNLFTHLDDVSVLLQEIITEARNLSNAEICSVFLLDQNELVAKVFDGGVVDDESYEIRIPADQGIAGHVATTGQILNIPDAYAHPLFYRGVDDSTGFRTRNILCFPIKNENQEVIGVAELVNKINGPWFSKFDEDLATAFSIYCGISIAHSLLYKKVNEAQYRSHLANEMMMYHMKVSDDEYTKLLHDGIQPVAAIDSNFASFTYTPRSLPEDDTSMAILSMLQDMNFINNYKIDCPTLARFCLMVKKGYRDPPYHNWMHAFSVSHFCYLLYKNLELTNYLEDIEIFALFISCMCHDLDHRGTNNSFQVASKSVLAALYSSEGSVMERHHFAQAIAILNTHGCNIFDHFSRKDYQRMLDLMRDIILATDLAHHLRIFKDLQKMAEVGYDRNNKQHHRLLLCLLMTSCDLSDQTKGWKTTRKIAELIYKEFFSQGDLEKAMGNRPMEMMDREKAYIPELQISFMEHIAMPIYKLLQDLFPKAAELYERVASNREHWTKVSHKFTIRGLPSNNSLDFLDEEYEVPDLDGTRAPINGCCSLDAE

SEQ ID NO: 4704 - protein, 685 aa, Homo sapiens
MVLVLHHILIAVVQFLRRGQQVFLKPDEPPPPPQPCADSLQDALLSLGSVIDISGLQRAVKEALSAVLPRVETVYTYLLDGESQLVCEDPPHELPQEGKVRFTDEDEHVIQHCFHYTSTVLTSTLAFQKEQKLKCECQALLQVAKNLFTHLDDVSVLLQEIITEARNLSNAEICSVFLLDQNELVAKVFDGGVVDDESYEIRIPADQGIAGHVATTGQILNIPDAYAHPLFYRGVDDSTGFRTRNILCFPIKNENQEVIGVAELVNKINGPWFSKFDEDLATAFSIYCGISIAHSLLYKKVNEAQYRSHLANEMMMYHMKVSDDEYTKLLHDGIQPVAAIDSNFASFTYTPRSLPEDDTSMAILSMLQDMNFINNYKIDCPTLARFCLMVKKGYRDPPYHNWMHAFSVSHFCYLLYKNLELTNYLEDIEIFALFISCMCHDLDHRGTNNSFQVASKSVLAALYSSEGSVMERHHFAQAIAILNTHGCNIFDHFSRKDYQRMLDLMRDIILATDLAHHLRIFKDLQKMAEVGYDRNNKQHHRLLLCLLMTSCDLSDQTKGWKTTRKIAELIYKEFFSQGDLEKAMGNRPMEMMDREKAYIPELQISFMEHIAMPIYKLLQDLFPKAAELYERVASNREHWTKVSHKFTIRGLPSNNSLDFLDEEYEVPDLDGTRAPINGCCSLDAE

SEQ ID NO: 4705 - protein, 786 aa, Homo sapiens
MRRQPAASLDPLAKEPGPPGSRDDRLEDALLSLGSVIDISGLQRAVKEALSAVLPRVETVYTYLLDGESQLVCEDPPHELPQEGKVREAIISQKRLGCNGLGFSDLPGKPLARLVAPLAPDTQVLVMPLADKEAGAVAAVILVHCGQLSDNEEWSLQAVEKHTLVALRRVQVLQQRGPREAPRAVQNPPEGTAEDQKGGAAYTDRDRKILQLCGELYDLDASSLQLKVLQYLQQETRASRCCLLLVSEDNLQLSCKVIGDKVLGEEVSFPLTGCLGQVVEDKKSIQLKDLTSEDVQQLQSMLGCELQAMLCVPVISRATDQVVALACAFNKLEGDLFTDEDEHVIQHCFHYTSTVLTSTLAFQKEQKLKCECQALLQVAKNLFTHLDDVSVLLQEIITEARNLSNAEICSVFLLDQNELVAKVFDGGVVDDESYEIRIPADQGIAGHVATTGQILNIPDAYAHPLFYRGVDDSTGFRTRNILCFPIKNENQEVIGVAELVNKINGPWFSKFDEDLATAFSIYCGISIAHSLLYKKVNEAQYRSHLANEMMMYHMKVSDDEYTKLLHDGIQPVAAIDSNFASFTYTPRSLPEDDTSMAILSMLQDMNFINNYKIDCPTLARFCLMVKKGYRDPPYHNWMHAFSVSHFCYLLYKNLELTNYLEDIEIFALFISCMCHDLDHRGTNNSFQVASKSVLAALYSSEGSVMERHHFAQAIAILNTHGCNIFDHFPLRTTTILMVGLGPGGYRGPRKKLPEGQLSALQRGALGRSRMGLMGRRDPRTGRQAQV

SEQ ID NO: 4706 - protein, 720 aa, Homo sapiens
MELGCWTQLGLTFLQLLLISSLPREYTVINEACPGAEWNIMCRECCEYDQIECVCPGKREVVGYTIPCCRNEENECDSCLIHPGCTIFENCKSCRNGSWGGTLDDFYVKGFYCAECRAGWYGGDCMRCGQVLRAPKGQILLESYPLNAHCEWTIHAKPGFVIQLRFVMLSLEFDYMCQYDYVEVRDGDNRDGQIIKRVCGNERPAPIQSIGSSLHVLFHSDGSKNFDGFHAIYEEITACSSSPCFHDGTCVLDKAGSYKCACLAGYTGQRCENLLEERNCSDPGGPVNGYQKITGGPGLINGRHAKIGTVVSFFCNNSYVLSGNEKRTCQQNGEWSGKQPICIKACREPKISDLVRRRVLPMQVQSRETPLHQLYSAAFSKQKLQSAPTKKPALPFGDLPMGYQHLHTQLQYECISPFYRRLGSSRRTCLRTGKWSGRAPSCIPICGKIENITAPKTQGLRWPWQAAIYRRTSGVHDGSLHKGAWFLVCSGALVNERTVVVAAHCVTDLGKVTMIKTADLKVVLGKFYRDDDRDEKTIQSLQISAIILHPNYDPILLDADIAILKLLDKARISTRVQPICLAASRDLSTSFQESHITVAGWNVLADVRSPGFKNDTLRSGVVSVVDSLLCEEQHEDHGIPVSVTDNMFCASWEPTAPSDICTAETGGIAAVSFPGRASPEPRWHLMGLVSWSYDKTCSHRLSTAFTKVLPFKDWIERNMK

SEQ ID NO: 4707 - protein, 737 aa, Homo sapiens
MELGCWTQLGLTFLQLLLISSLPREYTVINEACPGAEWNIMCRECCEYDQIECVCPGKREVVGYTIPCCRNEENECDSCLIHPGCTIFENCKSCRNGSWGGTLDDFYVKGFYCAECRAGWYGGDCMRCGQVLRAPKGQILLESYPLNAHCEWTIHAKPGFVIQLRFVMLSLEFDYMCQYDYVEVRDGDNRDGQIIKRVCGNERPAPIQSIGSSLHVLFHSDGSKNFDGFHAIYEEITACSSSPCFHDGTCVLDKAGSYKCACLAGYTGQRCENLLEAGKSKIKASEDSLSVLEERNCSDPGGPVNGYQKITGGPGLINGRHAKIGTVVSFFCNNSYVLSGNEKRTCQQNGEWSGKQPICIKACREPKISDLVRRRVLPMQVQSRETPLHQLYSAAFSKQKLQSAPTKKPALPFGDLPMGYQHLHTQLQYECISPFYRRLGSSRRTCLRTGKWSGRAPSCIPICGKIENITAPKTQGLRWPWQAAIYRRTSGVHDGSLHKGAWFLVCSGALVNERTVVVAAHCVTDLGKVTMIKTADLKVVLGKFYRDDDRDEKTIQSLQISAIILHPNYDPILLDADIAILKLLDKARISTRVQPICLAASRDLSTSFQESHITVAGWNVLADVRSPGFKNDTLRSGVVSVVDSLLCEEQHEDHGIPVSVTDNMFCASWEPTAPSDICTAETGGIAAVSFPGRASPEPRWHLMGLVSWSYDKTCSHRLSTAFTKVLPFKDWIERNMK

SEQ ID NO: 4708 - protein, 609 aa, Homo sapiens
MELGCWTQLGLTFLQLLLISSLPREYTVINEACPGAEWNIMCRECCEYDQIECVCPGKREVVGYTIPCCRNEENECDSCLIHPGCTIFENCKSCRNGSWGGTLDDFYVKGFYCAECRAGWYGGDCMPCSSSPCFHDGTCVLDKAGSYKCACLAGYTGQRCENLLEERNCSDPGGPVNGYQKITGGPGLINGRHAKIGTVVSFFCNNSYVLSGNEKRTCQQNGEWSGKQPICIKACREPKISDLVRRRVLPMQVQSRETPLHQLYSAAFSKQKLQSAPTKKPALPFGDLPMGYQHLHTQLQYECISPFYRRLGSSRRTCLRTGKWSGRAPSCIPICGKIENITAPKTQGLRWPWQAAIYRRTSGVHDGSLHKGAWFLVCSGALVNERTVVVAAHCVTDLGKVTMIKTADLKVVLGKFYRDDDRDEKTIQSLQISAIILHPNYDPILLDADIAILKLLDKARISTRVQPICLAASRDLSTSFQESHITVAGWNVLADVRSPGFKNDTLRSGVVSVVDSLLCEEQHEDHGIPVSVTDNMFCASWEPTAPSDICTAETGGIAAVSFPGRASPEPRWHLMGLVSWSYDKTCSHRLSTAFTKVLPFKDWIERNMK

SEQ ID NO: 4709 - protein, 502 aa, Homo sapiens [sequence omitted]

SEQ ID NO: 4710 - protein, 423 aa, Homo sapiens
MAAAAVTGQRPETAAAEEASRPQWAPPDHCQAQAAAGLGDGEDAPVRPLCKPRGICSRAYFLVLMVFVHLYLGNVLALLLFVHYSNGDESSDPGPQHRAQGPGPEPTLGPLTRLEGIKVGHERKVQLVTDRDHFIRTLSLKPLLFEIPGFLTDEECRLIIHLAQMKGLQRSQILPTEEYEEAMSTMQVSQLDLFRLLDQNRDGHLQLREVLAQTRLGNGWWMTPESIQEMYAAIKADPDGDGVLSLQEFSNMDLRDFHKYMRSHKAESSELVRNSHHTWLYQGEGAHHIMRAIRQRVLRLTRLSPEIVELSEPLQVVRYGEGGHYHAHVDSGPVYPETICSHTKLVANESVPFETSCRQVSPNWGLPSILRPGTPMTQAQPCTVGVPLGMGPGDHWVIPVSDALTSPHKLFTQWLERGGYWSS

SEQ ID NO: 4711 - protein, 563 aa, Homo sapiens
MAAAAVTGQRPETAAAEEASRPQWAPPDHCQAQAAAGLGDGEDAPVRPLCKPRGICSRAYFLVLMVFVHLYLGNVLALLLFVHYSNGDESSDPGPQHRAQGPGPEPTLGPLTRLEGIKVGHERKVQLVTDRDHFIRTLSLKPLLFEIPGFLTDEECRLIIHLAQMKGLQRSQILPTEEYEEAMSTMQVSQLDLFRLLDQNRDGHLQLREVLAQTRLGNGWWMTPESIQEMYAAIKADPDGDGVLSLQEFSNMDLRDFHKYMRSHKAESSELVRNSHHTWLYQGEGAHHIMRAIRQRVLRLTRLSPEIVELSEPLQVVRYGEGGHYHAHVDSGPVYPETICSHTKLVANESVPFETSCRQVSPNWGLPSILRPGTPMTQAQPCTVGVPLGMGPGDHWVIPVSPWEHPQLGTCSVPPLPYSYMTVLFYLNNVTGGGETVFPVADNRTYDEMSLIQDDVDLRDTRRHCDKGNLRVKPQQGTAVFWYNYLPDGQGWVGDVDDYSLHGGCLVTRGTKWIANNWINVDPSRARQALFQQEMARLAREGGTDSQPEWALDRAYRDARVEL

SEQ ID NO: 4712 - protein, 849 aa, Homo sapiens
MSDTRRRVKVYTLNEDRQWDDRGTGHVSSTYVEELKGMSLLVRAESDGSLLLESKINPNTAYQKQQDTLIVWSEAENYDLALSFQEKAGCDEIWEKICQVQGKDPSVEVTQDLIDESEEERFEEMPETSHLIDLPTCELNKLEEIADLVTSVLSSPIRREKLALALENEGYIKKLLQLFQACENLENTEGLHHLYEIIRGILFLNKATLFEVMFSDECIMDVVGCLEYDPALAQPKRHREFLTKTAKFKEVIPITDSELRQKIHQTYRVQYIQDIILPTPSVFEENFLSTLTSFIFFNKVEIVSMLQEDEKFLSEVFAQLTDEATDDDKRRELVNFFKEFCAFSQTLQPQNRDAFFKTLAKLGILPALEIVMGMDDLQVRSAATDIFSYLVEFSPSMVREFVMQEAQQSDDDILLINVVIEQMICDTDPELGGAVQLMGLLRTLIDPENMLATTNKTEKSEFLNFFYNHCMHVLTAPLLTNTSEDKCEKDFFLKHYRYSWSFICTPSHSHSHSTPSSSISQDNIVGSNKNNTICPDNYQTAQLLALILELLTFCVEHHTYHIKNYIMNKDLLRRVLVLMNSKHTFLALCALRFMRRIIGLKDEFYNRYITKGNLFEPVINALLDNGTRYNLLNSAVIELFEFIRVEDIKSLTAHIVENFYKALESIEYVQTFKGLKTKYEQEKDRQNQKLNSVPSILRSNRFRRDAKALEEDEEMWFNEDEEEEGKAVVAPVEKPKPEDDFPDNYEKFMETKKAKESEDKENLPKRTSPGGFKFTFSHSASAANGTNSKSVVAQIPPATSNGSSSKTTNLPTSVTATKGSLVGLVDYPDDEEEDEEEESSPRKRPRLGS

SEQ ID NO: 4713 - protein, 817 aa, Homo sapiens
MSDTRRRVKVYTLNEDRQWDDRGTGHVSSTYVEELKGMSLLVRAESDGSLLLESKINPNTAYQKQQDTLIVWSEAENYDLALSFQEKAGCDEIWEKICQVQGKDPSVEVTQDLIDESEEERFEEMPETSHLIDLPTCELNKLEEIADLVTSVLSSPIRREKLALALENEGYIKKLLQLFQACENLENTEGLHHLYEIIRGILFLNKATLFEVMFSDECIMDVVGCLEYDPALAQPKRHREFLTKTAKFKEVIPITDSELRQKIHQTYRVQYIQDIILPTPSVFEENFLSTLTSFIFFNKVEIVSMLQEDEKFLSEVFAQLTDEATDDDKRRELVNFFKEFCAFSQTLQPQNRDAFFKTLAKLGILPALEIVMGMDDLQVRSAATDIFSYLVEFSPSMVREFVMQEAQQSDDDILLINVVIEQMICDTDPELGGAVQLMGLLRTLIDPENMLATTNKTEKSEFLNFFYNHCMHVLTAPLLTNTSEDKCEKDNIVGSNKNNTICPDNYQTAQLLALILELLTFCVEHHTYHIKNYIMNKDLLRRVLVLMNSKHTFLALCALRFMRRIIGLKDEFYNRYITKGNLFEPVINALLDNGTRYNLLNSAVIELFEFIRVEDIKSLTAHIVENFYKALESIEYVQTFKGLKTKYEQEKDRQNQKLNSVPSILRSNRFRRDAKALEEDEEMWFNEDEEEEGKAVVAPVEKPKPEDDFPDNYEKFMETKKAKESEDKENLPKRTSPGGFKFTFSHSASAANGTNSKSVVAQIPPATSNGSSSKTTNLPTSVTATKGSLVGLVDYPDDEEEDEEEESSPRKRPRLGS

SEQ ID NO: 4714 - protein, 764 aa, Homo sapiens
MSDTRRRVKVYTLNEDRQWDDRGTGHVSSTYVEELKGMSLLVRAESDGSLLLESKINPNTAYQKQQDTLIVWSEAENYDLALSFQEKAGCDEIWEKICQVQGKDPSVEVTQDLIDESEEERFEEMPETSHLIDLPTCELNKLEEIADLVTSVLSSPIRREKLALALENEGYIKKLLQLFQACENLENTEGLHHLYEIIRGILFLNKATLFEVMFSDECIMDVVGCLEYDPALAQPKRHREFLTKTAKFKEVIPITDSELRQKIHQTYRVQYIQDIILPTPSVFEENFLSTLTSFIFFNKVEIVSMLQEDEKFLSEVFAQLTDEATDDDKRRELVNFFKEFCAFSQTLQPQNRDAFFKTLAKLGILPALEIVMGMDDLQVRSAATDIFSYLVEFSPSMVREFVMQEAQQSDDDILLINVVIEQMICDTDPELGGAVQLMGLLRTLIDPENMLATTNKTEKSEFLNFFYNHCMHVLTAPLLTNTSEDKCEKDNIVGSNKNNTICPGALRFMRRIIGLKDEFYNRYITKGNLFEPVINALLDNGTRYNLLNSAVIELFEFIRVEDIKSLTAHIVENFYKALESIEYVQTFKGLKTKYEQEKDRQNQKLNSVPSILRSNRFRRDAKALEEDEEMWFNEDEEEEGKAVVAPVEKPKPEDDFPDNYEKFMETKKAKESEDKENLPKRTSPGGFKFTFSHSASAANGTNSKSVVAQIPPATSNGSSSKTTNLPTSVTATKGSLVGLVDYPDDEEEDEEEESSPRKRPRLGS

SEQ ID NO: 4715 - protein, 55 aa, Homo sapiens
MSDTRRRVKVYTLNEDRQWDDRGTGHVSSTYVEELKGMSLLVRAESDGKVIGTVE

SEQ ID NO: 4716 - protein, 276 aa, Homo sapiens
MNKDLLRRVLVLMNSKHTFLALCALRFMRRIIGLKDEFYNRYITKGNLFEPVINALLDNGTRYNLLNSAVIELFEFIRVEDIKSLTAHIVENFYKALESIEYVQTFKGLKTKYEQEKDRQNQKLNSNRFRRDAKALEEDEEMWFNEDEEEEGKAVVAPVEKPKPEDDFPDNYEKFMETKKAKESEDKENLPKRTSPGGFKFTFSHSASAANGTNSKSVVAQIPPATSNGSSSKTTNLPTSVTATKGSLVGLVDYPDDEEEDEEEESSPRKRPRLGS

SEQ ID NO: 4717 - protein, 545 aa, Homo sapiens
MSNNGLDIQDKPPAPPMRNTSTMIGAGSKDAGTLNHGSKPLPPNPEEKKKKDRFYRSILPGDKTNKKKEKERPEISLPSDFEHTIHVGFDAVTGEFTGMPEQWARLLQTSNITKSEQKKNPQAVLDVLEFYNSKKTSNSQKYMSFTDKSAEDYNSSNALNVKAVSETPAVPPVSEDEDDDDDDATPPPVIAPRPEHTKSVYTRSVIEPLPVTPTRDVATSPISPTENNTTPPDALTRNTEKQKKKPKMSDEEILEKLRSIVSVGDPKKKYTRFEKIGQGASGTVYTAMDVATGQEVAIKQMNLQQQPKKELIINEILVMRENKNPNIVNYLDSYLVGDELWVVMEYLAGGSLTDVVTETCMDEGQIAAVCRECLQALEFLHSNQVIHRDIKSDNILLGMDGSVKLTDFGFCAQITPEQSKRSTMVGTPYWMAPEVVTRKAYGPKVDIWSLGIMAIEMIEGEPPYLNENPLRALYLIATNGTPELQNPEKLSAIFRDFLNRCLEMDVEKRGSAKELLQHQFLKIAKPLSSLTPLIAAAKEATKNNH

SEQ ID NO: 4718 - protein, 553 aa, Homo sapiens
MSNNGLDIQDKPPAPPMRNTSTMIGAGSKDAGTLNHGSKPLPPNPEEKKKKDRFYRSILPGDKTNKKKEKERPEISLPSDFEHTIHVGFDAVTGEFTGMPEQWARLLQTSNITKSEQKKNPQAVLDVLEFYNSKKTSNSQKYMSFTDKSAEDYNSSNALNVKAVSETPAVPPVSEDEDDDDDDATPPPVIAPRPEHTKSVYTRSVIEPLPVTPTRDVATSPISPTENNTTPPDALTRNTEKQKKKPKMSDEEILEKLRSIVSVGDPKKKYTRFEKIGQGASGTVYTAMDVATGQEVAIKQMNLQQQPKKELIINEILVMRENKNPNIVNYLDSYLVGDELWVVMEYLAGGSLTDVVTETCMDEGQIAAVCRECLQALEFLHSNQVIHRDIKSDNILLGMDGSVKLTDFGFCAQITPEQSKRSTMVGTPYWMAPEVVTRKAYGPKVDIWSLGIMAIEMIEGEPPYLNENPLRALYLIATNGTPELQNPEKLSAIFRDFLNRCLEMDVEKRGSAKELLQVRKLRFQVFSNFSMIAASIPEDCQAPLQPHSTDCCS

SEQ ID NO: 4719 - protein, 128 aa, Homo sapiens
MPGMRLVCRLAHGHFPRKGQRRRSLTVWKAETSRADCLGAPNIRTAPLGRSEKRTAICFSTGAQDSSQRAPFRLQNPGQLLQLGMHSLHLHPELPTTDPAFFCKLHFIKGNDPYCLTISHVKSVLTFS

SEQ ID NO: 4720 - protein, 91 aa, Homo sapiens
MPGMRLVCRLAHGHFPRKGQRRRSLTVWKAETSRADCLGAPNIRTAPLGRSEKRTAICFSTGAQDSSQRAPFRLQNPGQLLQPPKVLGLQA

SEQ ID NO: 4721 - protein, 105 aa, Homo sapiens
MNPSEMQRKAPPRRRRHRNRAPSSHKMNKMMMSEEQMKLPSTNKAEPLTWAQLNKLTQLATKCLENTKMTQTPESMLLAALMIVSTVSAGVPNSSEETVTIENGP

SEQ ID NO: 4722 - protein, 888 aa, Homo sapiens
MDRSSKRRQVKPLAASLLEALDYDSSDDSDFKVGDASDSEGSGNGSEDASKDSGEGSCSDSEENILEEELNEDIKVKEEQLKNSAEEEVLSSEKQLIKMEKKEEEENGERPRKKKEKEKEKEKEKEKEKEREKEKEKATVSENVAASAAATTPATSPPAVNTSPSVPTTTTATEEQVSEPKKWNLRRNRPLLDFVSMEELNDMDDYDSEDDNDWRPTVVKRKGRSASQKEGSDGDNEDDEDEGSGSDEDENDEGNDEDHSSPASEGGCKKKKSKVLSRNSADDEELTNDSLTLSQSKSNEDSLILEKSQNWSSQKMDHILICCVCLGDNSEDADEIIQCDNCGITVHEGCYGVDGESDSIMSSASENSTEPWFCDACKCGVSPSCELCPNQDGIFKETDAGRWVHIVCALYVPGVAFGDIDKLRPVTLTEMNYSKYGAKECSFCEDPRFARTGVCISCDAGMCRAYFHVTCAQKEGLLSEAAAEEDIADPFFAYCKQHADRLDRKWKRKNYLALQSYCKMSLQEREKQLSPEAQARINARLQQYRAKAELARSTRPQAWVPREKLPRPLTSSASAIRKLMRKAELMGISTDIFPVDNSDTSSSVDGRRKHKQPALTADFVNYYFERNMRMIQIQENMAEQKNIKDKLENEQEKLHVEYNKLCESLEELQNLNGKLRSEGQGIWALLGRITGQKLNIPAILRAPKERKPSKKEGGTQKTSTLPAVLYSCGICKKNHDQHLLLLCDTCKLHYHLGCLDPPLTRMPRKTKNSYWQCSECDQAGSSDMEADMAMETLPDGTKRSRRQIKEPVKFVPQDVPPEPKKIPIRNTRTRGRKRSFVPEEEKHEERVPRERRQRQSVLQKKPKAEDLRTECATCKGTGDNENLVRYPS

SEQ ID NO: 4723 - protein, 663 aa, Homo sapiens
MIVQMTVILKLEMPQDSLILEKSQNWSSQKMDHILICCVCLGDNSEDADEIIQCDNCGITVHEGCYGVDGESDSIMSSASENSTEPWFCDACKCGVSPSCELCPNQDGIFKETDAGRWVHIVCALYVPGVAFGDIDKLRPVTLTEMNYSKYGAKECSFCEDPRFARTGVCISCDAGMCRAYFHVTCAQKEGLLSEAAAEEDIADPFFAYCKQHADRLDRKWKRKNYLALQSYCKMSLQEREKQLSPEAQARINARLQQYRAKAELARSTRPQAWVPREKLPRPLTSSASAIRKLMRKAELMGISTDIFPVDNSDTSSSVDGRRKHKQPALTADFVNYYFERNMRMIQIQENMAEQKNIKDKLENEQEKLHVEYNKLCESLEELQNLNGKLRSEGQGIWALLGRITGQKLNIPAILRAPKERKPSKKEGGTQKTSTLPAVLYSCGICKKNHDQHLLLLCDTCKLHYHLGCLDPPLTRMPRKTKNSYWQCSECDQAGSSDMEADMAMETLPDGTKRSRRQIKEPVKFVPQDVPPEPKKIPIRNTRTRGRKRSFVPEEEKHEERVPRERRQRQSVLQKKPKAEDLRTECATCKGTGDNENLVRCDECRLCYHFGCLDPPLKKSPKQTGYGWICQECDSSSSKEDENEAERKNISQELNMEQKNPKK

SEQ ID NO: 4724 - protein, 1012 aa, Homo sapiens
MTKHPPNRRGISFEVGAQLEARDRLKNWYPAHIEDIDYEEGKVLIHFKRWNHRYDEWFCWDSPYLRPLEKIQLRKEGLHEEDGSSEFQINEQVLACWSDCRFYPAKVTAVNKDGTYTVKFYDGVVQTVKHIHVKAFSKDQNIVGNARPKETDHKSLSSSPDKREKFKEQRKATVNVKKDKEDKPLKTEKRPKQPDKEGKLICSEKGKVSEKSLPKNEKEDKENISENDREYSGDAQVDKKPENDIVKSPQENLREPKRKRGRPPSIAPTAVDSNSQTLQPITLELRRRKISKGCEVPLKRPRLDKNSSQEKSKNYSENTDKDLSRRRSSRLSTNGTHEILDPDLVVSDLVDTDPLQDTLSSTKESEEGQLKSALEAGQVSSALTCHSFGDGSGAAGLELNCPSMGENTMKTEPTSPLVELQEISTVEVTNTFKKTDDFGSSNAPAVDLDHKFRCKVVDCLKFFRKAKLLHYHMKYFHGMEKSLEPEESPGKRHVQTRGPSASDKPSQETLTRKRVSASSPTTKDKEKNKEKKFKEFVRVKPKKKKKKKKKTKPECPCSEEISDTSQEPSPPKAFAVTRCGSSHKPGVHMSPQLHGPESGHHKGKVKALEEDNLSESSSESFLWSDDEYGQDVDVTTNPDEELDGDDRYDFEVVRCICEVQEENDFMIQCEECQCWQHGVCMGLLEENVPEKYTCYVCQDPPGQRPGFKYWYDKEWLSRGHMHGLAFLEENYSHQNAKKIVATHQLLGDVQRVIEVLHGLQLKMSILQSREHPDLPLWCQPWKQHSGEGRSHFRNIPVTDTRSKEEAPSYRTLNGAVEKPRPLALPLPRSVEESYITSEHCYQKPRAYYPAVEQKLVVETRGSALDDAVNPLHENGDDSLSPRLGWPLDQDRSKGDSDPKPGSPKVKEYVSKKALPEEAPARKLLDRGGEGLLSSQHQWQFNLLTHVESLQDEVTHRMDSIEKELDVLESWLDYTGELEPPEPLARLPQLKHCIKQLLMDLGKVQQIALCCST

SEQ ID NO: 4725 - protein, 272 aa, Homo sapiens
MTKHPPNRRGISFEVGAQLEARDRLKNWYPAHIEDIDYEEGKVLIHFKRWNHRYDEWFCWDSPYLRPLEKIQLRKEGLHEEDGSSEFQINEQVLACWSDCRFYPAKVTAVNKDGTYTVKFYDGVVQTVKHIHVKAFSKDQNIVGNARPKETDHKSLSSSPDKREKFKEQRKATVNVKKDKEDKPLKTEKRPKQPDKEGKLICSEKGKVSEKSLPKNEKEDKENISENDREYSGDAQKTRQTPFHSSYCCGFKLSNFATNNIGTEKKENIKRM

SEQ ID NO: 4726 - protein, 377 aa, Homo sapiens
MDPAARVVRALWPGGCALAWRLGGRPQPLLPTQSRAGFAGAAGGPSPVAAARKGSPRLLGAAALALGGALGLYHTARWHLRAQDLHAERSAAQLSLSSRLQLTLYQYKTCPFCSKVRAFLDFHALPYQVVEVNPVRRAEIKFSSYRKVPILVAQEGESSQQLNDSSVIISALKTYLVSGQPLEEIITYYPAMKAVNEQGKEVTEFGNKYWLMLNEKEAQQVYGGKEARTEEMKWRQWADDWLVHLISPNVYRTPTEALASFDYIVREGKFGAVEGAVAKYMGAAAMYLISKRLKSRHRLQDNVREDLYEAADKWVAAVGKDRPFMGGQKPNLADLAVYGVLRVMEGLDAFDDLMQHTHIQPWYLRVERAITEASPAH

SEQ ID NO: 4727 - protein, 634 aa, Homo sapiens
MDNAVDGLDKASIANSDGPTAGSQTPPFKRKGKLSTIGKIFKPWKWRKKKTSDKFRETSAVLERKISTRQSREELIRRGVLKELPDQDGDVTVNFENSNGHMIPIGEESTREENVVKSEEGNGSVSEKTPPLEEQAEDKKENTENHSETPAAPALPPSAPPKPRPKPKPKKSPVPPKGATAGASHKGDEVPPIKKNTKAPGKQAPVPPPKPASRNTTREAAGSSHSKKTTGSKASASPSTSSTSSRPKASKETVSSKAGTVGTTKGKRKTDKQPITSHLSSDTTTSGTSDLKGEPAETRVESFKLEQTVPGAEEQNTGKFKSMVPPPPVAPAPSPLAPPLPLEDQCITASDTPVVLVSVGADLPVSALDPSQLLWAEEPTNRTTLYSGTGLSVNRENAKCFTTKEELGKTVPQLLTPGLMGESSESFSASEDEGHREYQANDSDSDGPILYTDDEDEDEDEDGSGESALASKIRRRDTLAIKLGNRPSKKELEDKNILQRTSEEERQEIRQQIGTKLVRRLSQRPTTEELEQRNILKQKNEEEEQEAKMELKRRLSRKLSLRPTVAELQARRILRFNEYVEVTDSPDYDRRADKPWARLTPADKAAIRKELNEFKSTEMEVHEESRQFTRFHRP

SEQ ID NO: 4728 - protein, 565 aa, Homo sapiens
MGQTSVSTLSPQPGSVDGLDKASIANSDGPTAGSQTPPFKRKGKLSTIGKIFKPWKWRKKKTSDKFRETSAVLERKISTRQSREELIRRGVLKELPDQDGDVTVNFENSNGHMIPIGEESTREENVVKSEEGNGSVSEKTPPLEEQAEDKKAGSSHSKKTTGSKASASPSTSSTSSRPKASKETVSSKAGTVGTTKGKRKTDKQPITSHLSSDTTTSGTSDLKGEPAETRVESFKLEQTVPGAEEQNTGKFKSMVPPPPVAPAPSPLAPPLPLEDQCITASDTPVVLVSVGADLPVSALDPSQLLWAEEPTNRTTLYSGTGLSVNRENAKCFTTKEELGKTVPQLLTPGLMGESSESFSASEDEGHREYQANDSDSDGPILYTDDEDEDEDEDGSGESALASKIRRRDTLAIKLGNRPSKKELEDKNILQRTSEEERQEIRQQIGTKLVRRLSQRPTTEELEQRNILKQKNEEEEQEAKMELKRRLSRKLSLRPTVAELQARRILRFNEYVEVTDSPDYDRRADKPWARLTPADKAAIRKELNEFKSTEMEVHEESRQFTRFHRP

SEQ ID NO: 4729 - protein, 645 aa, Homo sapiens
MGQTSVSTLSPQPGSVDGLDKASIANSDGPTAGSQTPPFKRKGKLSTIGKIFKPWKWRKKKTSDKFRETSAVLERKISTRQSREELIRRGVLKELPDQDGDVTVNFENSNGHMIPIGEESTREENVVKSEEGNGSVSEKTPPLEEQAEDKKENTENHSETPAAPALPPSAPPKPRPKPKPKKSPVPPKGATAGASHKGDEVPPIKKNTKAPGKQAPVPPPKPASRNTTREAAGSSHSKKTTGSKASASPSTSSTSSRPKASKETVSSKAGTVGTTKGKRKTDKQPITSHLSSDTTTSGTSDLKGEPAETRVESFKLEQTVPGAEEQNTGKFKSMVPPPPVAPAPSPLAPPLPLEDQCITASDTPVVLVSVGADLPVSALDPSQLLWAEEPTNRTTLYSGTGLSVNRENAKCFTTKEELGKTVPQLLTPGLMGESSESFSASEDEGHREYQANDSDSDGPILYTDDEDEDEDEDGSGESALASKIRRRDTLAIKLGNRPSKKELEDKNILQRTSEEERQEIRQQIGTKLVRRLSQRPTTEELEQRNILKQKNEEEEQEAKMELKRRLSRKLSLRPTVAELQARRILRFNEYVEVTDSPDYDRRADKPWARLTPADKAAIRKELNEFKSTEMEVHEESRQFTRFHRP

SEQ ID NO: 4730 - protein, 554 aa, Homo sapiens
MDNAVDGLDKASIANSDGPTAGSQTPPFKRKGKLSTIGKIFKPWKWRKKKTSDKFRETSAVLERKISTRQSREELIRRGVLKELPDQDGDVTVNFENSNGHMIPIGEESTREENVVKSEEGNGSVSEKTPPLEEQAEDKKAGSSHSKKTTGSKASASPSTSSTSSRPKASKETVSSKAGTVGTTKGKRKTDKQPITSHLSSDTTTSGTSDLKGEPAETRVESFKLEQTVPGAEEQNTGKFKSMVPPPPVAPAPSPLAPPLPLEDQCITASDTPVVLVSVGADLPVSALDPSQLLWAEEPTNRTTLYSGTGLSVNRENAKCFTTKEELGKTVPQLLTPGLMGESSESFSASEDEGHREYQANDSDSDGPILYTDDEDEDEDEDGSGESALASKIRRRDTLAIKLGNRPSKKELEDKNILQRTSEEERQEIRQQIGTKLVRRLSQRPTTEELEQRNILKQKNEEEEQEAKMELKRRLSRKLSLRPTVAELQARRILRFNEYVEVTDSPDYDRRADKPWARLTPADKAAIRKELNEFKSTEMEVHEESRQFTRFHRP

SEQ ID NO: 4731 - protein, 376 aa, Homo sapiens
MEVPRLDHALNSPTSPCEEVIKNLSLEAIQLCDRDGNKSQDSGIAEMEELPVPHNIKISNITCDSFKISWEMDSKSKDRITHYFIDLNKKENKNSNKFKHKDVPTKLVAKAVPLPMTVRGHWFLSPRTEYTVAVQTASKQVDGDYVVSEWSEIIEFCTADYSKVHLTQLLEKAEVIAGRMLKFSVFYRNQHKEYFDYVREHHGNAMQPSVKDNSGSHGSPISGKLEGIFFSCSTEFNTGKPPQDSPYGRYRFEIAAEKLFNPNTNLYFGDFYCMYTAYHYVILVIAPVGSPGDEFCKQRLPQLNSKDNKFLTCTEEDGVLVYHHAQDVILEVIYTDPVDLSVGTVAEITGHQLMSLSTANAKKDPSCKTCNISVGR

SEQ ID NO: 4732 - protein, 350 aa, Homo sapiens
MCCDSDFVARNKSQDSGIAEMEELPVPHNIKISNITCDSFKISWEMDSKSKDRITHYFIDLNKKENKNSNKFKHKDVPTKLVAKAVPLPMTVRGHWFLSPRTEYTVAVQTASKQVDGDYVVSEWSEIIEFCTADYSKVHLTQLLEKAEVIAGRMLKFSVFYRNQHKEYFDYVREHHGNAMQPSVKDNSGSHGSPISGKLEGIFFSCSTEFNTGKPPQDSPYGRYRFEIAAEKLFNPNTNLYFGDFYCMYTAYHYVILVIAPVGSPGDEFCKQRLPQLNSKDNKFLTCTEEDGVLVYHHAQDVILEVIYTDPVDLSVGTVAEITGHQLMSLSTANAKKDPSCKTCNISVGR

SEQ ID NO: 4733 - protein, 49 aa, Homo sapiens
MEVPRLDHALNSPTSPCEEVIKNLSLEAIQLCDRDVVFEELTSKQTRKG

SEQ ID NO: 4734 - protein, 1290 aa, Homo sapiens
MSGPLEGADGGGDPRPGESFCPGGVPSPGPPQHRPCPGPSLADDTDANSNGSSGNESNGHESRGASQRSSHSSSSGNGKDSALLETTESSKSTNSQSPSPPSSSIAYSLLSASSEQDNPSTSGCSSEQSARARTQKELMTALRELKLRLPPERRGKGRSGTLATLQYALACVKQVQANQEYYQQWSLEEGEPCSMDMSTYTLEELEHITSEYTLQNQDTFSVAVSFLTGRIVYISEQAAVLLRCKRDVFRGTRFSELLAPQDVGVFYGSTAPSRLPTWGTGASAGSGLRDFTQEKSVFCRIRGGPDRDPGPRYQPFRLTPYVTKIRVSDGAPAQPCCLLIAERIHSGYEAPRIPPDKRIFTTRHTPSCLFQDVDERAAPLLGYLPQDLLGAPVLLFLHPEDRPLMLAIHKKILQLAGQPFDHSPIRFCARNGEYVTMDTSWAGFVHPWSRKVAFVLGRHKVRTAPLNEDVFTPPAPSPAPSLDTDIQELSEQIHRLLLQPVHSPSPTGLCGVGAVTSPGPLHSPGSSSDSNGGDAEGPGPPAPVTFQQICKDVHLVKHQGQQLFIESRARPQSRPRLPATGTFKAKALPCQSPDPELEAGSAPVQAPLALVPEEAERKEASSCSYQQINCLDSILRYLESCNLPSTTKRKCASSSSYTTSSASDDDRQRTGPVSVGTKKDPPSAALSGEGATPRKEPVVGGTLSPLALANKAESVVSVTSQCSFSSTIVHVGDKKPPESDIIMMEDLPGLAPGPAPSPAPSPTVAPDPAPDAYRPVGLTKAVLSLHTQKEEQAFLSRFRDLGRLRGLDSSSTAPSALGERGCHHGPAPPSRRHHCRSKAKRSRHHQNPRAEAPCYVSHPSPVPPSTPWPTPPATTPFPAVVQPYPLPVFSPRGGPQPLPPAPTSVPPAAFPAPLVTPMVALVLPNYLFPTPSSYPYGALQTPAEGPPTPASHSPSPSLPALAPSPPHRPDSPLFNSRCSSPLQLNLLQLEELPRAEGAAVAGGPGSSAGPPPPSAEAAEPEARLAEVTESSNQDALSGSSDLLELLLQEDSRSGTGSAASGSLGSGLGSGSGSGSHEGGSTSASITRSSQSSHTSKYFGSIDSSEAEAGAARGGAEPGDQVIKYVLQDPIWLLMANADQRVMMTYQVPSRDMTSVLKQDRERLRAMQKQQPRFSEDQRRELGAVHSWVRKGQLPRALDVMACVDCGSSTQDPGHPDDPLFSELDGLGLEPMEEGGGEQGSSGGGSGEGEGCEEAQGGAKASSSQDLAMEEEEEGRSSSSPALPTAGNCTS

SEQ ID NO: 4735 - protein, 859 aa, Homo sapiens
MLEVLEEIWSVRARRAHRPCPGPSLADDTDANSNGSSGNESNGHESRGASQRSSHSSSSGNGKDSALLETTESSKSTNSQSPSPPSSSIAYSLLSASSEQDNPSTSGCSSEQSARARTQKELMTALRELKLRLPPERRGKGRSGTLATLQYALACVKQVQANQEYYQQWSLEEGEPCSMDMSTYTLEELEHITSEYTLQNQDTFSVAVSFLTGRIVYISEQAAVLLRCKRDVFRGTRFSELLAPQDVGVFYGSTAPSRLPTWGTGASAGSGLRDFTQEKSVFCRIRGGPDRDPGPRYQPFRLTPYVTKIRVSDGAPAQPCCLLIAERIHSGYEAPRIPPDKRIFTTRHTPSCLFQDVDERAAPLLGYLPQDLLGAPVLLFLHPEDRPLMLAIHKKILQLAGQPFDHSPIRFCARNGEYVTMDTSWAGFVHPWSRKVAFVLGRHKVRTAPLNEDVFTPPAPSPAPSLDTDIQELSEQIHRLLLQPVHSPSPTGLCGVGAVTSPGPLHSPGSSSDSNGGDAEGPGPPAPVTFQQICKDVHLVKHQGQQLFIESRARPQSRPRLPATGTFKAKALPCQSPDPELEAGSAPVQAPLALVPEEAERKEASSCSYQQINCLDSILRYLESCNLPSTTKRKCASSSSYTTSSASDDDRQRTGPVSVGTKKDPPSAALSGEGATPRKEPVVGGTLSPLALANKAESVVSVTSQCSFSSTIVHVGDKKPPESDIIMMEDLPGLAPGPAPSPAPSPTVAPDPAPDAYRPVGLTKAVLSLHTQKEEQAFLSRFRDLGRLRGLDSSSTAPSALGERGSHLGPPGACPLPSLGLDCWGVGLKGGVSAPGTQAGVASTTRPCLGTGPSLASPH

SEQ ID NO: 4736 - protein, 587 aa, Homo sapiens
MASEDIAKLAETLAKTQVAGGQLSFKGKSLKLNTAEDAKDVIKEIEDFDSLEALRLEGNTVGVEAARVIAKALEKKSELKRCHWSDMFTGRLRTEIPPALISLGEGLITAGAQLVELDLSDNAFGPDGVQGFEALLKSSACFTLQELKLNNCGMGIGGGKILAAALTECHRKSSAQGKPLALKVFVAGRNRLENDGATALAEAFRVIGTLEEVHMPQNGINHPGITALAQAFAVNPLLRVINLNDNTFTEKGAVAMAETLKTLRQVEVINFGDCLVRSKGAVAIADAIRGGLPKLKELNLSFCEIKRDAALAVAEAMADKAELEKLDLNGNTLGEEGCEQLQEVLEGFNMAKVLASLSDDEDEEEEEEGEEEEEEAEEEEEEDEEEEEEEEEEEEEEPQQRGQGEKSATPSRKILDPNTGEPAPVLSSPPPADVSTFLAFPSPEKLLRLGPKSSVLIAQQTDTSDPEKVVSAFLKVSSVFKDEATVRMAVQDAVDALMQKAFNSSSFNSNTFLTRLLVHMGLLKSEDKVKAIANLYGPLMALNHMVQQDYFPKALAPLLLAFVTKPNSALESCSFARHSLLQTLYKV

SEQ ID NO: 4737 - protein, 599 aa, Homo sapiens
MSRSLLLWFLLFLLLLPPLPVLLADPGAPTPVNPCCYYPCQHQGICVRFGLDRYQCDCTRTGYSGPNCTIPGLWTWLRNSLRPSPSFTHFLLTHGRWFWEFVNATFIREMLMRLVLTVRSNLIPSPPTYNSAHDYISWESFSNVSYYTRILPSVPKDCPTPMGTKGKKQLPDAQLLARRFLLRRKFIPDPQGTNLMFAFFAQHFTHQFFKTSGKMGPGFTKALGHGVDLGHIYGDNLERQYQLRLFKDGKLKYQVLDGEMYPPSVEEAPVLMHYPRGIPPQSQMAVGQEVFGLLPGLMLYATLWLREHNRVCDLLKAEHPTWGDEQLFQTTRLILIGETIKIVIEEYVQQLSGYFLQLKFDPELLFGVQFQYRNRIAMEFNHLYHWHPLMPDSFKVGSQEYSYEQFLFNTSMLVDYGVEALVDAFSRQIAGRIGGGRNMDHHILHVAVDVIRESREMRLQPFNEYRKRFGMKPYTSFQELVGEKEMAAELEELYGDIDALEFYPGLLLEKCHPNSIFGESMIEIGAPFSLKGLLGNPICSPEYWKPSTFGGEVGFNIVKTATLKKLVCLNTKTCPYVSFRVPDASQDDGPAVERPSTEL

SEQ ID NO: 4738 - protein, 562 aa, Homo sapiens
MSRSLLLWFLLFLLLLPPLPVLLADPGAPTPVNPCCYYPCQHQGICVRFGLDRYQCDCTRTGYSGPNCTIPGLWTWLRNSLRPSPSFTHFLLTHGRWFWEFVNATFIREMLMRLVLTVRSNLIPSPPTYNSAHDYISWESFSNVSYYTRILPSVPKDCPTPMGTKGKKQLPDAQLLARRFLLRRKFIPDPQGTNLMFAFFAQHFTHQFFKTSGKMGPGFTKALGHGVDLGHIYGDNLERQYQLRLFKDGKLKYQVLDGEMYPPSVEEAPVLMHYPRGIPPQSQMAVGQEVFGLLPGLMLYATLWLREHNRVCDLLKAEHPTWGDEQLFQTTRLILIGETIKIVIEEYVQQLSGYFLQLKFDPELLFGVQFQYRNRIAMEFNHLYHWHPLMPDSFKIGGGRNMDHHILHVAVDVIRESREMRLQPFNEYRKRFGMKPYTSFQELVGEKEMAAELEELYGDIDALEFYPGLLLEKCHPNSIFGESMIEIGAPFSLKGLLGNPICSPEYWKPSTFGGEVGFNIVKTATLKKLVCLNTKTCPYVSFRVPDASQDDGPAVERPSTEL

SEQ ID NO: 4739 - protein, 537 aa, Homo sapiens
MRKPRLMNPCCYYPCQHQGICVRFGLDRYQCDCTRTGYSGPNCTIPGLWTWLRNSLRPSPSFTHFLLTHGRWFWEFVNATFIREMLMRLVLTVRSNLIPSPPTYNSAHDYISWESFSNVSYYTRILPSVPKDCPTPMGTKGKKQLPDAQLLARRFLLRRKFIPDPQGTNLMFAFFAQHFTHQFFKTSGKMGPGFTKALGHGVDLGHIYGDNLERQYQLRLFKDGKLKYQVLDGEMYPPSVEEAPVLMHYPRGIPPQSQMAVGQEVFGLLPGLMLYATLWLREHNRVCDLLKAEHPTWGDEQLFQTTRLILIGETIKIVIEEYVQQLSGYFLQLKFDPELLFGVQFQYRNRIAMEFNHLYHWHPLMPDSFKIGGGRNMDHHILHVAVDVIRESREMRLQPFNEYRKRFGMKPYTSFQELVGEKEMAAELEELYGDIDALEFYPGLLLEKCHPNSIFGESMIEIGAPFSLKGLLGNPICSPEYWKPSTFGGEVGFNIVKTATLKKLVCLNTKTCPYVSFRVPDASQDDGPAVERPSTEL

SEQ ID NO: 4740 - protein, 490 aa, Homo sapiens
MLMRLVLTVRSNLIPSPPTYNSAHDYISWESFSNVSYYTRILPSVPKDCPTPMGTKGKKQLPDAQLLARRFLLRRKFIPDPQGTNLMFAFFAQHFTHQFFKTSGKMGPGFTKALGHGVDLGHIYGDNLERQYQLRLFKDGKLKYQVLDGEMYPPSVEEAPVLMHYPRGIPPQSQMAVGQEVFGLLPGLMLYATLWLREHNRVCDLLKAEHPTWGDEQLFQTTRLILIGETIKIVIEEYVQQLSGYFLQLKFDPELLFGVQFQYRNRIAMEFNHLYHWHPLMPDSFKVGSQEYSYEQFLFNTSMLVDYGVEALVDAFSRQIAGRIGGGRNMDHHILHVAVDVIRESREMRLQPFNEYRKRFGMKPYTSFQELVGEKEMAAELEELYGDIDALEFYPGLLLEKCHPNSIFGESMIEIGAPFSLKGLLGNPICSPEYWKPSTFGGEVGFNIVKTATLKKLVCLNTKTCPYVSFRVPDASQDDGPAVERPSTEL

SEQ ID NO: 4741 - protein, 630 aa, Homo sapiens
MSRECDPGARWGIFLASGGALNARLSPSSLSSAGSLLLWFLLFLLLLPPLPVLLADPGAPTPVNPCCYYPCQHQGICVRFGLDRYQCDCTRTGYSGPNCTIPGLWTWLRNSLRPSPSFTHFLLTHGRWFWEFVNATFIREMLMRLVLTVRSNLIPSPPTYNSAHDYISWESFSNVSYYTRILPSVPKDCPTPMGTKGKKQLPDAQLLARRFLLRRKFIPDPQGTNLMFAFFAQHFTHQFFKTSGKMGPGFTKALGHGVDLGHIYGDNLERQYQLRLFKDGKLKYQVLDGEMYPPSVEEAPVLMHYPRGIPPQSQMAVGQEVFGLLPGLMLYATLWLREHNRVCDLLKAEHPTWGDEQLFQTTRLILIGETIKIVIEEYVQQLSGYFLQLKFDPELLFGVQFQYRNRIAMEFNHLYHWHPLMPDSFKVGSQEYSYEQFLFNTSMLVDYGVEALVDAFSRQIAGRIGGGRNMDHHILHVAVDVIRESREMRLQPFNEYRKRFGMKPYTSFQELVGEKEMAAELEELYGDIDALEFYPGLLLEKCHPNSIFGESMIEIGAPFSLKGLLGNPICSPEYWKPSTFGGEVGFNIVKTATLKKLVCLNTKTCPYVSFRVPDASQDDGPAVERPSTEL

SEQ ID NO: 4742 - protein, 630 aa, Homo sapiens
MSRECDPGARWGIFLASWWSLECQLSPSSLSSAGSLLLWFLLFLLLLPPLPVLLADPGAPTPVNPCCYYPCQHQGICVRFGLDRYQCDCTRTGYSGPNCTIPGLWTWLRNSLRPSPSFTHFLLTHGRWFWEFVNATFIREMLMRLVLTVRSNLIPSPPTYNSAHDYISWESFSNVSYYTRILPSVPKDCPTPMGTKGKKQLPDAQLLARRFLLRRKFIPDPQGTNLMFAFFAQHFTHQFFKTSGKMGPGFTKALGHGVDLGHIYGDNLERQYQLRLFKDGKLKYQVLDGEMYPPSVEEAPVLMHYPRGIPPQSQMAVGQEVFGLLPGLMLYATLWLREHNRVCDLLKAEHPTWGDEQLFQTTRLILIGETIKIVIEEYVQQLSGYFLQLKFDPELLFGVQFQYRNRIAMEFNHLYHWHPLMPDSFKVGSQEYSYEQFLFNTSMLVDYGVEALVDAFSRQIAGRIGGGRNMDHHILHVAVDVIRESREMRLQPFNEYRKRFGMKPYTSFQELVGEKEMAAELEELYGDIDALEFYPGLLLEKCHPNSIFGESMIEIGAPFSLKGLLGNPICSPEYWKPSTFGGEVGFNIVKTATLKKLVCLNTKTCPYVSFRVPDASQDDGPAVERPSTEL

SEQ ID NO: 4743 - protein, 930 aa, Homo sapiens
MEYERRGGRGDRTGRYGATDRSQDDGGENRSRDHDYRDMDYRSYPREYGSQEGKHDYDDSSEEQSAEDSYEASPGSETQRRRRRRHRHSPTGPPGFPRDGDYRDQDYRTEQGEEEEEEEDEEEEEKASNIVMLRMLPQAATEDDIRGQLQSHGVQAREVRLMRNKSSGQSRGFAFVEFSHLQDATRWMEANQHSLNILGQKVSMHYSDPKPKINEDWLCNKCGVQNFKRREKCFKCGVPKSEAEQKLPLGTRLDQQTLPLGGRELSQGLLPLPQPYQAQGVLASQALSQGSEPSSENANDTIILRNLNPHSTMDSILGALAPYAVLSSSNVRVIKDKQTQLNRGFAFIQLSTIVEAAQLLQILQALHPPLTIDGKTINVEFAKGSKRDMASNEGSRISAASVASTAIAAAQWAISQASQGGEGTWATSEEPPVDYSYYQQDEGYGNSQGTESSLYAHGYLKGTKGPGITGTKGDPTGAGPEASLEPGADSVSMQAFSRAQPGAAPGIYQQSAEASSSQGTAANSQSYTIMSPAVLKSELQSPTHPSSALPPATSPTAQESYSQYPVPDVSTYQYDETSGYYYDPQTGLYYDPNSQYYYNAQSQQYLYWDGERRTYVPALEQSADGHKETGAPSKEGKEKKEKHKTKTAQQIAKDMERWARSLNKQKENFKNSFQPISSLRDDERRESATADAGYAILEKKGALAERQHTSMDLPKLASDDRPSPPRGLVAAYSGESDSEEEQERGGPEREEKLTDWQKLACLLCRRQFPSKEALIRHQQLSGLHKQNLEIHRRAHLSENELEALEKNDMEQMKYRDRAAERREKYGIPEPPEPKRRKYGGISTASVDFEQPTRDGLGSDNIGSRMLQAMGWKEGSGLGRKKQGIVTPIEAQTRVRGSGLGARGSSYGVTSTESYKETLHKTMVTRFNEAQ

SEQ ID NO: 4744 - protein, 929 aa, Homo sapiens
MEYERRGGRGDRTGRYGATDRSQDDGGENRSRDHDYRDMDYRSYPREYGSQEGKHDYDDSSEEQSAEDSYEASPGSETQRRRRRRHRHSPTGPPGFPRDGDYRDQDYRTEQGEEEEEEEDEEEEEKASNIVMLRMLPQAATEDDIRGQLQSHGVQAREVRLMRNKSSGQSRGFAFVEFSHLQDATRWMEANQHSLNILGQKVSMHYSDPKPKINEDWLCNKCGVQNFKRREKCFKCGVPKSEAEQKLPLGTRLDQQTLPLGGRELSQGLLPLPQPYQAQGVLASQALSQGSEPSSENANDTIILRNLNPHSTMDSILGALAPYAVLSSSNVRVIKDKQTQLNRGFAFIQLSTIEAAQLLQILQALHPPLTIDGKTINVEFAKGSKRDMASNEGSRISAASVASTAIAAAQWAISQASQGGEGTWATSEEPPVDYSYYQQDEGYGNSQGTESSLYAHGYLKGTKGPGITGTKGDPTGAGPEASLEPGADSVSMQAFSRAQPGAAPGIYQQSAEASSSQGTAANSQSYTIMSPAVLKSELQSPTHPSSALPPATSPTAQESYSQYPVPDVSTYQYDETSGYYYDPQTGLYYDPNSQYYYNAQSQQYLYWDGERRTYVPALEQSADGHKETGAPSKEGKEKKEKHKTKTAQQIAKDMERWARSLNKQKENFKNSFQPISSLRDDERRESATADAGYAILEKKGALAERQHTSMDLPKLASDDRPSPPRGLVAAYSGESDSEEEQERGGPEREEKLTDWQKLACLLCRRQFPSKEALIRHQQLSGLHKQNLEIHRRAHLSENELEALEKNDMEQMKYRDRAAERREKYGIPEPPEPKRRKYGGISTASVDFEQPTRDGLGSDNIGSRMLQAMGWKEGSGLGRKKQGIVTPIEAQTRVRGSGLGARGSSYGVTSTESYKETLHKTMVTRFNEAQ

SEQ ID NO: 4745 - protein, 853 aa, Homo sapiens
MEYERRGGRGDRTGRYGATDRSQDDGGENRSRDHDYRDMDYRSYPREYGSQEGKHDYDDSSEEQSAEIRGQLQSHGVQAREVRLMRNKSSGQSRGFAFVEFSHLQDATRWMEANQHSLNILGQKVSMHYSDPKPKINEDWLCNKCGVQNFKRREKCFKCGVPKSEAEQKLPLGTRLDQQTLPLGGRELSQGLLPLPQPYQAQGVLASQALSQGSEPSSENANDTIILRNLNPHSTMDSILGALAPYAVLSSSNVRVIKDKQTQLNRGFAFIQLSTIVEAAQLLQILQALHPPLTIDGKTINVEFAKGSKRDMASNEGSRISAASVASTAIAAAQWAISQASQGGEGTWATSEEPPVDYSYYQQDEGYGNSQGTESSLYAHGYLKGTKGPGITGTKGDPTGAGPEASLEPGADSVSMQAFSRAQPGAAPGIYQQSAEASSSQGTAANSQSYTIMSPAVLKSELQSPTHPSSALPPATSPTAQESYSQYPVPDVSTYQYDETSGYYYDPQTGLYYDPNSQYYYNAQSQQYLYWDGERRTYVPALEQSADGHKETGAPSKEGKEKKEKHKTKTAQQIAKDMERWARSLNKQKENFKNSFQPISSLRDDERRESATADAGYAILEKKGALAERQHTSMDLPKLASDDRPSPPRGLVAAYSGESDSEEEQERGGPEREEKLTDWQKLACLLCRRQFPSKEALIRHQQLSGLHKQNLEIHRRAHLSENELEALEKNDMEQMKYRDRAAERREKYGIPEPPEPKRRKYGGISTASVDFEQPTRDGLGSDNIGSRMLQAMGWKEGSGLGRKKQGIVTPIEAQTRVRGSGLGARGSSYGVTSTESYKETLHKTMVTRFNEAQ

SEQ ID NO: 4746 - protein, 852 aa, Homo sapiens
MEYERRGGRGDRTGRYGATDRSQDDGGENRSRDHDYRDMDYRSYPREYGSQEGKHDYDDSSEEQSAEIRGQLQSHGVQAREVRLMRNKSSGQSRGFAFVEFSHLQDATRWMEANQHSLNILGQKVSMHYSDPKPKINEDWLCNKCGVQNFKRREKCFKCGVPKSEAEQKLPLGTRLDQQTLPLGGRELSQGLLPLPQPYQAQGVLASQALSQGSEPSSENANDTIILRNLNPHSTMDSILGALAPYAVLSSSNVRVIKDKQTQLNRGFAFIQLSTIEAAQLLQILQALHPPLTIDGKTINVEFAKGSKRDMASNEGSRISAASVASTAIAAAQWAISQASQGGEGTWATSEEPPVDYSYYQQDEGYGNSQGTESSLYAHGYLKGTKGPGITGTKGDPTGAGPEASLEPGADSVSMQAFSRAQPGAAPGIYQQSAEASSSQGTAANSQSYTIMSPAVLKSELQSPTHPSSALPPATSPTAQESYSQYPVPDVSTYQYDETSGYYYDPQTGLYYDPNSQYYYNAQSQQYLYWDGERRTYVPALEQSADGHKETGAPSKEGKEKKEKHKTKTAQQIAKDMERWARSLNKQKENFKNSFQPISSLRDDERRESATADAGYAILEKKGALAERQHTSMDLPKLASDDRPSPPRGLVAAYSGESDSEEEQERGGPEREEKLTDWQKLACLLCRRQFPSKEALIRHQQLSGLHKQNLEIHRRAHLSENELEALEKNDMEQMKYRDRAAERREKYGIPEPPEPKRRKYGGISTASVDFEQPTRDGLGSDNIGSRMLQAMGWKEGSGLGRKKQGIVTPIEAQTRVRGSGLGARGSSYGVTSTESYKETLHKTMVTRFNEAQ

SEQ ID NO: 4747 - protein, 995 aa, Homo sapiens
MSGSPSLTARAEKVSVDAGRGGGESLQEASPRLADHGSSSGGGWEVKRSQRLRRGPSSPRRPYQDMEYERRGGRGDRTGRYGATDRSQDDGGENRSRDHDYRDMDYRSYPREYGSQEGKHDYDDSSEEQSAEDSYEASPGSETQRRRRRRHRHSPTGPPGFPRDGDYRDQDYRTEQGEEEEEEEDEEEEEKASNIVMLRMLPQAATEDDIRGQLQSHGVQAREVRLMRNKSSGQSRGFAFVEFSHLQDATRWMEANQHSLNILGQKVSMHYSDPKPKINEDWLCNKCGVQNFKRREKCFKCGVPKSEAEQKLPLGTRLDQQTLPLGGRELSQGLLPLPQPYQAQGVLASQALSQGSEPSSENANDTIILRNLNPHSTMDSILGALAPYAVLSSSNVRVIKDKQTQLNRGFAFIQLSTIVEAAQLLQILQALHPPLTIDGKTINVEFAKGSKRDMASNEGSRISAASVASTAIAAAQWAISQASQGGEGTWATSEEPPVDYSYYQQDEGYGNSQGTESSLYAHGYLKGTKGPGITGTKGDPTGAGPEASLEPGADSVSMQAFSRAQPGAAPGIYQQSAEASSSQGTAANSQSYTIMSPAVLKSELQSPTHPSSALPPATSPTAQESYSQYPVPDVSTYQYDETSGYYYDPQTGLYYDPNSQYYYNAQSQQYLYWDGERRTYVPALEQSADGHKETGAPSKEGKEKKEKHKTKTAQQIAKDMERWARSLNKQKENFKNSFQPISSLRDDERRESATADAGYAILEKKGALAERQHTSMDLPKLASDDRPSPPRGLVAAYSGESDSEEEQERGGPEREEKLTDWQKLACLLCRRQFPSKEALIRHQQLSGLHKQNLEIHRRAHLSENELEALEKNDMEQMKYRDRAAERREKYGIPEPPEPKRRKYGGISTASVDFEQPTRDGLGSDNIGSRMLQAMGWKEGSGLGRKKQGIVTPIEAQTRVRGSGLGARGSSYGVTSTESYKETLHKTMVTRFNEAQ

SEQ ID NO: 4748 - protein, 387 aa, Homo sapiens
MTRDEALPDSHSAQDFYENYEPKEILGRGVSSVVRRCIHKPTSQEYAVKVIDVTGGGSFSPEEVRELREATLKEVDILRKVSGHPNIIQLKDTYETNTFFFLVFDLMKRGELFDYLTEKVTLSEKETRKIMRALLEVICTLHKLNIVHRDLKPENILLDDNMNIKLTDFGFSCQLEPGERLREVCGTPSYLAPEIIECSMNEDHPGYGKEVDMWSTGVIMYTLLAGSPPFWHRKQMLMLRMIMSGNYQFGSPEWDDYSDTVKDLVSRFLVVQPQNRYTAEEALAHPFFQQYLVEEVRHFSPRGKFKVIALTVLASVRIYYQYRRVKPVTREIVIRDPYALRPLRRLIDAYAFRIYGHWVKKGQQQNRAALFENTPKAVLLSLAEEDY

SEQ ID NO: 4749 - protein, 419 aa, Homo sapiens
MTRDEALPDSHSAQDFYENYEPKEILGRGVSSVVRRCIHKPTSQEYAVKVIDVTGGGSFSPEEVRELREATLKEVDILRKVSGHPNIIQLKDTYETNTFFFLVFDLWEDTDTMEMEQKWCLGWDSPKSTNFRAQGRARMKRGELFDYLTEKVTLSEKETRKIMRALLEVICTLHKLNIVHRDLKPENILLDDNMNIKLTDFGFSCQLEPGERLREVCGTPSYLAPEIIECSMNEDHPGYGKEVDMWSTGVIMYTLLAGSPPFWHRKQMLMLRMIMSGNYQFGSPEWDDYSDTVKDLVSRFLVVQPQNRYTAEEALAHPFFQQYLVEEVRHFSPRGKFKVIALTVLASVRIYYQYRRVKPVTREIVIRDPYALRPLRRLIDAYAFRIYGHWVKKGQQQNRAALFENTPKAVLLSLAEEDY

SEQ ID NO: 4750 - protein, 227 aa, Homo sapiens
MGWTMRLVTAALLLGLMMVVTGDEDENSPCAHEALLDEDTLFCQGLEVFYPELGNIGCKVVPDCNNYRQKITSWMEPIVKFPGAVDGATYILVMVDPDAPSRAEPRQRFWRHWLVTDIKGADLKKGKIQGQELSAYQAPSPPAHSGFHRYQFFVYLQEGKVISLLPKENKTRGSWKMDRFLNRFHLGEPEASTQFMTQNYQDSPTLQAPRERASEPKHKNQAEIAAC

SEQ ID NO: 4751 - protein, 803 aa, Homo sapiens
MAKRSSLYIRIVEGKNLPAKDITGSSDPYCIVKVDNEPIIRTATVWKTLCPFWGEEYQVHLPPTFHAVAFYVMDEDALSRDDVIGKVCLTRDTIASHPKGFSGWAHLTEVDPDEEVQGEIHLRLEVWPGARACRLRCSVLEARDLAPKDRNGTSDPFVRVRYKGRTRETSIVKKSCYPRWNETFEFELQEGAMEALCVEAWDWDLVSRNDFLGKVVIDVQRLRVVQQEEGWFRLQPDQSKSRRHDEGNLGSLQLEVRLRDETVLPSSYYQPLVHLLCHEVKLGMQGPGQLIPLIEETTSTECRQDVATNLLKLFLGQGLAKDFLDLLFQLELSRTSETNTLFRSNSLASKSMESFLKVAGMQYLHGVLGPIINKVFEEKKYVELDPSKVEVKDVGCSGLHRPQTEAEVLEQSAQTLRAHLGALLSALSRSVRACPAVVRATFRQLFRRVRERFPGAQHENVPFIAVTSFLCLRFFSPAIMSPKLFHLRERHADARTSRTLLLLAKAVQNVGNMDTPASRAKEAWMEPLQPTVRQGVAQLKDFITKLVDIEEKDELDLQRTLSLQAPPVKEGPLFIHRTKGKGPLMSSSFKKLYFSLTTEALSFAKTPSSKKSALIKLANIRAAEKVEEKSFGGSHVMQVIYTDDAGRPQTAYLQCKCVNELNQWLSALRKVSINNTGLLGSYHPGVFRGDKWSCCHQKEKTGQGCDKTRSRVTLQEWNDPLDHDLEAQLIYRHLLGVEAMLWERHRELSGGAEAGTVPTSPGKVPEDSLARLLRVLQDLREAHSSSPAGSPPSEPNCLLELQT

SEQ ID NO: 4752 - protein, 757 aa, Homo sapiens
MAKRSSLYIRIVEGKNLPAKDITGSSDPYCIVKVDNEPIIRTATVWKTLCPFWGEEYQVHLPPTFHAVAFYVMDEDALSRDDVIGKVCLTRDTIASHPKGFSGWAHLTEVDPDEEVQGEIHLRLEVWPGARACRLRCSVLEARDLAPKDRNGTSDPFVRVRYKGRTRETSIVKKSCYPRWNETFEFELQEGAMEALCVEAWDWDLVSRNDFLGKVVIDVQRLRVVQQEEGWFRLQPDQSKSRRHDEGNLGSLQLEVRLRDETVLPSSYYQPLVHLLCHEVKLGMQGPGQLIPLIEETTSTECRQDVATNLLKLFLGQGLAKDFLDLLFQLELSRTSETNTLFRSNSLASKSMESFLKVAGMQYLHGVLGPIINKVFEEKKYVELDPSKVEVKDVGCSGLHRPQTEAEVLEQSAQTLRAHLGALLSALSRSVRACPAVVRATFRQLFRRVRERFPGAQHENVPFIAVTSFLCLRFFSPAIMSPKLFHLRERHADARTSRTLLLLAKAVQNVGNMDTPASRAKEAWMEPLQPTVRQGVAQLKDFITKLVDIEEKDELDLQRTLSLQAPPVKEGPLFIHRTKGKGPLMSSSFKKLYFSLTTEALSFAKTPSSKCVNELNQWLSALRKVSINNTGLLGSYHPGVFRGDKWSCCHQKEKTGQGCDKTRSRVTLQEWNDPLDHDLEAQLIYRHLLGVEAMLWERHRELSGGAEAGTVPTSPGKVPEDSLARLLRVLQDLREAHSSSPAGSPPSEPNCLLELQT

SEQ ID NO: 4753 - protein, 363 aa, Homo sapiens
MAVTITLKTLQQQTFKIRMEPDETVKVLKEKIEAEKGRDAFPVAGQKLIYAGKILSDDVPIRDYRIDEKNFVVVMVTKTKAGQGTSAPPEASPTAAPESSTSFPPAPTSGMSHPPPAAREDKSPSEESAPTTSPESVSGSVPSSGSSGREEDAASTLVTGSEYETMLTEIMSMGYERERVVAALRASYNNPHRAVEYLLTGIPGSPEPEHGSVQESQVSEQPATEAAGENPLEFLRDQPQFQNMRQVIQQNPALLPALLQQLGQENPQLLQQISRHQEQFIQMLNEPPGELADISDVEGEVGAIGEEAPQMNYIQVTPQEKEAIERLKALGFPESLVIQAYFACEKNENLAANFLLSQNFDDE

SEQ ID NO: 4754 - protein, 308 aa, Homo sapiens
MAVTITLKTLQQQTFKIRMEPDETVKVLKEKIEAEKGRDAFPVAGQKLIYAGKILSDDVPIRDYRIDEKNFVVVMVTKTKAGQGTSAPPEASPTAAPESSTSFPPAPTSGMSHPPPAAREDKSPSEESAPTTSPESVSGSVPSSGSSGREEDAASTLVTGSEYETMLTEIMSMGYERERVVAALRASYNNPHRAVEYLLTGIPGSPEPEHGSVQESQVSEQPATEAAGENPLEFLRDQPQFQNMRQVIQQNPALLPALLQQLGQENPQLLQLKALGFPESLVIQAYFACEKNENLAANFLLSQNFDDE

SEQ ID NO: 4755 - protein, 362 aa, Homo sapiens
MAVTITLKTLQQQTFKIRMEPDETVKVLKEKIEAEKGRDAFPVAGQKLIYAGKILSDDVPIRDYRIDEKNFVVVMVTKTKAGQGTSAPPEASPTAAPESSTSFPPAPTSGMSHPPPAAREDKSPSEESAPTTSPESVSGSVPSSGSSGREEDAASTLVTGSEYETMLTEIMSMGYERERVVAALRASYNNPHRAVEYLLTGIPGSPEPEHGSVQESQVSEQPATEAGENPLEFLRDQPQFQNMRQVIQQNPALLPALLQQLGQENPQLLQQISRHQEQFIQMLNEPPGELADISDVEGEVGAIGEEAPQMNYIQVTPQEKEAIERLKALGFPESLVIQAYFACEKNENLAANFLLSQNFDDE

SEQ ID NO: 4756 - protein, 218 aa, Homo sapiens
MGTRDDEYDYLFKVVLIGDSGVGKSNLLSRFTRNEFNLESKSTIGVEFATRSIQVDGKTIKAQIWDTAGQERYRAITSAYYRGAVGALLVYDIAKHLTYENVERWLKELRDHADSNIVIMLVGNKSDLRHLRAVPTDEARAFAEKNNLSFIETSALDSTNVEEAFKNILTEIYRIVSQKQIADRAAHDESPGNNVVDISVPPTTDGQKPNKLQCCQNL

SEQ ID NO: 4757 - protein, 179 aa, Homo sapiens
MGTRDDEYDYLFKVVLIGDSGVGKSNLLSRFTRNEFNLESKSTIGVEFATRSIQVDGKTIKAQIWDTAGQERYRAITSAYYRGAVGALLVYDIAKHLTYENVERWLKELRDHADSNIVIMLVGNKSDLRHLRAVPTDEARAFAEKNNLSFIETSALDSTNVEEAFKNILTGGRGPDGCG

SEQ ID NO: 4758 - protein, 747 aa, Homo sapiens
MRRSLAPSQLAKRKPEGRSCDDEDWQPGLVTPRKRKSSSETQIQECFLSPFRKPLSQLTNQPPCLDSSQHEAFIRSILSKPFKVPIPNYQGPLGSRALGLKRAGVRRALHDPLEKDALVLYEPPPLSAHDQLKLDKEKLPVHVVVDPILSKVLRPHQREGVKFLWECVTSRRIPGSHGCIMADEMGLGKTLQCITLMWTLLRQSPECKPEIDKAVVVSPSSLVKNWYNEVGKWLGGRIQPLAIDGGSKDEIDQKLEGFMNQRGARVSSPILIISYETFRLHVGVLQKGSVGLVICDEGHRLKNSENQTYQALDSLNTSRRVLISGTPIQNDLLEYFSLVHFVNSGILGTAHEFKKHFELPILKGRDAAASEADRQLGEERLRELTSIVNRCLIRRTSDILSKYLPVKIEQVVCCRLTPLQTELYKRFLRQAKPAEELLEGKMSVSSLSSITSLKKLCNHPALIYDKCVEEEDGFVGALDLFPPGYSSKALEPQLSGKMLVLDYILAVTRSRSSDKVVLVSNYTQTLDLFEKLCRARRYLYVRLDGTMSIKKRAKVVERFNSPSSPDFVFMLSSKAGGCGLNLIGANRLVMFDPDWNPANDEQAMARVWRDGQKKTCYIYRLLSAGTIEEKIFQRQSHKKALSSCVVDEEQDVERHFSLGELKELFILDEASLSDTHDRLHCRRCVNSRQIRPPPDGSDCTSDLAGWNHCTDKWGLRDEVLQAAWDAASTAITFVFHQRSHEEQRGLR

SEQ ID NO: 4759 - protein, 1011 aa, Homo sapiens
MDPPSPSRTSQTQPTATSPLTSYRWHTGGGGEKAAGGFRWGRFAGWGRALSHQEPMVSTQPAPRSIFRRVLSAPPKESRTSRLRLSKALWGRHKNPPPEPDPEPEQEAPELEPEPELEPPTPQIPEAPTPNVPVWDIGGFTLLDGKLVLLGGEEEGPRRPRVGSASSEGSIHVAMGNFRDPDRMPGKTEPETAGPNQVHNVRGLLKRLKEKKKARLEPRDGPPSALGSRESLATLSELDLGAERDVRIWPLHPSLLGEPHCFQVTWTGGSRCFSCRSAAERDRWIEDLRRQFQPTQDNVEREETWLSVWVHEAKGLPRAAAGAPGVRAELWLDGALLARTAPRAGPGQLFWAERFHFEALPPARRLSLRLRGLGPGSAVLGRVALALEELDAPRAPAAGLERWFPLLGAPAGAALRARIRARRLRVLPSERYKELAEFLTFHYARLCGALEPALPAQAKEELAAAMVRVLRATGRAQALVTDLGTAELARCGGREALLFRENTLATKAIDEYMKLVAQDYLQETLGQVVRRLCASTEDCEVDPSKCPASELPEHQARLRNSCEEVFETIIHSYDWFPAELGIVFSSWREACKERGSEVLGPRLVCASLFLRLLCPAILAPSLFGLAPDHPAPGPARTLTLIAKVIQNLANRAPFGEKEAYMGFMNSFLEEHGPAMQCFLDQVAMVDVDAAPSGYQGSGDLALQLAVLHAQLCTIFAELDQTTRDTLEPLPTILRAIEEGQPVLVSVPMRLPLPPAQVHSSLSAGEKPGFLAPRDLPKHTPLISKSQSLRSVRRSESWARPRPDEERPLRRPRPVQRTQSVPVRRPARRRQSAGPWPRPKGSLSMGPAPRARPWTRDSASLPRKPSVPWQRQMDQPQDRNQALGTHRPVNKLAELQCEVAALREEQKVLSRLVESLSTQIRALTEQQEQLRGQLQDLDSRLRAGSSEFDSEHNLTSNEGHSLKNLEHRLNEMERTQAQLRDAVQSLQLSPRTRGSWSQPQPLKAPCLNGDTT

SEQ ID NO: 4760 - protein, 943 aa, Homo sapiens
MDPPSPSRTSQTQPTATSPLTSYRWHTGGGGEKAAGGFRWGRFAGWGRALSHQEPMVSTQPAPRSIFRRVLSAPPKESRTSRLRLSKALWGRHKNPPPEPDPEPEQEAPELEPEPELEPPTPQIPEAPTPNVPVWDIGGFTLLDGKLVLLGGEEEGPRRPRVGSASSEGSIHVAMGNFRDPDRMPGKTEPETAGPNQVHNVRGLLKRLKEKKKARLEPRDGPPSALGSRESLATLSELDLGAERDVRIWPLHPSLLGEPHCFQVTWTGGSRCFSCRSAAERDRWIEDLRRQFQPTQDNVEREETWLSVWVHEAKGLPRAAAGAPGVRAELWLDGALLARTAPRAGPGQLFWAERFHFEALPPARRLSLRLRGLGPGSAVLGRVALALEELDAPRAPAAGLERWFPLLGAPAGAALRARIRARRLRVLPSERYKELAEFLTFHYARLCGALEPALPAQAKEELAAAMVRVLRATGRAQALVTDLGTAELARCGGREALLFRENTLATKAIDEYMKLVAQDYLQETLGQVVRRLCASTEDCEVDPSKCPASELPEHQARLRNSCEEVFETIIHSYDWFPAELGIVFSSWREACKERGSEVLGPRLVCASLFLRLLCPAILAPSLFGLAPDHPAPGPARTLTLIAKVIQNLANRAPFGEKEAYMGFMNSFLEEHGPAMQCFLDQVAMVDVDAAPSGYQGSGDLALQLAVLHAQLCTIFAELDQTTRDTLEPLPTILRAIEEGQPVLVSVPMRLPLPPAQVHSSLSAGEKPGFLAPRDLPKHTPLISKSQSLRSVRRSESWARPRPDEERPLRRPRPVQRTQSVPVRRPARRRQSAGPWPRPKGSLSMGPAPRARPWTRDSASLPRKPSVPWQRQMDQPQDRNQALGTHRPVNKLAELQCEVAALREEQKVLSRLVESLSTQIRALTEQQEQLRGQLQDLDSRLRAG

SEQ ID NO: 4761 - protein, 3224 aa, Homo sapiens
MRRSKADVERYIASVQGSTPSPRQKSMKGFYFAKLYYEAKEYDLAKKYICTYINVQERDPKAHRFLGLLYELEENTDKAVECYRRSVELNPTQKDLVLKIAELLCKNDVTDGRAKYWLERAAKLFPGSPAIYKLKEQLLDCEGEDGWNKLFDLIQSELYVRPDDVHVNIRLVEVYRSTKRLKDAVAHCHEAERNIALRSSLEWNSCVVQTLKEYLESLQCLESDKSDWRATNTDLLLAYANLMLLTLSTRDVQESRELLQSFDSALQSVKSLGGNDELSATFLEMKGHFYMHAGSLLLKMGQHSSNVQWRALSELAALCYLIAFQVPRPKIKLIKGEAGQNLLEMMACDRLSQSGHMLLNLSRGKQDFLKEIVETFANKSGQSALYDALFSSQSPKDTSFLGSDDIGNIDVREPELEDLTRYDVGAIRAHNGSLQHLTWLGLQWNSLPALPGIRKWLKQLFHHLPHETSRLETNAPESICILDLEVFLLGVVYTSHLQLKEKCNSHHSSYQPLCLPLPVCKQLCTERQKSWWDAVCTLIHRKAVPGNVAKLRLLVQHEINTLRAQEKHGLQPALLVHWAECLQKTGSGLNSFYDQREYIGRSVHYWKKVLPLLKIIKKKNSIPEPIDPLFKHFHSVDIQASEIVEYEEDAHITFAILDAVNGNIEDAVTAFESIKSVVSYWNLALIFHRKAEDIENDALSPEEQEECKNYLRKTRDYLIKIIDDSDSNLSVVKKLPVPLESVKEMLNSVMQELEDYSEGGPLYKNGSLRNADSEIKHSTPSPTRYSLSPSKSYKYSPKTPPRWAEDQNSLLKMICQQVEAIKKEMQELKLNSSNSASPHRWPTENYGPDSVPDGYQGSQTFHGAPLTVATTGPSVYYSQSPAYNSQYLLRPAANVTPTKGPVYGMNRLPPQQHIYAYPQQMHTPPVQSSSACMFSQEMYGPPALRFESPATGILSPRGDDYFNYNVQQTSTNPPLPEPGYFTKPPIAAHASRSAESKTIEFGKTNFVQPMPGEGLRPSLPTQAHTTQPTPFKFNSNFKSNDGDFTFSSPQVVTQPPPAAYSNSESLLGLLTSDKPLQGDGYSGAKPIPGGQTIGPRNTFNFGSKNVSGISFTENMGSSQQKNSGFRRSDDMFTFHGPGKSVFGTPTLETANKNHETDGGSAHGDDDDDGPHFEPVVPLPDKIEVKTGEEDEEEFFCNRAKLFRFDVESKEWKERGIGNVKILRHKTSGKIRLLMRREQVLKICANHYISPDMKLTPNAGSDRSFVWHALDYADELPKPEQLAIRFKTPEEAALFKCKFEEAQSILKAPGTNVAMASNQAVRIVKEPTSHDNKDICKSDAGNLNFEFQVAKKEGSWWHCNSCSLKNASTAKKCVSCQNLNPSNKELVGPPLAETVFTPKTSPENVQDRFALVTPKKEGHWDCSICLVRNEPTVSRCIACQNTKSANKSGSSFVHQASFKFGQGDLPKPINSDFRSVFSTKEGQWDCSACLVQNEGSSTKCAACQNPRKQSLPATSIPTPASFKFGTSETSKTLKSGFEDMFAKKEGQWDCSSCLVRNEANATRCVACQNPDKPSPSTSVPAPASFKFGTSETSKAPKSGFEGMFTKKEGQWDCSVCLVRNEASATKCIACQNPGKQNQTTSAVSTPASSETSKAPKSGFEGMFTKKEGQWDCSVCLVRNEASATKCIACQNPGKQNQTTSAVSTPASSETSKAPKSGFEGMFTKKEGQWDCSVCLVRNEASATKCIACQCPSKQNQTTAISTPASSEISKAPKSGFEGMFIRKGQWDCSVCCVQNESSSLKCVACDASKPTHKPIAEAPSAFTLGSEMKLHDSSGSQVGTGFKSNFSEKASKFGNTEQGFKFGHVDQENSPSFMFQGSSNTEFKSTKEGFSIPVSADGFKFGISEPGNQEKKSEKPLENGTGFQAQDISGQKNGRGVIFGQTSSTFTFADLAKSTSGEGFQFGKKDPNFKGFSGAGEKLFSSQYGKMANKANTSGDFEKDDDAYKTEDSDDIHFEPVVQMPEKVELVTGEEDEKVLYSQRVKLFRFDAEVSQWKERGLGNLKILKNEVNGKLRMLMRREQVLKVCANHWITTTMNLKPLSGSDRAWMWLASDFSDGDAKLEQLAAKFKTPELAEEFKQKFEECQRLLLDIPLQTPHKLVDTGRAAKLIQRAEEMKSGLKDFKTFLTNDQTKVTEEENKGSGTGAAGASDTTIKPNPENTGPTLEWDNYDLREDALDDSVSSSSVHASPLASSPVRKNLFRFGESTTGFNFSFKSALSPSKSPAKLNQSGTSVGTDEESDVTQEEERDGQYFEPVVPLPDLVEVSSGEENEQVVFSHRAKLYRYDKDVGQWKERGIGDIKILQNYDNKQVRIVMRRDQVLKLCANHRITPDMTLQNMKGTERVWLWTACDFADGERKVEHLAVRFKLQDVADSFKKIFDEAKTAQEKDSLITPHVSRSSTPRESPCGKIAVAVLEETTRERTDVIQGDDVADATSEVEVSSTSETTPKAVVSPPKFVFGSESVKSIFSSEKSKPFAFGNSSATGSLFGFSFNAPLKSNNSETSSVAQSGSESKVEPKKCELSKNSDIEQSSDSKVKNLFASFPTEESSINYTFKTPEKAKEKKKPEDSPSDDDVLIVYELTPTAEQKALATKLKLPPTFFCYKNRPDYVSEEEEDDEDFETAVKKLNGKLYLDGSEKCRPLEENTADNEKECIIVWEKKPTVEEKAKADTLKLPPTFFCGVCSDTDEDNGNGEDFQSELQKVQEAQKSQTEEITSTTDSVYTGGTEVMVPSFCKSEEPDSITKSISSPSVSSETMDKPVDLSTRKEIDTDSTSQGESKIVSFGFGSSTGLSFADLASSNSGDFAFGSKDKNFQWANTGAAVFGTQSVGTQSAGKVGEDEDGSDEEVVHNEDIHFEPIVSLPEVEVKSGEEDEEILFKERAKLYRWDRDVSQWKERGVGDIKILWHTMKNYYRILMRRDQVFKVCANHVITKTMELKPLNVSNNALVWTASDYADGEAKVEQLAVRFKTKEVADCFKKTFEECQQNLMKLQKGHVSLAAELSKETNPVVFFDVCADGEPLGRITMELFSNIVPRTAENFRALCTGEKGFGFKNSIFHRVIPDFVCQGGDITKHDGTGGQSIYGDKFEDENFDVKHTGPGLLSMANQGQNTNNSQFVITLKKAEHLDFKHVVFGFVKDGMDTVKKIESFGSPKGSVCRRITITECGQI

SEQ ID NO: 4762 - protein, 266 aa, Homo sapiens
MSSVFGKPRAGSGPQSAPLEVNLAILGRRGAGKSALTVKFLTKRFISEYDPNLEDTYSSEETVDHQPVHLRVMDTADLDTPRNCERYLNWAHAFLVVYSVDSRQSFDSSSSYLELLALHAKETQRSIPALLLGNKLDMAQYRQVTKAEGVALAGRFGCLFFEVSACLDFEHVQHVFHEAVREARRELEKSPLTRPLFISEERALPHQAPLTARHGLASCTFNTLSTINLKEMPTVAQAKLVTVKSSRAQSKRKAPTLTLLKGFKIF

SEQ ID NO: 4763 - protein, 255 aa, Homo sapiens
MVIMGPELVGSWSDFKNEAADPRALTVKFLTKRFISEYDPNLEDTYSSEETVDHQPVHLRVMDTADLDTPRNCERYLNWAHAFLVVYSVDSRQSFDSSSSYLELLALHAKETQRSIPALLLGNKLDMAQYRQVTKAEGVALAGRFGCLFFEVSACLDFEHVQHVFHEAVREARRELEKSPLTRPLFISEERALPHQAPLTARHGLASCTFNTLSTINLKEMPTVAQAKLVTVKSSRAQSKRKAPTLTLLKGFKIF

SEQ ID NO: 4764 - protein, 247 aa, Homo sapiens
MSSVFGKPRAGSGPQSAPLEVNLAILGRRGAGKSEDTYSSEETVDHQPVHLRVMDTADLDTPRNCERYLNWAHAFLVVYSVDSRQSFDSSSSYLELLALHAKETQRSIPALLLGNKLDMAQYRQVTKAEGVALAGRFGCLFFEVSACLDFEHVQHVFHEAVREARRELEKSPLTRPLFISEERALPHQAPLTARHGLASCTFNTLSTINLKEMPTVAQAKLVTVKSSRAQSKRKAPTLTLLKGFKIF

SEQ ID NO: 4765 - protein, 409 aa, Homo sapiens
MQVTLKTLQQQTFKIDIDPEETVKALKEKIESEKGKDAFPVAGQKLIYAGKILNDDTALKEYKIDEKNFVVVMVTKPKAVSTPAPATTQQSAPASTTAVTSSTTTTVAQAPTPVPALAPTSTPASITPASATASSEPAPASAAKQEKPAEKPAETPVATSPTATDSTSGDSSRSNLFEDATSALVTGQSYENMVTEIMSMGYEREQVIAALRASFNNPDRAVEYLLMGIPGDRESQAVVDPPQAASTGAPQSSAVAAAAATTTATTTTTSSGGHPLEFLRNQPQFQQMRQIIQQNPSLLPALLQQIGRENPQLLQQISQHQEHFIQMLNEPVQEAGGQGGGGGGGSGGIAEAGSGHMNYIQVTPQEKEAIERLKALGFPEGLVIQAYFACEKNENLAANFLLQQNFDED

SEQ ID NO: 4766 - protein, 337 aa, Homo sapiens
MVTKPKAVSTPAPATTQQSAPASTTAVTSSTTTTVAQAPTPVPALAPTSTPASITPASATASSEPAPASAAKQEKPAEKPAETPVATSPTATDSTSGDSSRSNLFEDATSALVTGQSYENMVTEIMSMGYEREQVIAALRASFNNPDRAVEYLLMGIPGDRESQAVVDPPQAASTGAPQSSAVAAAAATTTATTTTTSSGGHPLEFLRNQPQFQQMRQIIQQNPSLLPALLQQIGRENPQLLQQISQHQEHFIQMLNEPVQEAGGQGGGGGGGSGGIAEAGSGHMNYIQVTPQEKEAIERLKALGFPEGLVIQAYFACEKNENLAANFLLQQNFDED

SEQ ID NO: 4767 - protein, 1001 aa, Homo sapiens
MAVVIRLLGLPFIAGPVDIRHFFTGLTIPDGGVHIIGGEIGEAFIIFATDEDARRAISRSGGFIKDSSVELFLSSKAEMQKTIEMKRTDRVGRGRPGSGTSGVDSLSNFIESVKEEASNSGYGSSINQDAGFHTNGTGHGNLRPRKTRPLKAENPYLFLRGLPYLVNEDDVRVFFSGLCVDGVIFLKHHDGRNNGDAIVKFASCVDASGGLKCHRSFMGSRFIEVMQGSEQQWIEFGGNAVKEGDVLRRSEEHSPPRGINDRHFRKRSHSKSPRRTRSRSPLGFYVHLKNLSLSIDERDLRNFFRGTDLTDEQIRFLYKDENRTRYAFVMFKTLKDYNTALSLHKTVLQYRPVHIDPISRKQMLKFIARYEKKRSGSLERDRPGHVSQKYSQEGNSGQKLCIYIRNFPFDVTKVEVQKFFADFLLAEDDIYLLYDDKGVGLGEALVKFKSEEQAMKAERLNRRRFLGTEVLLRLISEAQIQEFGVNFSVMSSEKMQARSQSRERGDHSHLFDSKDPPIYSVGAFENFRHQLEDLRQLDNFKHPQRDFRQPDRHPPEDFRHSSEDFRFPPEDFRHSPEDFRRPREEDFRRPSEEDFRRPWEEDFRRPPEDDFRHPREEDWRRPLEEDWRRPLEEDFRRSPTEDFRQLPEEDFRQPPEEDLRWLPEEDFRRPPEEDWRRPPEEDFRRPLQGEWRRPPEDDFRRPPEEDFRHSPEEDFRQSPQEHFRRPPQEHFRRPPPEHFRRPPPEHFRRPPPEHFRRPPPEHFRRPPPEHFRRPPPEHFRRPPQEHFRRPPQEHFRRSREEDFRHPPDEDFRGPPDEDFRHPPDEDFRSPQEEDFRCPSDEDFRQLPEEDLREAPEEDPRLPDNFRPPGEDFRSPPDDFRSHRPFVNFGRPEGGKFDFGKHNMGSFPEGRFMPDPKINCGSGRVTPIKIMNLPFKANVNEILDFFHGYRIIPDSVSIQYNEQGLPTGEAIVAMINYNEAMAAIKDLNDRPVGPRKVKLTLL

SEQ ID NO: 4768 - protein, 194 aa, Homo sapiens
MALRELKVCLLGDTGVGKSSIVWRFVEDSFDPNINPTIGASFMTKTVQYQNELHKFLIWDTAGQERFRALAPMYYRGSAAAIIVYDITKEETFSTLKNWVKELRQHGPPNIVVAIAGNKCDLIDVREVMERDAKDYADSIHAIFVETSAKNAININELFIEISRRIPSTDANLPSGGKGFKLRRQPSEPKRSCC

SEQ ID NO: 4769 - protein, 391 aa, Homo sapiens
MKCLVTGGNVKVLGKAVHSLSRIGDELYLEPLEDGLSLRTVNSSRSAYACFLFAPLFFQQYQAATPGQDLLRCKILMKSFLSVFRSLAMLEKTVEKCCISLNGRSSRLVVQLHCKFGVRKTHNLSFQDCESLQAVFDPASCPHMLRAPARVLGEAVLPFSPALAEVTLGIGRGRRVILRSYHEEEADSTAKAMVTEMCLGEEDFQQLQAQEGVAITFCLKEFRGLLSFAESANLNLSIHFDAPGRPAIFTIKDSLLDGHFVLATLSDTDSHSQDLGSPERHQPVPQLQAHSTPHPDDFANDDIDSYMIAMETTIGNEGSRVLPSISLSPGPQPPKSPGPHSEEEDEAEPSTVPGTPPPKKFRSLFFGSILAPVRSPQGPSPVLAEDSEGEG

SEQ ID NO: 4770 - protein, 218 aa, Homo sapiens
MTDGDYDYLIKLLALGDSGVGKTTFLYRYTDNKFNPKFITTVGIDFREKRVVYNAQGPNGSSGKAFKVHLQLWDTAGQERFRSLTTAFFRDAMGFLLMFDLTSQQSFLNVRNWMSQLQANAYCENPDIVLIGNKADLPDQREVNERQARELADKYGIPYFETSAATGQNVEKAVETLLDLIMKRMEQCVEKTQIPDTVNGGNSGNLDGEKPPEKKCIC

SEQ ID NO: 4771 - protein, 426 aa, Homo sapiens
MLKCVMSGSQVKVFGKAVQALSRISDEFWLDPSKKGLALRCVNSSRSAYGCVLFSPVFFQHYQWSALVKMSENELDTTLHLKCKLGMKSILPIFRCLNSLERNIEKCRIFTRSDKCKVVIQFFYRHGIKRTHNICFQESQPLQVIFDKNVCTNTLMIQPRLLADAIVLFTSSQEEVTLAVTPLNFCLKSSNEESMDLSNAVHSEMFVGSDEFDFFQIGMDTEITFCFKELKGILTFSEATHAPISIYFDFPGKPLALSIDDMLVEANFILATLADEQSRASSPQSLCLSQKRKRSDLIEKKAGKNVTGQALECISKKAAPRRLYPKETLTNISALENCGSPAMKRVDGDVSEVSESSVSNTEEVPGSLCLRKFSCMFFGAVSSDQQEHFNHPFDSLARASDSEEDMNNVCCRKEFNGSDAKYFCII

SEQ ID NO: 4772 - protein, 414 aa, Homo sapiens
MLKCVMSGSQVKVFGKAVQALSRISDEFWLDPSKKGLALRCVNSSRSAYGCVLFSPVFFQHYQWSALVKMSENELDTTLHLKCKLGMKSILPIFRCLNSLERNIEKCRIFTRSDKCKVVIQFFYRHGIKRTHNICFQESQPLQVIFDKNVCTNTLMIQPRLLADAIVLFTSSQEEVTLAVTPLNFCLKSSNEESMDLSNAVHSEMFVGSDEFDFFQIGMDTEITFCFKELKGILTFSEATHAPISIYFDFPGKPLALSIDDMLVEANFILATLADEQSRASSPQSLCLSQKRKRSDLIEKKAGKNVTGQALECISKKAAPRRLYPKETLTNISALENCGSPAMKRVDGDVSEVSESSVSNTEEVPGSLCLRKFSCMFFGAVSSDQQEHFNHPFDSLARASDSEEDMNNGSFSIF

SEQ ID NO: 4773 - protein, 345 aa, Homo sapiens
MSENELDTTLHLKCKLGMKSILPIFRCLNSLERNIEKCRIFTRSDKCKVVIQFFYRHGIKRTHNICFQESQPLQVIFDKNVCTNTLMIQPRLLADAIVLFTSSQEEVTLAVTPLNFCLKSSNEESMDLSNAVHSEMFVGSDEFDFFQIGMDTEITFCFKELKGILTFSEATHAPISIYFDFPGKPLALSIDDMLVEANFILATLADEQSRASSPQSLCLSQKRKRSDLIEKKAGKNVTGQALECISKKAAPRRLYPKETLTNISALENCGSPAMKRVDGDVSEVSESSVSNTEEVPGSLCLRKFSCMFFGAVSSDQQEHFNHPFDSLARASDSEEDMNNGSFSIF

SEQ ID NO: 4774 - protein, 259 aa, Homo sapiens
MIQPRLLADAIVLFTSSQEEVTLAVTPLNFCLKSSNEESMDLSNAVHSEMFVGSDEFDFFQIGMDTEITFCFKELKGILTFSEATHAPISIYFDFPGKPLALSIDDMLVEANFILATLADEQSRASSPQSLCLSQKRKRSDLIEKKAGKNVTGQALECISKKAAPRRLYPKETLTNISALENCGSPAMKRVDGDVSEVSESSVSNTEEVPGSLCLRKFSCMFFGAVSSDQQEHFNHPFDSLARASDSEEDMNNGSFSIF

SEQ ID NO: 4775 - protein, 271 aa, Homo sapiens
MIQPRLLADAIVLFTSSQEEVTLAVTPLNFCLKSSNEESMDLSNAVHSEMFVGSDEFDFFQIGMDTEITFCFKELKGILTFSEATHAPISIYFDFPGKPLALSIDDMLVEANFILATLADEQSRASSPQSLCLSQKRKRSDLIEKKAGKNVTGQALECISKKAAPRRLYPKETLTNISALENCGSPAMKRVDGDVSEVSESSVSNTEEVPGSLCLRKFSCMFFGAVSSDQQEHFNHPFDSLARASDSEEDMNNVCCRKEFNGSDAKYFCII

SEQ ID NO: 4776 - protein, 217 aa, Homo sapiens
METIWIYQFRLIVIGDSTVGKSCLLHRFTQGRFPGLRSPACDPTVGVDFFSRLLEIEPGKRIKLQLWDTAGQERFRSITRSYYRNSVGGFLVFDITNRRSFEHVKDWLEEAKMYVQPFRIVFLLVGHKCDLASQRQVTREEAEKLSADCGMKYIETSAKDATNVEESFTILTRDIYELIKKGEICIQDGWEGVKSGFVPNTVHSSEEAVKPRKECFC

SEQ ID NO: 4777 - protein, 1154 aa, Homo sapiens
MGLLLMILASAVLGSFLTLLAQFFLLYRRQPEPPADEAARAGEGFRYIKPVPGLLLREYLYGGGRDEEPSGAAPEGGATPTAAPETPAPPTRETCYFLNATILFLFRELRDTALTRRWVTKKIKVEFEELLQTKTAGRLLEGLSLRDVFLGETVPFIKTIRLVRPVVPSATGEPDGPEGEALPAACPEELAFEAEVEYNGGFHLAIDVDLVFGKSAYLFVKLSRVVGRLRLVFTRVPFTHWFFSFVEDPLIDFEVRSQFEGRPMPQLTSIIVNQLKKIIKRKHTLPNYKIRFKPFFPYQTLQGFEEDEEHIHIQQWALTEGRLKVTLLECSRLLIFGSYDREANVHCTLELSSSVWEEKQRSSIKTVELIKGNLQSVGLTLRLVQSTDGYAGHVIIETVAPNSPAAIADLQRGDRLIAIGGVKITSTLQVLKLIKQAGDRVLVYYERPVGQSNQGAVLQDNFGQLEENFLSSSCQSGYEEEAAGLTVDTESRELDSEFEDLASDVRAQNEFKDEAQSLSHSPKRVPTTLSIKPLGAISPVLNRKLAVGSHPLPPKIQSKDGNKPPPLKTSEITDPAQVSKPTQGSAFKPPVPPRPQAKVPLPSADAPNQAEPDVLVEKPEKVVPPPLVDKSAEKQAKNVDAIDDAAAPKQFLAKQEVAKDVTSETSCPTKDSSDDRQTWESSEILYRNKLGKWTRTRASCLFDIEACHRYLNIALWCRDPFKLGGLICLGHVSLKLEDVALGCLATSNTEYLSKLRLEAPSPKAIVTRTALRNLSMQKGFNDKFCYGDITIHFKYLKEGESDHHVVTNVEKEKEPHLVEEVSVLPKEEQFVGQMGLTENKHSFQDTQFQNPTWCDYCKKKVWTKAASQCMFCAYVCHKKCQEKCLAETSVCGATDRRIDRTLKNLRLEGQETLLGLPPRVDAEASKSVNKTTGLTRHIINTSSRLLNLRQVSKTRLSEPGTDLVEPSPKHTPNTSDNEGSDTEVCGPNSPSKRGNSTGIKLVRKEGGLDDSVFIAVKEIGRDLYRGLPTEERIQKLEFMLDKLQNEIDQELEHNNSLVREEKETTDTRKKSLLSAALAKSGERLQALTLLMIHYRAGIEDIETLESLSLDQHSKKISKYTDDTEEDLDNEISQLIDSQPFSSISDDLFGPSESV

SEQ ID NO: 4778 - protein, 402 aa, Homo sapiens
MSPCGPLNLSLAGEATTCAAPWVPNTSAVPPSGASPALPIFSMTLGAVSNLLALALLAQAAGRLRRRRSAATFLLFVASLLATDLAGHVIPGALVLRLYTAGRAPAGGACHFLGGCMVFFGLCPLLLGCGMAVERCVGVTRPLLHAARVSVARARLALAAVAAVALAVALLPLARVGRYELQYPGTWCFIGLGPPGGWRQALLAGLFASLGLVALLAALVCNTLSGLALLRARWRRRSRRPPPASGPDSRRRWGAHGPRSASASSASSIASASTFFGGSRSSGSARRARAHDVEMVGQLVGIMVVSCICWSPMLVLVALAVGGWSSTSLQRPLFLAVRLASWNQILDPWVYILLRQAVLRQLLRLLPPRAGAKGGPAGLGLTPSAWEASSLRSSRHSGLSHF

SEQ ID NO: 4779 - protein, 264 aa, Homo sapiens
MQKASHKNKKERGVSNKVKTSVHNLSKTQQTKLTVGSLGLGLIIIQHGPYLQITHLIRKGAAANDGKLQPGDVLISVGHANVLGYTLREFLQLLQHITIGTVLQIKVYRDFINIPEEWQEIYDLIPEAKFPVTSTPKKIELAKDESFTSSDDNENVDLDKRLQYYRYPWSTVHHPARRPISISRDWHGYKKKNHTISVGKDINCDVMIHRDDKKEVRAPSPYWIMVKQDNESSSSSTSSTSDAFWLEDCAQVEEGKAQLVSKVG

SEQ ID NO: 4780 - protein, 202 aa, Homo sapiens
MAEGEEEGGDVLISVGHANVLGYTLREFLQLLQHITIGTVLQIKVYRDFINIPEEWQEIYDLIPEAKFPVTSTPKKIELAKDESFTSSDDNENVDLDKRLQYYRYPWSTVHHPARRPISISRDWHGYKKKNHTISVGKDINCDVMIHRDDKKEVRAPSPYWIMVKQDNESSSSSTSSTSDAFWLEDCAQVEEGKAQLVSKVG

SEQ ID NO: 4781 - protein, 204 aa, Homo sapiens
MQKASHKNKKGDVLISVGHANVLGYTLREFLQLLQHITIGTVLQIKVYRDFINIPEEWQEIYDLIPEAKFPVTSTPKKIELAKDESFTSSDDNENVDLDKRLQYYRYPWSTVHHPARRPISISRDWHGYKKKNHTISVGKDINCDVMIHRDDKKEVRAPSPYWIMVKQDNESSSSSTSSTSDAFWLEDCAQVEEGKAQLVSKVG

SEQ ID NO: 4782 - protein, 168 aa, Homo sapiens
MAFNDCFSLNYPGNPCPGDLIEVFRPGYQHWALYLGDGYVINIAPVDGIPASFTSAKSVFSSKALVKMQLLKDVVGNDTYRINNKYDETYPPLPVEEIIKRSEFVIGQEVAYNLLVNNCEHFVTLLRYGEGVSEQANRAISTVEFVTAAVGVFSFLGLFPKGQRAKYY

SEQ ID NO: 4783 - protein, 273 aa, Homo sapiens
MVRASCRLGSARTPSPARRPPGVRASQSRGGAAGTVSAWRRWCWRWPWRTAPSDGWRLPPGCLPGTDGVVPRPPAARSAAARPRETPGHTQLPPGARRRPRLESEMAFNDCFSLNYPGNPCPGDLIEVFRPGYQHWALYLGDGYVINIAPVDGIPASFTSAKSVFSSKALVKMQLLKDVVGNDTYRINNKYDETYPPLPVEEIIKRSEFVIGQEVAYNLLVNNCEHFVTLLRYGEGVSEQANRAISTVEFVTAAVGVFSFLGLFPKGQRAKYY

SEQ ID NO: 4784 - protein, 783 aa, Homo sapiens
MAACRYCCSCLRLRPLSDGPFLLPRRDRALTQLQVRALWSSAGSRAVAVDLGNRKLEISSGKLARFADGSAVVQSGDTAVMVTAVSKTKPSPSQFMPLVVDYRQKAAAAGRIPTNYLRREIGTSDKEILTSRIIDRSIRPLFPAGYFYDTQVLCNLLAVDGVNEPDVLAINGASVALSLSDIPWNGPVGAVRIGIIDGEYVVNPTRKEMSSSTLNLVVAGAPKSQIVMLEASAENILQQDFCHAIKVGVKYTQQIIQGIQQLVKETGVTKRTPQKLFTPSPEIVKYTHKLAMERLYAVFTDYEHDKVSRDEAVNKIRLDTEEQLKEKFPEADPYEIIESFNVVAKEVFRSIVLNEYKRCDGRDLTSLRNVSCEVDMFKTLHGSALFQRGQTQVLCTVTFDSLESGIKSDQVITAINGIKDKNFMLHYEFPPYATNEIGKVTGLNRRELGHGALAEKALYPVIPRDFPFTIRVTSEVLESNGSSSMASACGGSLALMDSGVPISSAVAGVAIGLVTKTDPEKGEIEDYRLLTDILGIEDYNGDMDFKIAGTNKGITALQADIKLPGIPIKIVMEAIQQASVAKKEILQIMNKTISKPRASRKENGPVVETVQVPLSKRAKFVGPGGYNLKKLQAETGVTISQVDEETFSVFAPTPSAMHEARDFITEICKDDQEQQLEFGAVYTATITEIRDTGVMVKLYPNMTAVLLHNTQLDQRKIKHPTALGLEVGQEIQVKYFGRDPADGRMRLSRKVLQSPATTVVRTLNDRSSIVMGEPISQSSSNSQ

SEQ ID NO: 4785 - protein, 162 aa, Homo sapiens
MRAPIPEPKPGDLIEIFRPFYRHWAIYVGDGYVVHLAPPSEVAGAGAASVMSALTDKAIVKKELLYDVAGSDKYQVNNKHDDKYSPLPCSKIIQRAEELVGQEVLYKLTSENCEHFVNELRYGVARSDQVRDVIIAASVAGMGLAAMSLIGVMFSRNKRQKQ

SEQ ID NO: 4786 - protein, 2302 aa, Homo sapiens
MTSEEMTASVLIPVTQRKVVSAQSAADESSEKVSDINISKAHTVRRSGETSHTISQLNKLKEEPSGSNLPKILSIAREKIVSDENSNEKCWEKIMPDSAKNLNINCNNILRNHQHGLPQRQFYEMYNSVAEEDLCLETGIPSPLERKVFPGIQLELDRPSMGISPLGNQSVIIETGRAHPDSRRAVFHFHYEVDRRMSDTFCTLSENLILDDCGNCVPLPGGEEKQKKNYVAYTCKLMELAKNCDNKNEQLQCDHCDTLNDKYFCFEGSCEKVDMVYSGDSFCRKDFTDSQAAKTFLSHFEDFPDNCDDVEEDAFKSKKERSTLLVRRFCKNDREVKKSVYTGTRAIVRTLPSGHIGLTAWSYIDQKRNGPLLPCGRVMEPPSTVEIRQDGSQRLSEAQWYPIYNAVRREETENTVGSLLHFLTKLPASETAHGRISVGPCLKQCVRDTVCEYRATLQRTSISQYITGSLLEATTSLGARSGLLSTFGGSTGRMMLKERQPGPSVANSNALPSSSAGISKELIDLQPLIQFPEEVASILMEQEQTIYRRVLPVDYLCFLTRDLGTPECQSSLPCLKASISASILTTQNGEHNALEDLVMRFNEVSSWVTWLILTAGSMEEKREVFSYLVHVAKCCWNMGNYNAVMEFLAGLRSRKVLKMWQFMDQSDIETMRSLKDAMAQHESSCEYRKVVTRALHIPGCKVVPFCGVFLKELCEVLDGASGLMKLCPRYNSQEETLEFVADYSGQDNFLQRVGQNGLKNSEKESTVNSIFQVIRSCNRSLETDEEDSPSEGNSSRKSSLKDKSRWQFIIGDLLDSDNDIFEQSKEYDSHGSEDSQKAFDHGTELIPWYVLSIQADVHQFLLQGATVIHYDQDTHLSARCFLQLQPDNSTLTWVKPTTASPASSKAKLGVLNNTAEPGKFPLLGNAGLSSLTEGVLDLFAVKAVYMGHPGIDIHTVCVQNKLGSMFLSETGVTLLYGLQTTDNRLLHFVAPKHTAKMLFSGLLELTRAVRKMRKFPDQRQQWLRKQYVSLYQEDGRYEGPTLAHAVELFGGRRWSARNPSPGTSAKNAEKPNMQRNNTLGISTTKKKKKILMRGESGEVTDDEMATRKAKMHKECRSRSGSDPQDINEQEESEVNAIANPPNPLPSRRAHSLTTAGSPNLAAGTSSPIRPVSSPVLSSSNKSPSSAWSSSSWHGRIKGGMKGFQSFMVSDSNMSFVEFVELFKSFSVRSRKDLKDLFDVYAVPCNRSGSESAPLYTNLTIDENTSDLQPDLDLLTRNVSDLGLFIKSKQQLSDNQRQISDAIAAASIVTNGTGIESTSLGIFGVGILQLNDFLVNCQGEHCTYDEILSIIQKFEPSISMCHQGLMSFEGFARFLMDKENFASKNDESQENIKELQLPLSYYYIESSHNTYLTGHQLKGESSVELYSQVLLQGCRSVELDCWDGDDGMPIIYHGHTLTTKIPFKEVVEAIDRSAFINSDLPIIISIENHCSLPQQRKMAEIFKTVFGEKLVTKFLFETDFSDDPMLPSPDQLRKKVLLKNKKLKAHQTPVDILKQKAHQLASMQVQAYNGGNANPRPANNEEEEDEEDEYDYDYESLSDDNILEDRPENKSCNDKLQFEYNEEIPKRIKKADNSACNKGKVYDMELGEEFYLDQNKKESRQIAPELSDLVIYCQAVKFPGLSTLNASGSSRGKERKSRKSIFGNNPGRMSPGETASFNKTSGKSSCEGIRQTWEESSSPLNPTTSLSAIIRTPKCYHISSLNENAAKRLCRRYSQKLTQHTACQLLRTYPAATRIDSSNPNPLMFWLHGIQLVALNYQTDDLPLHLNAAMFEANGGCGYVLKPPVLWDKNCPMYQKFSPLERDLDSMDPAVYSLTIVSGQNVCPSNSMGSPCIEVDVLGMPLDSCHFRTKPIHRNTLNPMWNEQFLFHVHFEDLVFLRFAVVENNSSAVTAQRIIPLKALKRGYRHLQLRNLHNEVLEISSLFINSRRMEENSSGNTMSASSMFNTEERKCLQTHRVTVHGVPGPEPFTVFTINGGTKAKQLLQQILTNEQDIKPVTTDYFLMEEKYFISKEKNECRKQPFQRAIGPEEEIMQILSSWFPEEGYMGRIVLKTQQENLEEKNIVQDDKEVILSSEEESFFVQVHDVSPEQPRTVIKAPRVSTAQDVIQQTLCKAKYSYSILSNPNPSDYVLLEEVVKDTTNKKTTTPKSSQRVLLDQECVFQAQSKWKGAGKFILKLKEQVQASREDKKKGISFASELKKLTKSTKQPRGLTSPSQLLTSESIQTKEEKPVGGLSSSDTMDYRQ

SEQ ID NO: 4787 - protein, 1994 aa, Homo sapiens
MVSEGSAAGRDFAGMEEVRQLHVRFCKGIKIWHQAWFLCSLLGREPQEREAGCQLWLCTLSAVLKVGWLFPLSEVPNFTLLKDGCGCWRLKEDQIYNAVRREETENTVGSLLHFLTKLPASETAHGRISVGPCLKQCVRDTVCEYRATLQRTSISQYITGSLLEATTSLGARSGLLSTFGGSTGRMMLKERQPGPSVANSNALPSSSAGISKELIDLQPLIQFPEEVASILMEQEQTIYRRVLPVDYLCFLTRDLGTPECQSSLPCLKASISASILTTQNGEHNALEDLVMRFNEVSSWVTWLILTAGSMEEKREVFSYLVHVAKCCWNMGNYNAVMEFLAGLRSRKVLKMWQFMDQSDIETMRSLKDAMAQHESSCEYRKVVTRALHIPGCKVVPFCGVFLKELCEVLDGASGLMKLCPRYNSQEETLEFVADYSGQDNFLQRVGQNGLKNSEKESTVNSIFQVIRSCNRSLETDEEDSPSEGNSSRKSSLKDKSRWQFIIGDLLDSDNDIFEQSKEYDSHGSEDSQKAFDHGTELIPWYVLSIQADVHQFLLQGATVIHYDQDTHLSARCFLQLQPDNSTLTWVKPTTASPASSKAKLGVLNNTAEPGKFPLLGNAGLSSLTEGVLDLFAVKAVYMGHPGIDIHTVCVQNKLGSMFLSETGVTLLYGLQTTDNRLLHFVAPKHTAKMLFSGLLELTRAVRKMRKFPDQRQQWLRKQYVSLYQEDGRYEGPTLAHAVELFGGRRWSARNPSPGTSAKNAEKPNMQRNNTLGISTTKKKKKILMRGESGEVTDDEMATRKAKMHKECRSRSGSDPQDINEQEESEVNAIANPPNPLPSRRAHSLTTAGSPNLAAGTSSPIRPVSSPVLSSSNKSPSSAWSSSSWHGRIKGGMKGFQSFMVSDSNMSFVEFVELFKSFSVRSRKDLKDLFDVYAVPCNRSGSESAPLYTNLTIDENTSDLQPDLDLLTRNVSDLGLFIKSKQQLSDNQRQISDAIAAASIVTNGTGIESTSLGIFGVGILQLNDFLVNCQGEHCTYDEILSIIQKFEPSISMCHQGLMSFEGFARFLMDKENFASKNDESQENIKELQLPLSYYYIESSHNTYLTGHQLKGESSVELYSQVLLQGCRSVELDCWDGDDGMPIIYHGHTLTTKIPFKEVVEAIDRSAFINSDLPIIISIENHCSLPQQRKMAEIFKTVFGEKLVTKFLFETDFSDDPMLPSPDQLRKKVLLKNKKLKAHQTPVDILKQKAHQLASMQVQAYNGGNANPRPANNEEEEDEEDEYDYDYESLSDDNILEDRPENKSCNDKLQFEYNEEIPKRIKKADNSACNKGKVYDMELGEEFYLDQNKKESRQIAPELSDLVIYCQAVKFPGLSTLNASGSSRGKERKSRKSIFGNNPGRMSPGETASFNKTSGKSSCEGIRQTWEESSSPLNPTTSLSAIIRTPKCYHISSLNENAAKRLCRRYSQKLTQHTACQLLRTYPAATRIDSSNPNPLMFWLHGIQLVALNYQTDDLPLHLNAAMFEANGGCGYVLKPPVLWDKNCPMYQKFSPLERDLDSMDPAVYSLTIVSGQNVCPSNSMGSPCIEVDVLGMPLDSCHFRTKPIHRNTLNPMWNEQFLFHVHFEDLVFLRFAVVENNSSAVTAQRIIPLKALKRGYRHLQLRNLHNEVLEISSLFINSRRMEENSSGNTMSASSMFNTEERKCLQTHRVTVHGVPGPEPFTVFTINGGTKAKQLLQQILTNEQDIKPVTTDYFLMEEKYFISKEKNECRKQPFQRAIGPEEEIMQILSSWFPEEGYMGRIVLKTQQENLEEKNIVQDDKEVILSSEEESFFVQVHDVSPEQPRTVIKAPRVSTAQDVIQQTLCKAKYSYSILSNPNPSDYVLLEEVVKDTTNKKTTTPKSSQRVLLDQECVFQAQSKWKGAGKFILKLKEQVQASREDKKKGISFASELKKLTKSTKQPRGLTSPSQLLTSESIQTKEEKPVGGLSSSDTMDYRQ

SEQ ID NO: 4788 - protein, 328 aa, Homo sapiens
MSMLAERRRKQKWAVDPQNTAWSNDDSKFGQRMLEKMGWSKGKGLGAQEQGATDHIKVQVKNNHLGLGATINNEDNWIAHQDDFNQLLAELNTCHGQETTDSSDKKEKKSFSLEEKSKISKNRVHYMKFTKGKDLSSRSKTDLDCIFGKRQSKKTPEGDASPSTPEENETTTTSAFTIQEYFAKRMAALKNKPQVPVPGSDISETQVERKRGKKRNKEATGKDVESYLQPKAKRHTEGKPERAEAQERVAKKKSAPAEEQLRGPCWDQSSKASAQDAGDHVQPPEGRDFTLKPKKRRGKKKLQKPVEIAEDATLEETLVKKKKKKDSK

SEQ ID NO: 4789 - protein, 174 aa, Homo sapiens
MSMLAERRRKQKWAVDPQNTAWSNDDSKFGQRMLEKMGWSKGKGLGAQEQGATDHIKVQVKNNHLGLGATINNEDNWIAHQDDFNQLLAELNTCHGQETTDSSDKKEKKSFSLEEKSKISKNRVHYMKFTKGRCQSLHSRGERNHDNQRLHHPGVLCQADGSTEEQAPGSSSRV

SEQ ID NO: 4790 - protein, 184 aa, Homo sapiens
MASPAASSVRPPRPKKEPQTLVIPKNAAEEQKLKLERLMKNPDKAVPIPEKMSEWAPRPPPEFVRDVMGSSAGAGSGEFHVYRHLRRREYQRQDYMDAMAEKQKLDAEFQKRLEKNKIAAEEQTAKRRKKRQKLKEKKLLAKKMKLEQKKQEGPGQPKEQGSSSSAEASGTEEEEEVPSFTMGR

SEQ ID NO: 4791 - protein, 157 aa, Homo sapiens
MKNPDKAVPIPEKMSEWAPRPPPEFVRDVMGSSAGAGSGEFHVYRHLRRREYQRQDYMDAMAEKQKLDAEFQKRLEKNKIAAEEQTAKRRKKRTRSAQGAGVQQLCGGIWNRGGGGSAQFHHGAMTMFATASAWNLARAVTRRERRLFGSFSPARTR

SEQ ID NO: 4792 - protein, 282 aa, Homo sapiens
MSGADRSPNAGAAPDSAPGQAAVASAYQRFEPRAYLRNNYAPPRGDLCNPNGVGPWKLRCLAQTFATGEVSGRTLIDIGSGPTVYQLLSACSHFEDITMTDFLEVNRQELGRWLQEEPGAFNWSMYSQHACLIEGKGECWQDKERQLRARVKRVLPIDVHQPQPLGAGSPAPLPADALVSAFCLEAVSPDLASFQRALDHITTLLRPGGHLLLIGALEESWYLAGEARLTVVPVSEEEVREALVRSGYKVRDLRTYIMPAHLQTGVDDVKGVFFAWAQKVGL

SEQ ID NO: 4793 - protein, 727 aa, Homo sapiens
MRPLLLLALLGWLLLAEAKGDAKPEDNLLVLTVATKETEGFRRFKRSAQFFNYKIQALGLGEDWNVEKGTSAGGGQKVRLLKKALEKHADKEDLVILFADSYDVLFASGPRELLKKFRQARSQVVFSAEELIYPDRRLETKYPVVSDGKRFLGSGGFIGYAPNLSKLVAEWEGQDSDSDQLFYTKIFLDPEKREQINITLDHRCRIFQNLDGALDEVVLKFEMGHVRARNLAYDTLPVLIHGNGPTKLQLNYLGNYIPRFWTFETGCTVCDEGLRSLKGIGDEALPTVLVGVFIEQPTPFVSLFFQRLLRLHYPQKHMRLFIHNHEQHHKAQVEEFLAQHGSEYQSVKLVGPEVRMANADARNMGADLCRQDRSCTYYFSVDADVALTEPNSLRLLIQQNKNVIAPLMTRHGRLWSNFWGALSADGYYARSEDYVDIVQGRRVGVWNVPYISNIYLIKGSALRGELQSSDLFHHSKLDPDMAFCANIRQQDVFMFLTNRHTLGHLLSLDSYRTTHLHNDLWEVFSNPEDWKEKYIHQNYTKALAGKLVETPCPDVYWFPIFTEVACDELVEEMEHFGQWSLGNNKDNRIQGGYENVPTIDIHMNQIGFEREWHKFLLEYIAPMTEKLYPGYYTRAQFDLAFVVRYKPDEQPSLMPHHDASTFTINIALNRVGVDYEGGGCRFLRYNCSIRAPRKGWTLMHPGRLTHYHEGLPTTRGTRYIAVSFVDP

SEQ ID NO: 4794 - protein, 774 aa, Homo sapiens
MRPLLLLALLGWLLLAEAKGDAKPEAPCCQEGLRAGGSGSLHLGRDFTVLAGARGSPSPSVSSIPRFWIPGSDNLLVLTVATKETEGFRRFKRSAQFFNYKIQALGLGEDWNVEKGTSAGGGQKVRLLKKALEKHADKEDLVILFADSYDVLFASGPRELLKKFRQARSQVVFSAEELIYPDRRLETKYPVVSDGKRFLGSGGFIGYAPNLSKLVAEWEGQDSDSDQLFYTKIFLDPEKREQINITLDHRCRIFQNLDGALDEVVLKFEMGHVRARNLAYDTLPVLIHGNGPTKLQLNYLGNYIPRFWTFETGCTVCDEGLRSLKGIGDEALPTVLVGVFIEQPTPFVSLFFQRLLRLHYPQKHMRLFIHNHEQHHKAQVEEFLAQHGSEYQSVKLVGPEVRMANADARNMGADLCRQDRSCTYYFSVDADVALTEPNSLRLLIQQNKNVIAPLMTRHGRLWSNFWGALSADGYYARSEDYVDIVQGRRVGVWNVPYISNIYLIKGSALRGELQSSDLFHHSKLDPDMAFCANIRQQDVFMFLTNRHTLGHLLSLDSYRTTHLHNDLWEVFSNPEDWKEKYIHQNYTKALAGKLVETPCPDVYWFPIFTEVACDELVEEMEHFGQWSLGNNKDNRIQGGYENVPTIDIHMNQIGFEREWHKFLLEYIAPMTEKLYPGYYTRAQFDLAFVVRYKPDEQPSLMPHHDASTFTINIALNRVGVDYEGGGCRFLRYNCSIRAPRKGWTLMHPGRLTHYHEGLPTTRGTRYIAVSFVDP

SEQ ID NO: 4795 - protein, 1909 aa, Homo sapiens
MCHAAQETPLLHHFMAPVMARWPPFGLCLLLLLLSPPPLPLTGAHRFSAPNTTLNHLALAPGRGTLYVGAVNRLFQLSPELQLEAVAVTGPVIDSPDCVPFRDPAECPQAQLTDNANQLLLVSSRAQELVACGQVRQGVCETRRLGDVAEVLYQAEDPGDGQFVAANTPGVATVGLVVPLPGRDLLLVARGLAGKLSAGVPPLAIRQLAGSQPFSSEGLGRLVVGDFSDYNNSYVGAFADARSAYFVFRRRGARAQAEYRSYVARVCLGDTNLYSYVEVPLACQGQGLIQAAFLAPGTLLGVFAAGPRGTQAALCAFPMVELGASMEQARRLCYTAGGRGPSGAEEATVEYGVTSRCVTLPLDSPESYPCGDEHTPSPIAGRQPLEVQPLLKLGQPVSAVAALQADGHMIAFLGDTQGQLYKVFLHGSQGQVYHSQQVGPPGSAISPDLLLDSSGSHLYVLTAHQVDRIPVAACPQFPDCASCLQAQDPLCGWCVLQGRCTRKGQCGRAGQLNQWLWSYEEDSHCLHIQSLLPGHHPRQEQGQVTLSVPRLPILDADEYFHCAFGDYDSLAHVEGPHVACVTPPQDQVPLNPPGTDHVTVPLALMFEDVTVAATNFSFYDCSAVQALEAAAPCRACVGSIWRCHWCPQSSHCVYGEHCPEGERTIYSAQEVDIQVRGPGACPQVEGLAGPHLVPVGWESHLALRVRNLQHFRGLPASFHCWLELPGELRGLPATLEETAGDSGLIHCQAHQFYPSMSQRELPVPIYVTQGEAQRLDNTHALYVILYDCAMGHPDCSHCQAANRSLGCLWCADGQPACRYGPLCPPGAVELLCPAPSIDAVEPLTGPPEGGLALTILGSNLGRAFADVQYAVSVASRPCNPEPSLYRTSARIVCVTSPAPNGTTGPVRVAIKSQPPGISSQHFTYQDPVLLSLSPRWGPQAGGTQLTIRGQHLQTGGNTSAFVGGQPCPILEPVCPEAIVCRTRPQAAPGEAAVLVVFGHAQRTLLASPFRYTANPQLVAAEPSASFRGGGRLIRVRGTGLDVVQRPLLSVWLEADAEVQASRAQPQDPQPRRSCGAPAADPQACIQLGGGLLQCSTVCSVNSSSLLLCRSPAVPDRAHPQRVFFTLDNVQVDFASASGGQGFLYQPNPRLAPLSREGPARPYRLKPGHVLDVEGEGLNLGISKEEVRVHIGRGECLVKTLTRTHLYCEPPAHAPQPANGSGLPQFVVQMGNVQLALGPVQYEAEPPLSAFPVEAQAGVGMGAAVLIAAVLLLTLMYRHKSKQALRDYQKVLVQLESLETGVGDQCRKEFTDLMTEMTDLSSDLEGSGIPFLDYRTYAERAFFPGHGGCPLQPKPEGPGEDGHCATVRQGLTQLSNLLNSKLFLLTLIHTLEEQPSFSQRDRCHVASLLSLALHGKLEYLTDIMRTLLGDLAAHYVHRNPKLMLRRTETMVEKLLTNWLSICLYAFLREVAGEPLYMLFRAIQYQVDKGPVDAVTGKAKRTLNDSRLLREDVEFQPLTLMVLVGPGAGGAAGSSEMQRVPARVLDTDTITQVKEKVLDQVYKGTPFSQRPSVHALDLEWRSGLAGHLTLSDEDLTSVTQNHWKRLNTLQHYKVPDGATVGLVPQLHRGSTISQSLAQRCPLGENIPTLEDGEEGGVCLWHLVKATEEPEGAKVRCSSLREREPARAKAIPEIYLTRLLSMKGTLQKFVDDTFQAILSVNRPIPIAVKYLFDLLDELAEKHGIEDPGTLHIWKTNSLLLRFWVNALKNPQLIFDVRVSDNVDAILAVIAQTFIDSCTTSEHKVGRDSPVNKLLYAREIPRYKQMVERYYADIRQSSPASYQEMNSALAELSGNYTSAPHCLEALQELYNHIHRYYDQIISALEEDPVGQKLQLACRLQQVAALVENKVTDL

SEQ ID NO: 4796 - protein, 1932 aa, Homo sapiens
MELTPASSLTCSLLSPRLPGSFPQLRRVPPCSRPWLPKAPVMARWPPFGLCLLLLLLSPPPLPLTGAHRFSAPNTTLNHLALAPGRGTLYVGAVNRLFQLSPELQLEAVAVTGPVIDSPDCVPFRDPAECPQAQLTDNANQLLLVSSRAQELVACGQVRQGVCETRRLGDVAEVLYQAEDPGDGQFVAANTPGVATVGLVVPLPGRDLLLVARGLAGKLSAGVPPLAIRQLAGSQPFSSEGLGRLVVGDFSDYNNSYVGAFADARSAYFVFRRRGARAQAEYRSYVARVCLGDTNLYSYVEVPLACQGQGLIQAAFLAPGTLLGVFAAGPRGTQAALCAFPMVELGASMEQARRLCYTAGGRGPSGAEEATVEYGVTSRCVTLPLDSPESYPCGDEHTPSPIAGRQPLEVQPLLKLGQPVSAVAALQADGHMIAFLGDTQGQLYKVFLHGSQGQVYHSQQVGPPGSAISPDLLLDSSGSHLYVLTAHQVDRIPVAACPQFPDCASCLQAQDPLCGWCVLQGRCTRKGQCGRAGQLNQWLWSYEEDSHCLHIQSLLPGHHPRQEQGQVTLSVPRLPILDADEYFHCAFGDYDSLAHVEGPHVACVTPPQDQVPLNPPGTDHVTVPLALMFEDVTVAATNFSFYDCSAVQALEAAAPCRACVGSIWRCHWCPQSSHCVYGEHCPEGERTIYSAQEVDIQVRGPGACPQVEGLAGPHLVPVGWESHLALRVRNLQHFRGLPASFHCWLELPGELRGLPATLEETAGDSGLIHCQAHQFYPSMSQRELPVPIYVTQGEAQRLDNTHALYVILYDCAMGHPDCSHCQAANRSLGCLWCADGQPACRYGPLCPPGAVELLCPAPSIDAVEPLTGPPEGGLALTILGSNLGRAFADVQYAVSVASRPCNPEPSLYRTSARIVCVTSPAPNGTTGPVRVAIKSQPPGISSQHFTYQDPVLLSLSPRWGPQAGGTQLTIRGQHLQTGGNTSAFVGGQPCPILEPVCPEAIVCRTRPQAAPGEAAVLVVFGHAQRTLLASPFRYTANPQLVAAEPSASFRGGGRLIRVRGTGLDVVQRPLLSVWLEADAEVQASRAQPQDPQPRRSCGAPAADPQACIQLGGGLLQCSTVCSVNSSSLLLCRSPAVPDRAHPQRVFFTLDNVQVDFASASGGQGFLYQPNPRLAPLSREGPARPYRLKPGHVLDVEGEGLNLGISKEEVRVHIGRGECLVKTLTRTHLYCEPPAHAPQPANGSGLPQFVVQMGNVQLALGPVQYEAEPPLSAFPVEAQAGVGMGAAVLIAAVLLLTLMYRHKSKQALRDYQKVLVQLESLETGVGDQCRKEFTDLMTEMTDLSSDLEGSGIPFLDYRTYAERAFFPGHGGCPLQPKPEGPGEDGHCATVRQGLTQLSNLLNSKLFLLTLIHTLEEQPSFSQRDRCHVASLLSLALHGKLEYLTDIMRTLLGDLAAHYVHRNPKLMLRRTETMVEKLLTNWLSICLYAFLREVAGEPLYMLFRAIQYQVDKGPVDAVTGKAKRTLNDSRLLREDVEFQPLTLMVLVGPGAGGAAGSSEMQRVPARVLDTDTITQVKEKVLDQVYKGTPFSQRPSVHALDLEWRSGLAGHLTLSDEDLTSVTQNHWKRLNTLQHYKVPDGATVGLVPQLHRGSTISQSLAQRCPLGENIPTLEDGEEGGVCLWHLVKATEEPEGAKVRCSSLREREPARAKAIPEIYLTRLLSMKGTLQKFVDDTFQAILSVNRPIPIAVKYLFDLLDELAEKHGIEDPGTLHIWKTNSLLLRFWVNALKNPQLIFDVRVSDNVDAILAVIAQTFIDSCTTSEHKVGRDSPVNKLLYAREIPRYKQMVERYYADIRQSSPASYQEMNSALAELSGNYTSAPHCLEALQELYNHIHRYYDQIISALEEDPVGQKLQLACRLQQVAALVENKVTDL

SEQ ID NO: 4797 - protein, 1838 aa, Homo sapiens
MALQLWALTLLGLLGAGASLRPRKLDFFRSEKELNHLAVDEASGVVYLGAVNALYQLDAKLQLEQQVATGPALDNKKCTPPIEASQCHEAEMTDNVNQLLLLDPPRKRLVECGSLFKGICALRALSNISLRLFYEDGSGEKSFVASNDEGVATVGLVSSTGPGGDRVLFVGKGNGPHDNGIIVSTRLLDRTDSREAFEAYTDHATYKAGYLSTNTQQFVAAFEDGPYVFFVFNQQDKHPARNRTLLARMCREDPNYYSYLEMDLQCRDPDIHAAAFGTCLAASVAAPGSGRVLYAVFSRDSRSSGGPGAGLCLFPLDKVHAKMEANRNACYTGTREARDIFYKPFHGDIQCGGHAPGSSKSFPCGSEHLPYPLGSRDGLRGTAVLQRGGLNLTAVTVAAENNHTVAFLGTSDGRILKVYLTPDGTSSEYDSILVEINKRVKRDLVLSGDLGSLYAMTQDKVFRLPVQECLSYPTCTQCRDSQDPYCGWCVVEGRCTRKAECPRAEEASHWLWSRSKSCVAVTSAQPQNMSRRAQGEVQLTVSPLPALSEEDELLCLFGESPPHPARVEGEAVICNSPSSIPVTPPGQDHVAVTIQLLLRRGNIFLTSYQYPFYDCRQAMSLEENLPCISCVSNRWTCQWDLRYHECREASPNPEDGIVRAHMEDSCPQFLGPSPLVIPMNHETDVNFQGKNLDTVKGSSLHVGSDLLKFMEPVTMQESGTFAFRTPKLSHDANETLPLHLYVKSYGKNIDSKLHVTLYNCSFGRSDCSLCRAANPDYRCAWCGGQSRCVYEALCNTTSECPPPVITRIQPETGPLGGGIRITILGSNLGVQAGDIQRISVAGRNCSFQPERYSVSTRIVCVIEAAETPFTGGVEVDVFGKLGRSPPNVQFTFQQPKPLSVEPQQGPQAGGTTLTIHGTHLDTGSQEDVRVTLNGVPCKVTKFGAQLQCVTGPQATRGQMLLEVSYGGSPVPNPGIFFTYRENPVLRAFEPLRSFASGGRSINVTGQGFSLIQRFAMVVIAEPLQSWQPPREAESLQPMTVVGTDYVFHNDTKVVFLSPAVPEEPEAYNLTVLIEMDGHRALLRTEAGAFEYVPDPTFENFTGGVKKQVNKLIHARGTNLNKAMTLQEAEAFVGAERCTMKTLTETDLYCEPPEVQPPPKRRQKRDTTHNLPEFIVKFGSREWVLGRVEYDTRVSDVPLSLILPLVIVPMVVVIAVSVYCYWRKSQQAEREYEKIKSQLEGLEESVRDRCKKEFTDLMIEMEDQTNDVHEAGIPVLDYKTYTDRVFFLPSKDGDKDVMITGKLDIPEPRRPVVEQALYQFSNLLNSKSFLINFIHTLENQREFSARAKVYFASLLTVALHGKLEYYTDIMHTLFLELLEQYVVAKNPKLMLRRSETVVERMLSNWMSICLYQYLKDSAGEPLYKLFKAIKHQVEKGPVDAVQKKAKYTLNDTGLLGDDVEYAPLTVSVIVQDEGVDAIPVKVLNCDTISQVKEKIIDQVYRGQPCSCWPRPDSVVLEWRPGSTAQILSDLDLTSQREGRWKRVNTLMHYNVRDGATLILSKVGVSQQPEDSQQDLPGERHALLEEENRVWHLVRPTDEVDEGKSKRGSVKEKERTKAITEIYLTRLLSVKGTLQQFVDNFFQSVLAPGHAVPPAVKYFFDFLDEQAEKHNIQDEDTIHIWKTNSLPLRFWVNILKNPHFIFDVHVHEVVDASLSVIAQTFMDACTRTEHKLSRDSPSNKLLYAKEISTYKKMVEDYYKGIRQMVQVSDQDMNTHLAEISRAHTDSLNTLVALHQLYQYTQKYYDEIINALEEDPAAQKMQLAFRLQQIAAALENKVTDL

SEQ ID NO: 4798 - protein, 1871 aa, Homo sapiens
MPSVCLLLLLFLAVGGALGNRPFRAFVVTDTTLTHLAVHRVTGEVFVGAVNRVFKLAPNLTELRAHVTGPVEDNARCYPPPSMRVCAHRLAPVDNINKLLLIDYAARRLVACGSIWQGICQFLRLDDLFKLGEPHHRKEHYLSGAQEPDSMAGVIVEQGQGPSKLFVGTAVDGKSEYFPTLSSRKLISDEDSADMFSLVYQDEFVSSQIKIPSDTLSLYPAFDIYYIYGFVSASFVYFLTLQLDTQQTLLDTAGEKFFTSKIVRMCAGDSEFYSYVEFPIGCSWRGVEYRLVQSAHLAKPGLLLAQALGVPADEDVLFTIFSQGQKNRASPPRQTILCLFTLSNINAHIRRRIQSCYRGEGTLALPWLLNKELPCINTPMQINGNFCGLVLNQPLGGLHVIEGLPLLADSTDGMASVAAYTYRQHSVVFIGTRSGSLKKVRVDGFQDAHLYETVPVVDGSPILRDLLFSPDHRHIYLLSEKQVSQLPVETCEQYQSCAACLGSGDPHCGWCVLRHRCCREGACLGASAPHGFAEELSKCVQVRVRPNNVSVTSPGVQLTVTLHNVPDLSAGVSCAFEAAAENEAVLLPSGELLCPSPSLQELRALTRGHGATRTVRLQLLSKETGVRFAGADFVFYNCSVLQSCMSCVGSPYPCHWCKYRHTCTSRPHECSFQEGRVHSPEGCPEILPSGDLLIPVGVMQPLTLRAKNLPQPQSGQKNYECVVRVQGRQQRVPAVRFNSSSVQCQNASYSYEGDEHGDTELDFSVVWDGDFPIDKPPSFRALLYKCWAQRPSCGLCLKADPRFNCGWCISEHRCQLRTHCPAPKTNWMHLSQKGTRCSHPRITQIHPLVGPKEGGTRVTIVGDNLGLLSREVGLRVAGVRCNSIPAEYISAERIVCEMEESLVPSPPPGPVELCVGDCSADFRTQSEQVYSFVTPTFDQVSPSRGPASGGTRLTISGSSLDAGSRVTVTVRDSECQFVRRDAKAIVCISPLSTLGPSQAPITLAIDRANISSPGLIYTYTQDPTVTRLEPTWSIINGSTAITVSGTHLLTVQEPRVRAKYRGIETTNTCQVINDTAMLCKAPGIFLGRPQPRAQGEHPDEFGFLLDHVQTARSLNRSSFTYYPDPSFEPLGPSGVLDVKPGSHVVLKGKNLIPAAAGSSRLNYTVLIGGQPCSLTVSDTQLLCDSPSQTGRQPVMVLVGGLEFWLGTLHISAERALTLPAMMGLAAGGGLLLLAITAVLVAYKRKTQDADRTLKRLQLQMDNLESRVALECKEAFAELQTDINELTNHMDEVQIPFLDYRTYAVRVLFPGIEAHPVLKELDTPPNVEKALRLFGQLLHSRAFVLTFIHTLEAQSSFSMRDRGTVASLTMVALQSRLDYATGLLKQLLADLIEKNLESKNHPKLLLRRTESVAEKMLTNWFTFLLHKFLKECAGEPLFLLYCAIKQQMEKGPIDAITGEARYSLSEDKLIRQQIDYKTLTLHCVCPENEGSAQVPVKVLNCDSITQAKDKLLDTVYKGIPYSQRPKAEDMDLEWRQGRMTRIILQDEDVTTKIECDWKRLNSLAHYQVTDGSLVALVPKQVSAYNMANSFTFTRSLSRYESLLRTASSPDSLRSRAPMITPDQETGTKLWHLVKNHDHADHREGDRGSKMVSEIYLTRLLATKGTLQKFVDDLFETVFSTAHRGSALPLAIKYMFDFLDEQADQRQISDPDVRHTWKSNCLPLRFWVNVIKNPQFVFDIHKNSITDACLSVVAQTFMDSCSTSEHRLGKDSPSNKLLYAKDIPNYKSWVERYYRDIAKMASISDQDMDAYLVEQSRLHASDFSVLSALNELYFYVTKYRQEILTALDRDASCRKHKLRQKLEQIISLVSSDS

SEQ ID NO: 4799 - protein, 504 aa, Homo sapiens
MFPREKTWNISFAGCGFLGVYYVGVASCLREHAPFLVANATHIYGASAGALTATALVTGVCLGEAGAKFIEVSKEARKRFLGPLHPSFNLVKIIRSFLLKVLPADSHEHASGRLGISLTRVSDGENVIISHFNSKDELIQANVCSGFIPVYCGLIPPSLQGVRYVDGGISDNLPLYELKNTITVSPFSGESDICPQDSSTNIHELRVTNTSIQFNLRNLYRLSKALFPPEPLVLREMCKQGYRDGLRFLQRNGLLNRPNPLLALPPARPHGPEDKDQAVESAQAEDYSQLPGEDHILEHLPARLNEALLEACVEPTDLLTTLSNMLPVRLATAMMVPYTLPLESALSFTIRLLEWLPDVPEDIRWMKEQTGSICQYLVMRAKRKLGRHLPSRLPEQVELRRVQSLPSVPLSCAAYREALPGWMRNNLSLGDALAKWEECQRQLLLGLFCTNVAFPPEALRMRAPADPAPAPADPASPQHQLAGPAPLLSTPAPEARPVIGALGL

SEQ ID NO: 4800 - protein, 180 aa, Homo sapiens
MLPVRLATAMMVPYTLPLESALSFTIRLLEWLPDVPEDIRWMKEQTGSICQYLVMRAKRKLGRHLPSRLPEQVELRRVQSLPSVPLSCAAYREALPGWMRNNLSLGDALAKWEECQRQLLLGLFCTNVAFPPEALRMRAPADPAPAPADPASPQHQLAGPAPLLSTPAPEARPVIGALGL

SEQ ID NO: 4801 - protein, 782 aa, Homo sapiens
MSINLTVDIYIYLLSNARSVCGKQRSKQLYFLFSPKHYWRISHISLQRGFHTNIIRCKWTKSEAHSCSKHCYSPSNHGLHIGILKLSTSAPKGLTKVNICMSRIKSTLNSVSKAVFGNQNEMISRLAQFKPSSQILRKVSDSGWLKQKNIKQAIKSLKKYSDKSAEKSPFPEEKSHIIDKEEDIGKRSLFHYTSSITTKFGDSFYFLSNHINSYFKRKEKMSQQKENEHFRDKSELEDKKVEEGKLRSPDPGILAYKPGSESVHTVDKPTSPSAIPDVLQVSTKQSIANFLSRPTEGVQALVGGYIGGLVPKLKYDSKSQSEEQEEPAKTDQAVSKDRNAEEKKRLSLQREKIIARVSIDNRTRALVQALRRTTDPKLCITRVEELTFHLLEFPEGKGVAVKERIIPYLLRLRQIKDETLQAAVREILALIGYVDPVKGRGIRILSIDGGGTRGVVALQTLRKLVELTQKPVHQLFDYICGVSTGAILAFMLGLFHMPLDECEELYRKLGSDVFSQNVIVGTVKMSWSHAFYDSQTWENILKDRMGSALMIETARNPTCPKVAAVSTIVNRGITPKAFVFRNYGHFPGINSHYLGGCQYKMWQAIRASSAAPGYFAEYALGNDLHQDGGLLLNNPSALAMHECKCLWPDVPLECIVSLGTGRYESDVRNTVTYTSLKTKLSNVINSATDTEEVHIMLDGLLPPDTYFRFNPVMCENIPLDESRNEKLDQLQLEGLKYIERNEQKMKKVAKILSQEKTTLQKINDWIKLKTDMYEGLPFFSKL

SEQ ID NO: 4802 - protein, 720 aa, Homo sapiens
MSINLTVDIYIYLLSNARSVCGKQRSKQLYFLFSPKHYWRISHISLQRGFHTNIIRCKWTKSEAHSCSKHCYSPSNHGLHIGILKLSTSAPKGLTKVNICMSRIKSTLNSVSKAVFGNQNEMISRLAQFKPSSQILRKVSDSGWLKQKNIKQAIKSLKKYSDKSAEKSPFPEEKSHIIDKEEDIGKRSLFHYTSSITTKFGDSFYFLSNHINSYFKRKEKMSQQKENEHFRDKSELEDKKVEEGKLRSPDPGILAYKPGSESVHTVDKPTSPSAIPDVLQVSTKQSIANFLSRPTEGVQALVGGYIGGLVPKLKYDSKSQSEEQEEPAKTDQAVSKDRNAEEKKRLSLQREKIIARVSIDNRTRALVQALRRTTDPKLCITRVEELTFHLLEFPEGKGVAVKERIIPYLLRLRQIKDETLQAAVREILALIGYVDPVKGRGIRILSIDGGGTRGVVALQTLRKLVELTQKPVHQLFDYICGVSTGAILAFMLGLFHMPLDECEELYRKLGSDVFSQNVIVGTVKMSWSHAFYDSQTWENILKDRMGSALMIETARNPTCPKVAADGGLLLNNPSALAMHECKCLWPDVPLECIVSLGTGRYESDVRNTVTYTSLKTKLSNVINSATDTEEVHIMLDGLLPPDTYFRFNPVMCENIPLDESRNEKLDQLQLEGLKYIERNEQKMKKVAKILSQEKTTLQKINDWIKLKTDMYEGLPFFSKL

SEQ ID NO: 4803 - protein, 682 aa, Homo sapiens
MSRIKSTLNSVSKAVFGNQNEMISRLAQFKPSSQILRKVSDSGWLKQKNIKQAIKSLKKYSDKSAEKSPFPEEKSHIIDKEEDIGKRSLFHYTSSITTKFGDSFYFLSNHINSYFKRKEKMSQQKENEHFRDKSELEDKKVEEGKLRSPDPGILAYKPGSESVHTVDKPTSPSAIPDVLQVSTKQSIANFLSRPTEGVQALVGGYIGGLVPKLKYDSKSQSEEQEEPAKTDQAVSKDRNAEEKKRLSLQREKIIARVSIDNRTRALVQALRRTTDPKLCITRVEELTFHLLEFPEGKGVAVKERIIPYLLRLRQIKDETLQAAVREILALIGYVDPVKGRGIRILSIDGGGTRGVVALQTLRKLVELTQKPVHQLFDYICGVSTGAILAFMLGLFHMPLDECEELYRKLGSDVFSQNVIVGTVKMSWSHAFYDSQTWENILKDRMGSALMIETARNPTCPKVAAVSTIVNRGITPKAFVFRNYGHFPGINSHYLGGCQYKMWQAIRASSAAPGYFAEYALGNDLHQDGGLLLNNPSALAMHECKCLWPDVPLECIVSLGTGRYESDVRNTVTYTSLKTKLSNVINSATDTEEVHIMLDGLLPPDTYFRFNPVMCENIPLDESRNEKLDQLQLEGLKYIERNEQKMKKVAKILSQEKTTLQKINDWIKLKTDMYEGLPFFSKL

SEQ ID NO: 4804 - protein, 481 aa, Homo sapiens
MYDAERGWSLSFAGCGFLGFYHVGATRCLSEHAPHLLRDARMLFGASAGALHCVGVLSGIPLEQTLQVLSDLVRKARSRNIGIFHPSFNLSKFLRQGLCKCLPANVHQLISGKIGISLTRVSDGENVLVSDFRSKDEVVDALVCSCFIPFYSGLIPPSFRGVRYVDGGVSDNVPFIDAKTTITVSPFYGEYDICPKVKSTNFLHVDITKLSLRLCTGNLYLLSRAFVPPDLKVLGEICLRGYLDAFRFLEEKGICNRPQPGLKSSSEGMDPEVAMPSWANMSLDSSPESAALAVRLEGDELLDHLRLSILPWDESILDTLSPRLATALSEEMKDKGGYMSKICNLLPIRIMSYVMLPCTLPVESAIAIVQRLVTWLPDMPDDVLWLQWVTSQVFTRVLMCLLPASRSQMPVSSQQASPCTPEQDWPCWTPCSPKGCPAETKAEATPRSILRSSLNFFLGNKVPAGAEGLSTFPSFSLEKSL

SEQ ID NO: 4805 - protein, 477 aa, Homo sapiens
MYDAERGWSLSFAGCGFLGFYHVGATRCLSEHAPHLLRDARMLFGASAGALHCVGVLSEQTLQVLSDLVRKARSRNIGIFHPSFNLSKFLRQGLCKCLPANVHQLISGKIGISLTRVSDGENVLVSDFRSKDEVVDALVCSCFIPFYSGLIPPSFRGVRYVDGGVSDNVPFIDAKTTITVSPFYGEYDICPKVKSTNFLHVDITKLSLRLCTGNLYLLSRAFVPPDLKVLGEICLRGYLDAFRFLEEKGICNRPQPGLKSSSEGMDPEVAMPSWANMSLDSSPESAALAVRLEGDELLDHLRLSILPWDESILDTLSPRLATALSEEMKDKGGYMSKICNLLPIRIMSYVMLPCTLPVESAIAIVQRLVTWLPDMPDDVLWLQWVTSQVFTRVLMCLLPASRSQMPVSSQQASPCTPEQDWPCWTPCSPKGCPAETKAEATPRSILRSSLNFFLGNKVPAGAEGLSTFPSFSLEKSL

SEQ ID NO: 4806 - protein, 475 aa, Homo sapiens
MQKSTNSDTSVETLNSTRQGTGAVQMRIKNANSHHDRLSQSKSMILTDVGKVTEPISRHRRNHSQHILKDVIPPLEQLMVEKEGYLQKAKIADGGKKLRKNWSTSWIVLSSRRIEFYKESKQQALSNMKTGHKPESVDLCGAHIEWAKEKSSRKNVFQITTVSGNEFLLQSDIDFIILDWFHAIKNAIDRLPKDSSCPSRNLELFKIQRSSSTELLSHYDSDIKEQKPEHRKSLMFRLHHSASDTSDKNRVKSRLKKFITRRPSLKTLQEKGLIKDQIFGSHLHKVCERENSTVPWFVKQCIEAVEKRGLDVDGIYRVSGNLATIQKLRFIVNQEEKLNLDDSQWEDIHVVTGALKMFFRELPEPLFPYSFFEQFVEAIKKQDNNTRIEAVKSLVQKLPPPNRDTMKVLFGHLTKIVAKASKNLMSTQSLGIVFGPTLLRAENETGNMAIHMVYQNQIAELMLSEYSKIFGSEED

SEQ ID NO: 4807 - protein, 2135 aa, Homo sapiens
MPALGPALLQALWAGWVLTLQPLPPTAFTPNGTYLQHLARDPTSGTLYLGATNFLFQLSPGLQLEATVSTGPVLDSRDCLPPVMPDECPQAQPTNNPNQLLLVSPGALVVCGSVHQGVCEQRRLGQLEQLLLRPERPGDTQYVAANDPAVSTVGLVAQGLAGEPLLFVGRGYTSRGVGGGIPPITTRALWPPDPQAAFSYEETAKLAVGRLSEYSHHFVSAFARGASAYFLFLRRDLQAQSRAFRAYVSRVCLRDQHYYSYVELPLACEGGRYGLIQAAAVATSREVAHGEVLFAAFSSAAPPTVGRPPSAAAGASGASALCAFPLDEVDRLANRTRDACYTREGRAEDGTEVAYIEYDVNSDCAQLPVDTLDAYPCGSDHTPSPMASRVPLEATPILEWPGIQLTAVAVTMEDGHTIAFLGDSQGQLHRVYLGPGSDGHPYSTQSIQQGSAVSRDLTFDGTFEHLYVMTQSTLLKVPVASCAQHLDCASCLAHRDPYCGWCVLLGRCSRRSECSRGQGPEQWLWSFQPELGCLQVAAMSPANISREETREVFLSVPDLPPLWPGESYSCHFGEHQSPALLTGSGVMCPSPDPSEAPVLPRGADYVSVSVELRFGAVVIAKTSLSFYDCVAVTELRPSAQCQACVSSRWGCNWCVWQHLCTHKASCDAGPMVASHQSPLVSPDPPARGGPSPSPPTAPKALATPAPDTLPVEPGAPSTATASDISPGASPSLLSPWGPWAGSGSISSPGSTGSPLHEEPSPPSPQNGPGTAVPAPTDFRPSATPEDLLASPLSPSEVAAVPPADPGPEALHPTVPLDLPPATVPATTFPGAMGSVKPALDWLTREGGELPEADEWTGGDAPAFSTSTLLSGDGDSAELEGPPAPLILPSSLDYQYDTPGLWELEEATLGASSCPCVESVQGSTLMPVHVEREIRLLGRNLHLFQDGPGDNECVMELEGLEVVVEARVECEPPPDTQCHVTCQQHQLSYEALQPELRVGLFLRRAGRLRVDSAEGLHVVLYDCSVGHGDCSRCQTAMPQYGCVWCEGERPRCVTREACGEAEAVATQCPAPLIHSVEPLTGPVDGGTRVTIRGSNLGQHVQDVLGMVTVAGVPCAVDAQEYEVSSSLVCITGASGEEVAGATAVEVPGRGRGVSEHDFAYQDPKVHSIFPARGPRAGGTRLTLNGSKLLTGRLEDIRVVVGDQPCHLLPEQQSEQLRCETSPRPTPATLPVAVWFGATERRLQRGQFKYTLDPNITSAGPTKSFLSGGREICVRGQNLDVVQTPRIRVTVVSRMLQPSQGLGRRRRVVPETACSLGPSCSSQQFEEPCHVNSSQLITCRTPALPGLPEDPWVRVEFILDNLVFDFATLNPTPFSYEADPTLQPLNPEDPTMPFRHKPGSVFSVEGENLDLAMSKEEVVAMIGDGPCVVKTLTRHHLYCEPPVEQPLPRHHALREAPDSLPEFTVQMGNLRFSLGHVQYDGESPGAFPVAAQVGLGVGTSLLALGVIIIVLMYRRKSKQALRDYKKVQIQLENLESSVRDRCKKEFTDLMTEMTDLTSDLLGSGIPFLDYKVYAERIFFPGHRESPLHRDLGVPESRRPTVEQGLGQLSNLLNSKLFLTKFIHTLESQRTFSARDRAYVASLLTVALHGKLEYFTDILRTLLSDLVAQYVAKNPKLMLRRTETVVEKLLTNWMSICLYTFVRDSVGEPLYMLFRGIKHQVDKGPVDSVTGKAKYTLNDNRLLREDVEYRPLTLNALLAVGPGAGEAQGVPVKVLDCDTISQAKEKMLDQLYKGVPLTQRPDPRTLDVEWRSGVAGHLILSDEDVTSEVQGLWRRLNTLQHYKVPDGATVALVPCLTKHVLRENQDYVPGERTPMLEDVDEGGIRPWHLVKPSDEPEPPRPRRGSLRGGERERAKAIPEIYLTRLLSMKGTLQKFVDDLFQVILSTSRPVPLAVKYFFDLLDEQAQQHGISDQDTIHIWKTNSLPLRFWINIIKNPQFVFDVQTSDNMDAVLLVIAQTFMDACTLADHKLGRDSPINKLLYARDIPRYKRMVERYYADIRQTVPASDQEMNSVLAELSWNYSGDLGARVALHELYKYINKYYDQIITALEEDGTAQKMQLGYRLQQIAAAVENKVTDL

SEQ ID NO: 4808 - protein, 1952 aa, Homo sapiens
MPALGPALLQALWAGWVLTLQPLPPTAFTPNGTYLQHLARDPTSGTLYLGATNFLFQLSPGLQLEATVSTGPVLDSRDCLPPVMPDECPQAQPTNNPNQLLLVSPGALVVCGSVHQGVCEQRRLGQLEQLLLRPERPGDTQYVAANDPAVSTVGLVAQGLAGEPLLFVGRGYTSRGVGGGIPPITTRALWPPDPQAAFSYEETAKLAVGRLSEYSHHFVSAFARGASAYFLFLRRDLQAQSRAFRAYVSRVCLRDQHYYSYVELPLACEGGRYGLIQAAAVATSREVAHGEVLFAAFSSAAPPTVGRPPSAAAGASGASALCAFPLDEVDRLANRTRDACYTREGRAEDGTEVAYIEYDVNSDCAQLPVDTLDAYPCGSDHTPSPMASRVPLEATPILEWPGIQLTAVAVTMEDGHTIAFLGDSQGQLHRVYLGPGSDGHPYSTQSIQQGSAVSRDLTFDGTFEHLYVMTQSTLLKVPVASCAQHLDCASCLAHRDPYCGWCVLLGRCSRRSECSRGQGPEQWLWSFQPELGCLQVAAMSPANISREETREVFLSVPDLPPLWPGESYSCHFGEHQSPALLTGSGVMCPSPDPSEAPVLPRGADYVSVSVELRFGAVVIAKTSLSFYDCVAVTELRPSAQCQACVSSRWGCNWCVWQHLCTHKASCDAGPMVASHQSPLVSPDPPARGDGDSAELEGPPAPLILPSSLDYQYDTPGLWELEEATLGASSCPCVESVQGSTLMPVHVEREIRLLGRNLHLFQDGPGDNECVMELEGLEVVVEARVECEPPPDTQCHVTCQQHQLSYEALQPELRVGLFLRRAGRLRVDSAEGLHVVLYDCSVGHGDCSRCQTAMPQYGCVWCEGERPRCVTREACGEAEAVATQCPAPLIHSVEPLTGPVDGGTRVTIRGSNLGQHVQDVLGMVTVAGVPCAVDAQEYEVSSSLVCITGASGEEVAGATAVEVPGRGRGVSEHDFAYQDPKVHSIFPARGPRAGGTRLTLNGSKLLTGRLEDIRVVVGDQPCHLLPEQQSEQLRCETSPRPTPATLPVAVWFGATERRLQRGQFKYTLDPNITSAGPTKSFLSGGREICVRGQNLDVVQTPRIRVTVVSRMLQPSQGLGRRRRVVPETACSLGPSCSSQQFEEPCHVNSSQLITCRTPALPGLPEDPWVRVEFILDNLVFDFATLNPTPFSYEADPTLQPLNPEDPTMPFRHKPGSVFSVEGENLDLAMSKEEVVAMIGDGPCVVKTLTRHHLYCEPPVEQPLPRHHALREAPDSLPEFTVQMGNLRFSLGHVQYDGESPGAFPVAAQVGLGVGTSLLALGVIIIVLMYRRKSKQALRDYKKVQIQLENLESSVRDRCKKEFTDLMTEMTDLTSDLLGSGIPFLDYKVYAERIFFPGHRESPLHRDLGVPESRRPTVEQGLGQLSNLLNSKLFLTKFIHTLESQRTFSARDRAYVASLLTVALHGKLEYFTDILRTLLSDLVAQYVAKNPKLMLRRTETVVEKLLTNWMSICLYTFVRDSVGEPLYMLFRGIKHQVDKGPVDSVTGKAKYTLNDNRLLREDVEYRPLTLNALLAVGPGAGEAQGVPVKVLDCDTISQAKEKMLDQLYKGVPLTQRPDPRTLDVEWRSGVAGHLILSDEDVTSEVQGLWRRLNTLQHYKVPDGATVALVPCLTKHVLRENQDYVPGERTPMLEDVDEGGIRPWHLVKPSDEPEPPRPRRGSLRGGERERAKAIPEIYLTRLLSMKGTLQKFVDDLFQVILSTSRPVPLAVKYFFDLLDEQAQQHGISDQDTIHIWKTNSLPLRFWINIIKNPQFVFDVQTSDNMDAVLLVIAQTFMDACTLADHKLGRDSPINKLLYARDIPRYKRMVERYYADIRQTVPASDQEMNSVLAELSWNYSGDLGARVALHELYKYINKYYDQIITALEEDGTAQKMQLGYRLQQIAAAVENKVTDL

SEQ ID NO: 4809 - protein, 729 aa, Homo sapiens
MPALGPALLQALWAGWVLTLQPLPPTAFTPNGTYLQHLARDPTSGTLYLGATNFLFQLSPGLQLEATVSTGPVLDSRDCLPPVMPDECPQAQPTNNPNQLLLVSPGALVVCGSVHQGVCEQRRLGQLEQLLLRPERPGDTQYVAANDPAVSTVGLVAQGLAGEPLLFVGRGYTSRGVGGGIPPITTRALWPPDPQAAFSYEETAKLAVGRLSEYSHHFVSAFARGASAYFLFLRRDLQAQSRAFRAYVSRVCLRDQHYYSYVELPLACEGGRYGLIQAAAVATSREVAHGEVLFAAFSSAAPPTVGRPPSAAAGASGASALCAFPLDEVDRLANRTRDACYTREGRAEDGTEVAYIEYDVNSDCAQLPVDTLDAYPCGSDHTPSPMASRVPLEATPILEWPGIQLTAVAVTMEDGHTIAFLGDSQGQLHRVYLGPGSDGHPYSTQSIQQGSAVSRDLTFDGTFEHLYVMTQSTLLKVPVASCAQHLDCASCLAHRDPYCGWCVLLGRCSRRSECSRGQGPEQWLWSFQPELGCLQVAAMSPANISREETREVFLSVPDLPPLWPGESYSCHFGEHQSPALLTGSGVMCPSPDPSEAPVLPRGADYVSVSVELRFGAVVIAKTSLSFYDCVAVTELRPSAQCQACVSSRWGCNWCVWQHLCTHKASCDAGPMVASHQVMETQQSLRALPPPSSSRPASTTSMTPPGSGSWKRRPWGQAPAPVWRAFRAPR

SEQ ID NO: 4810 - protein, 429 aa, Homo sapiens
MGFLEEEGRWNLSFSGAGYLGAHHVGATECLRQRAPRLLQGARRIYGSSSGALNAVSIVCGKSVDFCCSHLLGMVGQLERLSLSILHPAYAPIEHVKQQLQDALPPDAHVLASQRLGISLTRWPDGRNFLVTDFATCDELIQALVCTLYFPFYCGLIPPEFRGERYIDGALSNNLPFADCPSTITVSPFHGTVDICPQSTSPNLHELNVFNFSFQISTENFFLGLICLIPPSLEVVADNCRQGYLDALRFLERRGLTKEPVLWTLVSKEPPAPADGNWDAGCDQRWKGGLSLNWKVPHVQVKDVPNFEQLSPELEAALKKACTRDPSRWARFWHSGPGQVLTYLLLPCTLPFEYIYFRSRRLVVWLPDVPADLWWMQGLLRNMALEVFSRTKAQLLGPISPPATRVLETSPLQPQIAPHREELGPTHQA

SEQ ID NO: 4811 - protein, 315 aa, Homo sapiens
MGFLEEEGRWNLSFSGAGYLGAHHVGATECLRQRAPRLLQGARRIYGSSSGALNAVSIVCGKSVDCPSTITVSPFHGTVDICPQSTSPNLHELNVFNFSFQISTENFFLGLICLIPPSLEVVADNCRQGYLDALRFLERRGLTKEPVLWTLVSKEPPAPADGNWDAGCDQRWKGGLSLNWKVPHVQVKDVPNFEQLSPELEAALKKACTRDPSRWARFWHSGPGQVLTYLLLPCTLPFEYIYFRSRRLVVWLPDVPADLWWMQGLLRNMALEVFSRTKAQLLGPISPPATRVLETSPLQPQIAPHREELGPTHQA

SEQ ID NO: 4812 - protein, 881 aa, Homo sapiens
MKKQFNRMKQLANQTVGRAEKTEVLSEDLLQIERRLDTVRSICHHSHKRLVACFQGQHGTDAERRHKKLPLTALAQNMQEASTQLEDSLLGKMLETCGDAENQLALELSQHEVFVEKEIVDPLYGIAEVEIPNIQKQRKQLARLVLDWDSVRARWNQAHKSSGTNFQGLPSKIDTLKEEMDEAGNKVEQCKDQLAADMYNFMAKEGEYGKFFVTLLEAQADYHRKALAVLEKTLPEMRAHQDKWAEKPAFGTPLEEHLKRSGREIALPIEACVMLLLETGMKEEGLFRIGAGASKLKKLKAALDCSTSHLDEFYSDPHAVAGALKSYLRELPEPLMTFNLYEEWTQVASVQDQDKKLQDLWRTCQKLPPQNFVNFRYLIKFLAKLAQTSDVNKMTPSNIAIVLGPNLLWARNEGTLAEMAAATSVHVVAVIEPIIQHADWFFPEEVEFNVSEAFVPLTTPSSNHSFHTGNDSDSGTLERKRPASMAVMEGDLVKKESFGVKLMDFQAHRRGGTLNRKHISPAFQPPLPPTDGSTVVPAGPEPPPQSSRAESSSGGGTVPSSAGILEQGPSPGDGSPPKPKDPVSAAVPAPGRNNSQIASGQNQPQAAAGSHQLSMGQPHNAAGPSPHTLRRAVKKPAPAPPKPGNPPPGHPGGQSSSGTSQHPPSLSPKPPTRSPSPPTQHTGQPPGQPSAPSQLSAPRRYSSSLSPIQAPNHPPPQPPTQATPLMHTKPNSQGPPNPMALPSEHGLEQPSHTPPQTPTPPSTPPLGKQNPSLPAPQTLAGGNPETAQPHAGTLPRPRPVPKPRNRPSVPPPPQPPGVHSAGDSSLTNTAPTASKIVTDSNSRVSEPHRSIFPEMHSDSASKDVPGRILLDIDNDTESTAL

SEQ ID NO: 4813 - protein, 803 aa, Homo sapiens
MKKQFNRMKQLANQTVGRAEKTEVLSEDLLQIERRLDTVRSICHHSHKRLVACFQGQHGTDAERRHKKLPLTALAQNMQEASTQLEDSLLGKMLETCGDAENQLALELSQHEVFVEKEIVDPLYGIAEVEIPNIQKQRKQLARLVLDWDSVRARWNQAHKSSGTNFQGLPSKIDTLKEEMDEAGNKVEQCKDQLAADMYNFMAKEGEYGKFFVTLLEAQADYHRKALAVLEKTLPEMRAHQDKWAEKPAFGTPLEEHLKRSGREIALPIEACVMLLLETGMKEEGLFRIGAGASKLKKLKAALDCSTSHLDEFYSDPHAVAGALKSYLRELPEPLMTFNLYEEWTQVASVQDQDKKLQDLWRTCQKLPPQNFVNFRYLIKFLAKLAQTSDVNKMTPSNIAIVLGPNLLWARNEGTLAEMAAATSVHVVAVIEPIIQHADWFFPEEVEFNVSEAFVPLTTPSSNHSFHTGNDSDSGTLERKRPASMAVMEGDLVKKESPPKPKDPVSAAVPAPGRNNSQIASGQNQPQAAAGSHQLSMGQPHNAAGPSPHTLRRAVKKPAPAPPKPGNPPPGHPGGQSSSGTSQHPPSLSPKPPTRSPSPPTQHTGQPPGQPSAPSQLSAPRRYSSSLSPIQAPNHPPPQPPTQATPLMHTKPNSQGPPNPMALPSEHGLEQPSHTPPQTPTPPSTPPLGKQNPSLPAPQTLAGGNPETAQPHAGTLPRPRPVPKPRNRPSVPPPPQPPGVHSAGDSSLTNTAPTASKIVTDSNSRVSEPHRSIFPEMHSDSASKDVPGRILLDIDNDTESTAL

SEQ ID NO: 4814 - protein, 608 aa, Homo sapiens
MLLLETGMKEEGLFRIGAGASKLKKLKAALDCSTSHLDEFYSDPHAVAGALKSYLRELPEPLMTFNLYEEWTQVASVQDQDKKLQDLWRTCQKLPPQNFVNFRYLIKFLAKLAQTSDVNKMTPSNIAIVLGPNLLWARNEGTLAEMAAATSVHVVAVIEPIIQHADWFFPEEVEFNVSEAFVPLTTPSSNHSFHTGNDSDSGTLERKRPASMAVMEGDLVKKESFGVKLMDFQAHRRGGTLNRKHISPAFQPPLPPTDGSTVVPAGPEPPPQSSRAESSSGGGTVPSSAGILEQGPSPGDGSPPKPKDPVSAAVPAPGRNNSQIASGQNQPQAAAGSHQLSMGQPHNAAGPSPHTLRRAVKKPAPAPPKPGNPPPGHPGGQSSSGTSQHPPSLSPKPPTRSPSPPTQHTGQPPGQPSAPSQLSAPRRYSSSLSPIQAPNHPPPQPPTQATPLMHTKPNSQGPPNPMALPSEHGLEQPSHTPPQTPTPPSTPPLGKQNPSLPAPQTLAGGNPETAQPHAGTLPRPRPVPKPRNRPSVPPPPQPPGVHSAGDSSLTNTAPTASKIVTDSNSRVSEPHRSIFPEMHSDSASKDVPGRILLDIDNDTESTAL

SEQ ID NO: 4815 - protein, 226 aa, Homo sapiens
MKKQFNRMKQLANQTVGRAEKTEVLSEDLLQIERRLDTVRSICHHSHKRLVACFQGQHGTDAERRHKKLPLTALAQNMQEASTQLEDSLLGKMLETCGDAENQLALELSQHEVFVEKEIVDPLYGIAEVEIPNIQKQRKQLARLVLDWDSVRARWNQAHKSSGTNFQGLPSKIDTLKEEMDEAGNKVEQCKDQLAADMYNFMAKEGEYGKFFVTISGRKNQPLGLP

SEQ ID NO: 4816 - protein, 867 aa, Homo sapiens
MKKQFNRMKQLANQTVGRAEKTEVLSEDLLQIERRLDTVRSICHHSHKRLVACFQGQHGTDAERRHKKLPLTALAQNMQEASTQLEDSLLGKMLETCGDAENQLALELSQHEVFVEKEIVDPLYGIAEVEIPNIQKQRKQLARLVLDWDSVRARWNQAHKSSGTNFQGLPSKIDTLKEEMDEAGNKVEQCKDQLAADMYNFMAKEGEYGKFFVTLLEAQADYHRKALAVLEKTLPEMRAHQDKWAEKPAFGTPLEEHLKRSGREIALPIEACVMLLLETGMKEEGLFRIGAGASKLKKLKAALDCSTSHLDEFYSDPHAVAGALKSYLRELPEPLMTFNLYEEWTQVASVQDQDKKLQDLWRTCQKLPPQNFVNFRYLIKFLAKLAQTSDVNKMTPSNIAIVLGPNLLWARNEGTLAEMAAATSVHVVAVIEPIIQHADWFFPEEVEFNVSEAFVPLTTPSSNHSFHTGNDSDSGTLERKRPASMAVMEGDLVKKESFGVKLMDFQAHRRGGTLNRKHISPAFQPPLPPTDGSTVVPAGPEPPPQSSRAESSSGGGTVPSSAGILEQGPSPGDGSPPKPKDPVSAAVPAPGRNNSQIASGQNQPQAAAGSHQLSMGQPHNAAGPSPHTLRRAVKKPAPAPPKPGNPPPGHPGGQSSSGTSQHPPSLSPKPPTRSPSPPTQHTGQPPGQPSAPSQLSAPRRYSSSLSPIQAPNHPPPQPPTQATPLMHTKPNSQGPPNPMALPSEHGLEQPSHTPPQTPTPPSTPPLGKQNPSLPAPQTLAGGNPETAQPHAGTLPRPRPVPKPRNRPSVPPPPQPPGVHSAGDSSLTNTAPTASKIVTGFQNRIAASFLKCTQTQPAKTCLAASCWI

SEQ ID NO: 4817 - protein, 840 aa, Homo sapiens
MKKQFNRMKQLANQTVGRAEKTEVLSEDLLQIERRLDTVRSICHHSHKRLVACFQGQHGTDAERRHKKLPLTALAQNMQEASTQLEDSLLGKMLETCGDAENQLALELSQHEVFVEKEIVDPLYGIAEVEIPNIQKQRKQLARLVLDWDSVRARWNQAHKSSGTNFQGLPSKIDTLKEEMDEAGNKVEQCKDQLAADMYNFMAKEGEYGKFFVTLLEAQADYHRKALAVLEKTLPEMRAHQDKWAEKPAFGTPLEEHLKRSGREIALPIEACVMLLLETGMKEEGLFRIGAGASKLKKLKAALDCSTSHLDEFYSDPHAVAGALKSYLRELPEPLMTFNLYEEWTQVASVQDQDKKLQDLWRTCQKLPPQNFVNFRYLIKFLAKLAQTSDVNKMTPSNIAIVLGPNLLWARNEGTLAEMAAATSVHVVAVIEPIIQHADWFFPEEVEFNVSEAFVPLTTPSSNHSFHTGNDSDSGTLERKRPASMAVMEGDLVKKESFGVKLMDFQAHRRGGTLNRKHISPAFQPPLPPTDGSTVVPAGPEPPPQSSRAESSSGGGTVPSSAGILEQGPSPGDGSPPKPKDPVSAAVPAPGRNNSQIASGQNQPQAAAGSHQLSMGQPHNAAGPSPHTLRRAVKKPAPAPPKPGNPPPGHPGGQSSSGTSQHPPSLSPKPPTRSPSPPTQHTGQPPGQPSAPSQLSAPRRYSSSLSPIQAPNHPPPQPPTQATPLMHTKPNSQGPPNPMALPSEHGLEQPSHTPPQTPTPPSTPPLGKQNPSLPAPQTLAGGNPETAQPHAGTLPRPRPVPKPRNRPSVPPPPQPPGVHSAGDSSLTNTAPTASKIVTDV

SEQ ID NO: 4818 - protein, 414 aa, Homo sapiens
MCGFNTCGPMGFCLSSLLAWCVDCFFSLCSFGVKLMDFQAHRRGGTLNRKHISPAFQPPLPPTDGSTVVPAGPEPPPQSSRAESSSGGGTVPSSAGILEQGPSPGDGSPPKPKDPVSAAVPAPGRNNSQIASGQNQPQAAAGSHQLSMGQPHNAAGPSPHTLRRAVKKPAPAPPKPGNPPPGHPGGQSSSGTSQHPPSLSPKPPTRSPSPPTQHTGQPPGQPSAPSQLSAPRRYSSSLSPIQAPNHPPPQPPTQATPLMHTKPNSQGPPNPMALPSEHGLEQPSHTPPQTPTPPSTPPLGKQNPSLPAPQTLAGGNPETAQPHAGTLPRPRPVPKPRNRPSVPPPPQPPGVHSAGDSSLTNTAPTASKIVTDSNSRVSEPHRSIFPEMHSDSASKDVPGRILLDIDNDTESTAL

SEQ ID NO: 4819 - protein, 212 aa, Homo sapiens
MKVFKFIGLMILLTSAFSAGSGQSPMTVLCSIDWFMVTVHPFMLNNDVCVHFHELHLGLGCPPNHVQPHAYQFTYRVTECGIRAKAVSQDMVIYSTEIHYSSKGTPSKFVIPVSCAAPQKSPWLTKPCSMRVASKSRATAQKDEKCYEVFSLSQSSQRPNCDCPPCVFSEEEHTQVPCHQAGAQEAQPLQPSHFLDISEDWSLHTDDMIGSM

SEQ ID NO: 4820 - protein, 779 aa, Homo sapiens
MEGSRPRSSLSLASSASTISSLSSLSPKKPTRAVNKIHAFGKRGNALRRDPNLPVHIRGWLHKQDSSGLRLWKRRWFVLSGHCLFYYKDSREESVLGSVLLPSYNIRPDGPGAPRGRRFTFTAEHPGMRTYVLAADTLEDLRGWLRALGRASRAEGDDYGQPRSPARPQPGEGPGGPGGPPEVSRGEEGRISESPEVTRLSRGRGRPRLLTPSPTTDLHSGLQMRRARSPDLFTPLSRPPSPLSLPRPRSAPARRPPAPSGDTAPPARPHTPLSRIDVRPPLDWGPQRQTLSRPPTPRRGPPSEAGGGKPPRSPQHWSQEPRTQAHSGSPTYLQLPPRPPGTRASMVLLPGPPLESTFHQSLETDTLLTKLCGQDRLLRRLQEEIDQKQEEKEQLEAALELTRQQLGQATREAGAPGRAWGRQRLLQDRLVSVRATLCHLTQERERVWDTYSGLEQELGTLRETLEYLLHLGSPQDRVSAQQQLWMVEDTLAGLGGPQKPPPHTEPDSPSPVLQGEESSERESLPESLELSSPRSPETDWGRPPGGDKDLASPHLGLGSPRVSRASSPEGRHLPSPQLGTKAPVARPRMSAQEQLERMRRNQECGRPFPRPTSPRLLTLGRTLSPARRQPDVEQRPVVGHSGAQKWLRSSGSWSSPRNTTPYLPTSEGHRERVLSLSQALATEASQWHRMMTGGNLDSQGDPLPGVPLPPSDPTRQETPPPRSPPVANSGSTGFSRRGSGRGGGPTPWGPAWDAGIAPPVLPQDEGAWPLRVTLLQSSF

SEQ ID NO: 4821 - protein, 583 aa, Homo sapiens
MEGSRPRSSLSLASSASTISSLSSLSPKKPTRAVNKIHAFGKRGNALRRDPNLPVHIRGWLHKQDSSGLRLWKRRWFVLSGHCLFYYKDSREESVLGSVLLPSYNIRPDGPGAPRGRRFTFTAEHPGMRTYVLAADTLEDLRGWLRALGRASRAEGDDYGQPRSPARPQPGEGPGGPGGPPEVSRGEEGRISESPEVTRLSRGRGRPRLLTPSPTTDLHSGLQMRRARSPDLFTPLSRPPSPLSLPRPRSAPARRPPAPSGDTAPPARPHTPLSRIDVRPPLDWGPQRQTLSRPPTPRRGPPSEAGGGKPPRSPQHWSQEPRTQPGPPLESTFHQSLETDTLLTKLCGQDRLLRRLQEEIDQKQEEKEQLEAALELTRQQLGQATREAGAPGRAWGRQRLLQDRLVSVRATLCHLTQERERVWDTYSGLEQELGTLRETLEYLLHLGSPQDRVSAQQQLWMVEDTLAGLGGPQKPPPHTEPDSPSPVLQGEESSERESLPESLELSSPRSPETDWGRPPGGDKDLASPHLGLGSPRVSRASSPEGRHLPSPQLGTKSKEHHPLLADFRRSPGAGSQPLPSPGY

SEQ ID NO: 4822 - protein, 210 aa, Homo sapiens
MRKRQQSQNEGTPAVSQAPGNQRPNNTCCFCWCCCCSCSCLTVRNEERGENAGRPTHTTKMESIQVLEECQNPTAEEVLSWSQNFDKMMKAPAGRNLFREFLRTEYSEENLLFWLACEDLKKEQNKKVIEEKARMIYEDYISILSPKEVSLDSRVREVINRNLLDPNPHMYEDAQLQIYTLMHRDSFPRFLNSQIYKSFVESTAGSSSES

SEQ ID NO: 4823 - protein, 1461 aa, Homo sapiens
MEARSRSAEELRRAELVEIIVETEAQTGVSGINVAGGGKEGIFVRELREDSPAARSLSLQEGDQLLSARVFFENFKYEDALRLLQCAEPYKVSFCLKRTVPTGDLALRPGTVSGYEIKGPRAKVAKLNIQSLSPVKKKKMVPGALGVPADLAPVDVEFSFPKFSRLRRGLKAEAVKGPVPAAPARRRLQLPRLRVREVAEEAQAARLAAAAPPPRKAKVEAEVAAGARFTAPQVELVGPRLPGAEVGVPQVSAPKAAPSAEAAGGFALHLPTLGLGAPAPPAVEAPAVGIQVPQVELPALPSLPTLPTLPCLETREGAVSVVVPTLDVAAPTVGVDLALPGAEVEARGEAPEVALKMPRLSFPRFGARAKEVAEAKVAKVSPEARVKGPRLRMPTFGLSLLEPRPAAPEVVESKLKLPTIKMPSLGIGVSGPEVKVPKGPEVKLPKAPEVKLPKVPEAALPEVRLPEVELPKVSEMKLPKVPEMAVPEVRLPEVELPKVSEMKLPKVPEMAVPEVRLPEVQLLKVSEMKLPKVPEMAVPEVRLPEVQLPKVSEMKLPEVSEVAVPEVRLPEVQLPKVPEMKVPEMKLPKVPEMKLPEMKLPEVQLPKVPEMAVPDVHLPEVQLPKVPEMKLPEMKLPEVKLPKVPEMAVPDVHLPEVQLPKVPEMKLPKMPEMAVPEVRLPEVQLPKVSEMKLPKVPEMAVPDVHLPEVQLPKVCEMKVPDMKLPEIKLPKVPEMAVPDVHLPEVQLPKVSEIRLPEMQVPKVPDVHLPKAPEVKLPRAPEVQLKATKAEQAEGMEFGFKMPKMTMPKLGRAESPSRGKPGEAGAEVSGKLVTLPCLQPEVDGEAHVGVPSLTLPSVELDLPGALGLQGQVPAAKMGKGERVEGPEVAAGVREVGFRVPSVEIVTPQLPAVEIEEGRLEMIETKVKPSSKFSLPKFGLSGPKVAKAEAEGAGRATKLKVSKFAISLPKARVGAEAEAKGAGEAGLLPALDLSIPQLSLDAHLPSGKVEVAGADLKFKGPRFALPKFGVRGRDTEAAELVPGVAELEGKGWGWDGRVKMPKLKMPSFGLARGKEAEVQGDRASPGEKAESTAVQLKIPEVELVTLGAQEEGRAEGAVAVSGMQLSGLKVSTAGQVVTEGHDAGLRMPPLGISLPQVELTGFGEAGTPGQQAQSTVPSAEGTAGYRVQVPQVTLSLPGAQVAGGELLVGEGVFKMPTVTVPQLELDVGLSREAQAGEAATGEGGLRLKLPTLGARARVGGEGAEEQPPGAERTFCLSLPDVELSPSGGNHAEYQVAEGEGEAGHKLKVRLPRFGLVRAKEGAEEGEKAKSPKLRLPRVGFSQSEMVTGEGSPSPEEEEEEEEEGSGEGASGRRGRVRVRLPRVGLAAPSKASRGQEGDAAPKSPVREKSPKFRFPRVSLSPKARSGSGDQEEGGLRVRLPSVGFSETGAPGPARMEGAQAAAV

SEQ ID NO: 4824 - protein, 147 aa, Homo sapiens
MEARSRSAEELRRAELVEIIVETEAQTGVSGINVAGGGKEGIFVRELREDSPAARSLSLQEGDQLLSARVFFENFKYEDALRLLQCAEPYKVSFCLKRTVPTGDLALRPGTVSGYEIKGPRAKVAKLVRVLSPAPALDCPSDPVSAP

SEQ ID NO: 4825 - protein, 1322 aa, Homo sapiens
MVPGALGVPADLAPVDVEFSFPKFSRLRRGLKAEAVKGPVPAAPARRRLQLPRLRVREVAEEAQAARLAAAAPPPRKAKVEAEVAAGARFTAPQVELVGPRLPGAEVGVPQVSAPKAAPSAEAAGGFALHLPTLGLGAPAPPAVEAPAVGIQVPQVELPALPSLPTLPTLPCLETREGAVSVVVPTLDVAAPTVGVDLALPGAEVEARGEAPEVALKMPRLSFPRFGARAKEVAEAKVAKVSPEARVKGPRLRMPTFGLSLLEPRPAAPEVVESKLKLPTIKMPSLGIGVSGPEVKVPKGPEVKLPKAPEVKLPKVPEAALPEVRLPEVELPKVSEMKLPKVPEMAVPEVRLPEVELPKVSEMKLPKVPEMAVPEVRLPEVQLLKVSEMKLPKVPEMAVPEVRLPEVQLPKVSEMKLPEVSEVAVPEVRLPEVQLPKVPEMKVPEMKLPKVPEMKLPEMKLPEVQLPKVPEMAVPDVHLPEVQLPKVPEMKLPEMKLPEVKLPKVPEMAVPDVHLPEVQLPKVPEMKLPKMPEMAVPEVRLPEVQLPKVSEMKLPKVPEMAVPDVHLPEVQLPKVCEMKVPDMKLPEIKLPKVPEMAVPDVHLPEVQLPKVSEIRLPEMQVPKVPDVHLPKAPEVKLPRAPEVQLKATKAEQAEGMEFGFKMPKMTMPKLGRAESPSRGKPGEAGAEVSGKLVTLPCLQPEVDGEAHVGVPSLTLPSVELDLPGALGLQGQVPAAKMGKGERVEGPEVAAGVREVGFRVPSVEIVTPQLPAVEIEEGRLEMIETKVKPSSKFSLPKFGLSGPKVAKAEAEGAGRATKLKVSKFAISLPKARVGAEAEAKGAGEAGLLPALDLSIPQLSLDAHLPSGKVEVAGADLKFKGPRFALPKFGVRGRDTEAAELVPGVAELEGKGWGWDGRVKMPKLKMPSFGLARGKEAEVQGDRASPGEKAESTAVQLKIPEVELVTLGAQEEGRAEGAVAVSGMQLSGLKVSTAGQVVTEGHDAGLRMPPLGISLPQVELTGFGEAGTPGQQAQSTVPSAEGTAGYRVQVPQVTLSLPGAQVAGGELLVGEGVFKMPTVTVPQLELDVGLSREAQAGEAATGEGGLRLKLPTLGARARVGGEGAEEQPPGAERTFCLSLPDVELSPSGGNHAEYQVAEGEGEAGHKLKVRLPRFGLVRAKEGAEEGEKAKSPKLRLPRVGFSQSEMVTGEGSPSPEEEEEEEEEGSGEGASGRRGRVRVRLPRVGLAAPSKASRGQEGDAAPKSPVREKSPKFRFPRVSLSPKARSGSGDQEEGGLRVRLPSVGFSETGAPGPARMEGAQAAAV

SEQ ID NO: 4826 - protein, 478 aa, Homo sapiens
MKMSIWTPPRLLELAGRSLLRDQALAMSTLEELPTELFPPLFMEAFSRRRCEALKLMVQSWPFRRLPLRPLIKMPCLEAFQAVLDGLDALLNLGVRPRRWKLQVLDLQDVCENFWMVWSEAMAHGCFLNAKRNKKPVEDCPRMKGRQPLTVFVELWLKNRTLDEYLTCLLLWVKQRKDLLHLCCKKLKILGMPFRNIRSILKMVNLDCIQEVEVNCKWVLPILTQFTPYLGHMRNLQKLILSHMDVSRYVSPEQKKEIVTQFTTQFLKLRCLQKLYMNSVSFLEGHLDQLLSCLKTSLKFLTITNCVLLESDLKHLSQCPSISQLKTLDLSGIRLTNYSLVPLQILLEKVAATLEYLDLDDCGIIDSQVNAILPALSRCFELNTFSFCGNPICMATLENLLSHTIILKNLCVELYPAPRESYGADGTLCWSRFAQIRAELMNRVRDLRHPKRILFCTDYCPDCGNRSFYDLEADQYCC

SEQ ID NO: 4827 - protein, 670 aa, Homo sapiens
MAHHLPAAMESHQDFRSIKAKFQASQPEPSDLPKKPPKPEFGKLKKFSQPELSEHPKKAPLPEFGAVSLKPPPPEVTDLPKKPPPPEVTDLPKKPPPPEVTDLPKKPPPPEVTDLPKKPSKLELSDLSKKFPQLGATPFPRKPLQPEVGEAPLKASLPEPGAPARKPLQPDELSHPARPPSEPKSGAFPRKLWQPEAGEATPRSPQPELSTFPKKPAQPEFNVYPKKPPQPQVGGLPKKSVPQPEFSEAAQTPLWKPQSSEPKRDSSAFPKKASQPPLSDFPKKPPQPELGDLTRTSSEPEVSVLPKRPRPAEFKALSKKPPQPELGGLPRTSSEPEFNSLPRKLLQPERRGPPRKFSQPEPSAVLKRHPQPEFFGDLPRKPPLPSSASESSLPAAVAGFSSRHPLSPGFGAAGTPRWRSGGLVHSGGARPGLRPSHPPRRRPLPPASSLGHPPAKPPLPPGPVDMQSFRRPSAASIDLRRTRSAAGLHFQDRQPEDIPQVPDEIYELYDDVEPRDDSSPSPKGRDEAPSVQQAARRPPQDPALRKEKDPQPQQLPPMDPKLLKQLRKAEKAEREFRKKFKFEGEIVVHTKMMIDPNAKTRRGGGKHLGIRRGEILEVIEFTSNEEMLCRDPKGKYGYVPRTALLPLETEVYDDVDFCDPLENQPLPLGR

SEQ ID NO: 4828 - protein, 476 aa, Homo sapiens
MSIRTPPRLLELAGRSLLRDQALAMSTLEELPTELFPPLFMEAFSRRRCEALKLMVQAWPFRRLPLRPLIKMPCLEAFQAVLDGLDALLTQGVHPRRWKLQVLDLQDVCENFWMVWSEAMARGCFLNAKRNKTPVQDCPRMRGQQPLTVFVELWLKNRTLDEYLTCLLLWVKQRKDLLHLCCKKLKILGMPFRNIRSILKMVNLDCIQEVEVNCKWVLPILTQFTPYLGHMRNLQKLVLSHMDVSRYVSPEQKKEIVTQFTTQFLKLCCLQKLSMNSVSFLEGHLDQLLSCLKTSLKVLTITNCVLLESDLKHLSQCPSISQLKTLDLSGIRLTNYSLVPLQILLEKVAATLEYLDLDDCGIIDSQVNAILPALSRCFELNTFSFCGNPISMATLENLLSHTIILKNLCVELYPAPRESYDADGTLCWSRFAQIRAELMKRVRDLRHPKRILFCTDCCPDCGNRSFYDLEADQCCC

SEQ ID NO: 4829 - protein, 492 aa, Homo sapiens
MSPERSQEESPEGDTERTERKPMVKDAFKDISIYFTKEEWAEMGDWEKTRYRNVKMNYNALITVGLRATRPAFMCHRRQAIKLQVDDTEDSDEEWTPRQQVKPPWMAFRGEQSKHQKGMPKASFNNESSLRELSGTPNLLNTSDSEQAQKPVSPPGEASTSGQHSRLKLELRRKETEGKMYSLRERKGHAYKEISEPQDDDYLYCEMCQNFFIDSCAAHGPPTFVKDSAVDKGHPNRSALSLPPGLRIGPSGIPQAGLGVWNEASDLPLGLHFGPYEGRITEDEEAANSGYSWLITKGRNCYEYVDGKDKSSANWMRYVNCARDDEEQNLVAFQYHRQIFYRTCRVIRPGCELLVWSGDEYGQELGIRSSIEPAESLGQAVNCWSGMGMSMARNWASSGAASGRKSSWQGENQSQRSIHVPHAVWPFQVKNFSVNMWNAITPLRTSQDHLQENFSNQRIPAQGIRIRSGNILIHAAVMTKPKVKRSKKGPNS

SEQ ID NO: 4830 - protein, 171 aa, Homo sapiens
MCQNFFIDSCAAHGPPTFVKDSAVDKGHPNRSALSLPPGLRIGPSGIPQAGLGVWNEASDLPLGLHFGPYEGRITEDEEAANSGYSWLITKGRNCYEYVDGKDKSSANWMRTKARDPSMSLMLSGLFKSKISQSTCGTQSLLSELPRTICKKTSPTRESLPRGSESGAAIF

SEQ ID NO: 4831 - protein, 407 aa, Homo sapiens
MCQNFFIDSCAAHGPPTFVKDSAVDKGHPNRSALSLPPGLRIGPSGIPQAGLGVWNEASDLPLGLHFGPYEGRITEDEEAANSGYSWLITKGRNCYEYVDGKDKSSANWMRYVNCARDDEEQNLVAFQYHRQIFYRTCRVIRPGCELLVWSGDEYGQELGIKWGSKWKKELMAGREPKPEIHPCPSCCLAFSSQKFLSQHVERNHSSQNFPGPSARKLLQPENPCPGDQNQERQYSDPRCCNDKTKGQEIKERSKLLNKRTWQREISRAFSSPPKGQMGSSRVGERMMEEESRTGQKVNPGNTGKLFVGVGISRIAKVKYGECGQGFSDKSDVITHQRTHTGGKPYVCRECGEGFSRKSDLLSHQRTHTGEKPYVCRECERGFSRKSVLLIHQRTHRGEAPVCRKDE

SEQ ID NO: 4832 - protein, 224 aa, Homo sapiens
MPGGLLLGDVAPNFEANTTVGRIRFHDFLGDSWGILFSHPRDFTPVCTTELGRAAKLAPEFAKRNVKLIALSIDSVEDHLAWSKDINAYNCEEPTEKLPFPIIDDRNRELAILLGMLDPAEKDEKGMPVTARVVFVFGPDKKLKLSILYPATTGRNFDEILRVVISLQLTAEKRVATPVDWKDGDSVMVLPTIPEEEAKKLFPKGVFTKELPSGKKYLRYTPQP

SEQ ID NO: 4833 - protein, 402 aa, Homo sapiens
MARTDQKPPCRGGCWGQPGHPNTGGAAAHPTYHPMGHRPRTCILLRGDQTTGGQAPSREISLGPWAAGTHFLAISTTPWGRKTPACISELPTSSGTAQPLANAVCEVQTVPGPGLRPQGTPAMRAPSHKGTPPTPNPWGPEQPQNRHKHPKKGVTGGPSPPPPAASRYGQTPGREPRVQAPGLGPCGRPASGRLLSLHLEKGDGKGTRQRIPLTDAAVGGDRTDIPSAIAAGPARTPDRHGLPIPGSTPTPMVGSGRLGAPVGRSGGGASARSSRPSCANVLLRADASLGTVLSVLWTGQLSRGWALLPPGDAGRHLETSVISAGVAAGIWLVEPGEAAQDPATRRTAPPRRTASPEPPAPGAPLPACPGRIPGAARFGPRSCPLGSPAVLAVTTGWSHRSV

SEQ ID NO: 4834 - protein, 253 aa, Homo sapiens
MANLGCWMLVLFVATWSDLGLCKKRPKPGGWNTGGSRYPGQGSPGGNRYPPQGGGGWGQPHGGGWGQPHGGGWGQPHGGGWGQPHGGGWGQGGGTHSQWNKPSKPKTNMKHMAGAAAAGAVVGGLGGYMLGSAMSRPIIHFGSDYEDRYYRENMHRYPNQVYYRPMDEYSNQNNFVHDCVNITIKQHTVTTTTKGENFTETDVKMMERVVEQMCITQYERESQAYYQRGSSMVLFSSPPVILLISFLIFLIVG

SEQ ID NO: 4835 - protein, 2151 aa, Homo sapiens
MLSSGVETQPVPLDSSMSAVVQELYSELPVSVSRELHADPEPSVIPDVKPGASSSLLSQNRALPLELQRTHVESCCEETYETLDHGSEPGRCGLVDSTAGGSVASGILDRAKRSESMEPKVFRDPGGQAGIIREPSEGAKEDPHQHSTAAEEKTSPSQEDLLMQSSKELSHVDLPEDFLRSKEGNVQITAETLLKSAEVQGMKVNGTKTDNNEGHKNGNVSKDLSAGCGEFQEVDKIMTSDEVSETSTLVTPEPLTFVDPVLTEATPKEKECEELKSCPWLSLPGNSAISNVDNGKEELCKPNLVCEADDNHQQLHGHHNEQPSSTHDSPTATSPLKENSEVSCFTSDLSGPESRTISLENCGFEGGGLLKRSAEKTDSSYFYRGDDQGKNLASREENEERLLIPRSERGGPFLFNAREPEKEISGRCSGEKEPVVSPKENIHNNCIQDSLHTGNSSSLMPNSFTEATEVMLNKNDLKITVHVQGNLTNPEDHKETFTNMSHPGGHSEESSFSSLMQIEEAGQTTPVEPNILSKSFYTKDCNSLVSIQRNLEGNTQLNEASCNDFLFERKSIVSLMPEDQISPVSEVLKPKQGTALLLPSPEFDYRPESEKVIQTSHDDIPLLDEQSIACEMNELSCTNELVVNKVESECVLNQQVSLNSQEHANLPTDSLLHLNKEMPLATGRDAHQSHHPPLEGRADVIADIQTIPIQTKIKDISPPGNQTCGASSNCPTLNIKPVSLERKKEMADSGTKALHSRLRSNKREAAGFPQVVSVIECHSVQSQDISSCHRVRKNVSQENMCSASAAFKSSKISLQVDNSLITKYENAFQHRDHCCQGTGHSVEKSSCKVSYTSQERELDGKETNGSLPGDKIRNKMVAGLLNSGISNKTIHTSSSIKLSEEGLEGKEQDVSKETVFCKYNISDHAIQELNQTVNIPGPEKVLDQSPTVMFSSFKNVKSVETLDQKADEVLDCQSNQNRPDECKSEGQSAKEMLSSDQRETVTEPHGEVNHNQKDLLVSSGSNNSLPCGSPKKCNLKGAFVKMSGCDESTEGMVDIVYTDCSNKLAEGVLDVKASNLLDCGARQEKLAFQEDSRSTLSRRELDAAHTGTTGQDSDFPVTAASTVDFLKIKKSCEENVCRSLKDCEMEKCPDSCAHEMESVADHEPNKRILGRVNLSLNDSHYGQQDKGTSLRETQEMTEGSRLEPNSEFGKESTFGISSKESMSCHDESSVSLRSLKSIEIMPSQENSETNVNSEETDLKNLCKPKDGEMLCENVKDCTVLPEMKEIVSRDWSNSSDRDSVCTCVEKNACKACHPHENSSDRHLPLTVKTDIKVKGEETEEHQRGRLGYLTVGEQSEELVTRETGDGDPVSNISQTHFKCRGILNHAEKQQSPEVLDYMLQKEEKYIRQQKAHTISQQCISSSLLLDDAQNQNQPKADKDESTMINEITLAKLAKDSIVAQTQKLEDQKEERLHHPLRKDTESCTSPCLLGAPRKAQDPSSAGCDQIHGAFAKKGVLPLKKQPHRTCKKVSYQEQIIVGRKIGKIRSSAFLKSSSNPIPTKAHRLLSLCTLSAPTRLEPETAPTKSLVSHIPKQMSTPCHPLRSLNFRKTTKESALLNKLSILASKLAPAMKTQKLRYRRCSSELLPMAKSYKRLRYKRLLDGFSSSTEQLNPYLAASGWDKRPNSKPMALYSLESIKMTFIDLSNKMPSLLFGSEIFPVSFHVKSSSSDCTTESSRTFPEHCAPARLALGEALQCPSQPPKWTFSFFLSHGCPGMATFREDTGVHSQTHTQAPPQPPAPLQDYGGTAIVQTRADCSVLGLHTLLALCSPGCYRIWTKKRSFSSHMPTMQRLFMTQFTQGLKGLRSPASIADKVFCSLPYSVGRVLSIWSQHGPSVCSFEISSLHSPHCKRQPSLGTTSSHTMLPYVPLPGMEATYNTSGSQTRLEPPFPALVPKSCLVAESAVSKLLLSASEFQVRGLDELDGVKAACPCPQSSPPEQKEAEPEKRPKKVSQIRIRKTIPRPDPNLTPMGLPRPKRLKKKEFSLEEIYTNKNYKSPPANRCLETIFEEPKERNGTLISISQQKRKRVLEFQDFTVPRKRRARGKVKVAGSFTRAQKAAVQSRELDALLIQKLMELETFFAKEEEQEQSSGC

SEQ ID NO: 4836 - protein, 2006 aa, Homo sapiens
MLSSGVETQPVPLDSSMSAVVQELYSELPVSVSRELHADPEPSVIPDVKPGASSSLLSQNRALPLELQRTHVESCCEETYETLDHGSEPGRCGLVDSTAGGSVASGILDRAKRSESMEPKVFRDPGGQAGIIREPSEGAKEDPHQHSTAAEEKTSPSQEDLLMQSSKELSHVDLPEDFLRSKEGNVQITAETLLKSAEVQGMKVNGTKTDNNEGHKNGNVSKDLSAGCGEFQEVDKIMTSDEVSETSTLVTPEPLTFVDPVLTEATPKEKECEELKSCPWLSLPGNSAISNVDNGKEELCKPNLVCEADDNHQQLHGHHNEQPSSTHDSPTATSPLKENSEVSCFTSDLSGPESRTISLENCGFEGGGLLKRSAEKTDSSYFYRGDDQGKNLASREENEERLLIPRSERGGPFLFNAREPEKEISGRCSGEKEPVVSPKENIHNNCIQDSLHTGNSSSLMPNSFTEATEVMLNKNDLKITVHVQGNLTNPEDHKETFTNMSHPGGHSEESSFSSLMQIEEAGQTTPVEPNILSKSFYTKDCNSLVSIQRNLEGNTQLNEASCNDFLFERKSIVSLMPEDQISPVSEVLKPKQGTALLLPSPEFDYRPESEKVIQTSHDDIPLLDEQSIACEMNELSCTNELVVNKVESECVLNQQVSLNSQEHANLPTDSLLHLNKEMPLATGRDAHQSHHPPLEGRADVIADIQTIPIQTKIKDISPPGNQTCGASSNCPTLNIKPVSLERKKEMADSGTKALHSRLRSNKREAAGFPQVVSVIECHSVQSQDISSCHRVRKNVSQENMCSASAAFKSSKISLQVDNSLITKYENAFQHRDHCCQGTGHSVEKSSCKVSYTSQERELDGKETNGSLPGDKIRNKMVAGLLNSGISNKTIHTSSSIKLSEEGLEGKEQDVSKETVFCKYNISDHAIQELNQTVNIPGPEKVLDQSPTVMFSSFKNVKSVETLDQKADEVLDCQSNQNRPDECKSEGQSAKEMLSSDQRETVTEPHGEVNHNQKDLLVSSGSNNSLPCGSPKKCNLKGAFVKMSGCDESTEGMVDIVYTDCSNKLAEGVLDVKASNLLDCGARQEKLAFQEDSRSTLSRRELDAAHTGTTGQDSDFPVTAASTVDFLKIKKSCEENVCRSLKDCEMEKCPDSCAHEMESVADHEPNKRILGRVNLSLNDSHYGQQDKGTSLRETQEMTEGSRLEPNSEFGKESTFGISSKESMSCHDESSVSLRSLKSIEIMPSQENSETNVNSEETDLKNLCKPKDGEMLCENVKDCTVLPEMKEIVSRDWSNSSDRDSVCTCVEKNACKACHPHENSSDRHLPLTVKTDIKVKGEETEEHQRGRLGYLTVGEQSEELVTRETGDGDPVSNISQTHFKCRGILNHAEKQQSPEVLDYMLQKEEKYIRQQKAHTISQQCISSSLLLDDAQNQNQPKADKDESTMINEITLAKLAKDSIVAQTQKLEDQKEERLHHPLRKDTESCTSPCLLGAPRKAQDPSSAGCDQIHGAFAKKGVLPLKKQPHRTCKKVSYQEQIIVGRKIGKIRSSAFLKSSSNPIPTKAHRLLSLCTLSAPTRLEPETAPTKSLVSHIPKQMSTPCHPLRSLNFRKTTKESALLNKLSILASKLAPAMKTQKLRYRRCSSELLPMAKSYKRLRYKRLLDGFSSSTEQLNPYLAASGWDKRPNSKPMALYSLESIKMTFIDLSNKMPSLLFGSEIFPVSFHVKSSSSDCTTESSRTFPEHCAPARLALGEALQCPSQPPKWTFSFFLSHGCPGMATFREDTGVHSQTHTQAPPQPPAPLQDYGGTAIVQTRADCSVLGLHTLLALCSPGCYRIWTKKRSFSSHMPTMQRLFMTQFTQGLKGLRSPASIADKVFCSLPYSVGRVLSIWSQHGPSVCSFEISSLHSPHCKRQPSLGTTSSHTMLPYVPLPGMEATYNTSGSQTRLEPPFPALVPKSCLVAESAVSKLLLSASEFQVRGLDELDGVKAACPCPQSSPPEQKEVKEEGV

SEQ ID NO: 4837 - protein, 1239 aa, Homo sapiens
MLSSGVETQPVPLDSSMSAVVQELYSELPVSVSRELHADPEPSVIPDVKPGASSSLLSQNRALPLELQRTHVESCCEETYETLDHGSEPGRCGLVDSTAGGSVASGILDRAKRSESMEPKVFRDPGGQAGIIREPSEGAKEDPHQHSTAAEEKTSPSQEDLLMQSSKELSHVDLPEDFLRSKEGNVQITAETLLKSAEVQGMKVNGTKTDNNEGHKNGNVSKDLSAGCGEFQEVDKIMTSDEVSETSTLVTPEPLTFVDPVLTEATPKEKECEELKSCPWLSLPGNSAISNVDNGKEELCKPNLVCEADDNHQQLHGHHNEQPSSTHDSPTATSPLKENSEVSCFTSDLSGPESRTISLENCGFEGGGLLKRSAEKTDSSYFYRGDDQGKNLASREENEERLLIPRSERGGPFLFNAREPEKEISGRCSGEKEPVVSPKENIHNNCIQDSLHTGNSSSLMPNSFTEATEVMLNKNDLKITVHVQGNLTNPEDHKETFTNMSHPGGHSEESSFSSLMQIEEAGQTTPVEPNILSKSFYTKDCNSLVSIQRNLEGNTQLNEASCNDFLFERKSIVSLMPEDQISPVSEVLKPKQGTALLLPSPEFDYRPESEKVIQTSHDDIPLLDEQSIACEMNELSCTNELVVNKVESECVLNQQVSLNSQEHANLPTDSLLHLNKEMPLATGRDAHQSHHPPLEGRADVIADIQTIPIQTKIKDISPPGNQTCGASSNCPTLNIKPVSLERKKEMADSGTKALHSRLRSNKREAAGFPQVVSVIECHSVQSQDISSCHRVRKNVSQENMCSASAAFKSSKISLQVDNSLITKYENAFQHRDHCCQGTGHSVEKSSCKVSYTSQERELDGKETNGSLPGDKIRNKMVAGLLNSGISNKTIHTSSSIKLSEEGLEGKEQDVSKETVFCKYNISDHAIQELNQTVNIPGPEKVLDQSPTVMFSSFKNVKSVETLDQKADEVLDCQSNQNRPDECKSEGQSAKEMLSSDQRETVTEPHGEVNHNQKDLLVSSGSNNSLPCGSPKKCNLKGAFVKMSGCDESTEGMVDIVYTDCSNKLAEGVLDVKASNLLDCGARQEKLAFQEDSRSTLSRRELDAAHTGTTGQDSDFPVTAASTVDFLKIKKSCEENVCRSLKDCEMEKCPDSCAHEMESVADHEPNKRILGRVNLSLNDSHYGQQDKGTSLRETQEMTEGSRLEPNSEFGKESTFGISSKESMSCHDESSVSLRSPCLTT

SEQ ID NO: 4838 - protein, 2149 aa, Homo sapiens
MLSSGVETQPVPLDSSMSAVVQELYSELPVSVSRELHADPEPSVIPDVKPGASSSLLSQNRALPLELQRTHVESCCEETYETLDHGSEPGRCGLVDSTAGGSVASGILDRAKRSESMEPKVFRDPGGQAGIIREPSEGAKEDPHQHSTAAEEKTSPSQEDLLMQSSKELSHVDLPEDFLRSKEGNVQITAETLLKSAEVQGMKVNGTKTDNNEGHKNGNVSKDLSAGCGEFQEVDKIMTSDEVSETSTLVTPEPLTFVDPVLTEATPKEKECEELKSCPWLSLPGNSAISNVDNGKEELCKPNLVCEADDNHQQLHGHHNEQPSSTHDSPTATSPLKENSEVSCFTSDLSGPESRTISLENCGFEGGGLLKRSAEKTDSSYFYRGDDQGKNLASREENEERLLIPRSERGGPFLFNAREPEKEISGRCSGEKEPVVSPKENIHNNCIQDSLHTGNSSSLMPNSFTEATEVMLNKNDLKITVHVQGNLTNPEDHKETFTNMSHPGGHSEESSFSSLMQIEEAGQTTPVEPNILSKSFYTKDCNSLVSIQRNLEGNTQLNEASCNDFLFERKSIVSLMPEDQISPVSEVLKPKQGTALLLPSPEFDYRPESEKVIQTSHDDIPLLDEQSIACEMNELSCTNELVVNKVESECVLNQQVSLNSQEHANLPTDSLLHLNKEMPLATGRDAHQSHHPPLEGRADVIADIQTIPIQTKIKDISPPGNQTCGASSNCPTLNIKPVSLERKKEMADSGTKALHSRLRSNKREAAGFPQVVSVIECHSVQSQDISSCHRVRKNVSQENMCSASAAFKSSKISLQVDNSLITKYENAFQHRDHCCQGTGHSVEKSSCKVSYTSQERELDGKETNGSLPGDKIRNKMVAGLLNSGISNKTIHTSSSIKLSEEGLEGKEQDVSKETVFCKYNISDHAIQELNQTVNIPGPEKVLDQSPTVMFSSFKNVKSVETLDQKADEVLDCQSNQNRPDECKSEGQSAKEMLSSDQRETVTEPHGEVNHNQKDLLVSSGSNNSLPCGSPKKCNLKGAFVKMSGCDESTEGMVDIVYTDCSNKLAEGVLDVKASNLLDCGARQEKLAFQEDSRSTLSRRELDAAHTGTTGQDSDFPVTAASTVDFLKIKKSCEENVCRSLKDCEMEKCPDSCAHEMESVADHEPNKRILGRVNLSLNDSHYGQQDKGTSLRETQEMTEGSRLEPNSEFGKESTFGISSKESMSCHDESSVSLRSLKSIEIMPSQENSETNVNSEETDLKNLCKPKDGEMLCENVKDCTVLPEMKEIVSRDWSNSSDRDSVCTCVEKNACKACHPHENSSDRHLPLTVKTDIKVKGEETEEHQRGRLGYLTVGEQSEELVTRETGDGDPVSNISQTHFKCRGILNHAEKQQSPEVLDYMLQKEEKYIRQQKAHTISQQCISSSLLLDDAQNQNQPKADKDESTMINEITLAKLAKDSIVAQTQKLEDQKEERLHHPLRKDTESCTSPCLLGAPRKAQDPSSAGCDQIHGAFAKKGVLPLKKQPHRTCKKVSYQEQIIVGRKIGKIRSSAFLKSSSNPIPTKAHRLLSLCTLSAPTRLEPETAPTKSLVSHIPKQMSTPCHPLRSLNFRKTTKESALLNKLSILASKLAPAMKTQKLRYRRCSSELLPMAKSYKRLRYKRLLDGFSSSTEQLNPYLAASGWDKRPNSKPMALYSLESIKMTFIDLSNKMPSLLFGSEIFPVSFHVKSSSSDCTTESSRTFPEHCAPARLALGEALQCPSQPPKWTFSFFLSHGCPGMATFREDTGVHSQTHTQAPPQPPAPLQDYGGTAIVQTRADCSVLGLHTLLALCSPGCYRIWTKKRSFSSHMPTMQRLFMTQFTQGLKGLRSPASIADKVFCSLPYSVGRVLSIWSQHGPSVCSFEISSLHSPHCKRQPSLGTTSSHTMLPYVPLPGMEATYNTSGSQTRLEPPFPALVPKSCLVAESAVSKLLLSASEFQVRGLDELDGVKAACPCPQSSPPEQKEAEPEKRPKKVSQIRIRKTIPRPDPNLTPMGLPRPKRLKKKEFSLEEIYTNKNYKSPPANRDLDSSCPSTDSETGHFLVFGYAQRQAQPHPLLASRRLIGCSSPEGRGHPRSYPYWRRLLVLCWYLPGWRAGRVTWLRLATWAGRGDSSL

SEQ ID NO: 4839 - protein, 646 aa, Homo sapiens
MAAESGSDFQQRRRRRRDPEEPEKTELSERELAVAVAVSQENDEENEERWVGPLPVEATLAKKRKVLEFERVYLDNLPSASMYERSYMHRDVITHVVCTKTDFIITASHDGHVKFWKKIEEGIEFVKHFRSHLGVIESIAVSSEGALFCSVGDDKAMKVFDVVNFDMINMLKLGYFPGQCEWIYCPGDAISSVAASEKSTGKIFIYDGRGDNQPLHIFDKLHTSPLTQIRLNPVYKAVVSSDKSGMIEYWTGPPHEYKFPKNVNWEYKTDTDLYEFAKCKAYPTSVCFSPDGKKIATIGSDRKVRIFRFVTGKLMRVFDESLSMFTELQQMRQQLPDMEFGRRMAVERELEKVDAVRLINIVFDETGHFVLYGTMLGIKVINVETNRCVRILGKQENIRVMQLALFQGIAKKHRAATTIEMKASENPVLQNIQADPTIVCTSFKKNRFYMFTKREPEDTKSADSDRDVFNEKPSKEEVMAATQAEGPKRVSDSAIIHTSMGDIHTKLFPVECPKTVENFCVHSRNGYYNGHTFHRIIKGFMIQTGDPTGTGMGGESIWGGEFEDEFHSTLRHDRPYTLSMANAGSNTNGSQFFITVVPTPWLDNKHTVFGRVTKGMEVVQRISNVKVNPKTDKPYEDVSIINITVK

SEQ ID NO: 4840 - protein, 490 aa, Homo sapiens
MKVFDVVNFDMINMLKLGYFPGQCEWIYCPGDAISSVAASEKSTGKIFIYDGRGDNQPLHIFDKLHTSPLTQIRLNPVYKAVVSSDKSGMIEYWTGPPHEYKFPKNVNWEYKTDTDLYEFAKCKAYPTSVCFSPDGKKIATIGSDRKVRIFRFVTGKLMRVFDESLSMFTELQQMRQQLPDMEFGRRMAVERELEKVDAVRLINIVFDETGHFVLYGTMLGIKVINVETNRCVRILGKQENIRVMQLALFQGIAKKHRAATTIEMKASENPVLQNIQADPTIVCTSFKKNRFYMFTKREPEDTKSADSDRDVFNEKPSKEEVMAATQAEGPKRVSDSAIIHTSMGDIHTKLFPVECPKTVENFCVHSRNGYYNGHTFHRIIKGFMIQTGDPTGTGMGGESIWGGEFEDEFHSTLRHDRPYTLSMANAGSNTNGSQFFITVVPTPWLDNKHTVFGRVTKGMEVVQRISNVKVNPKTDKPYEDVSIINITVK

SEQ ID NO: 4841 - protein, 241 aa, Homo sapiens
MKFILLWALLNLTVALAFNPDYTVSSTPPYLVYLKSDYLPCAGVLIHPLWVITAAHCNLPKLRVILGVTIPADSNEKHLQVIGYEKMIHHPHFSVTSIDHDIMLIKLKTEAELNDYVKLANLPYQTISENTMCSVSTWSYNVCDIYKEPDSLQTVNISVISKPQCRDAYKTYNITENMLCVGIVPGRRQPCKEVSAAPAICNGMLQGILSFADGCVLRADVGIYAKIFYYIPWIENVIQNN

SEQ ID NO: 4842 - protein, 312 aa, Homo sapiens
MANRTVKDAHSIHGTNPQYLVEKIIRTRIYESKYWKEECFGLTAELVVDKAMELRFVGGVYGGNIKPTPFLCLTLKMLQIQPEKDIIVEFIKNEDFKYVRMLGALYMRLTGTAIDCYKYLEPLYNDYRKIKSQNRNGEFELMHVDEFIDELLHSERVCDIILPRLQKRYVLEEAEQLEPRVSALEEDMDDVESSEEEEEEDEKLERVPSPDHRRRSYRDLDKPRRSPTLRYRRSRSRSPRRRSRSPKRRSPSPRRERHRSKSPRRHRSRSRDRRHRSRSKSPGHHRSHRHRSHSKSPERSKKSHKKSRRGNE

SEQ ID NO: 4843 - protein, 125 aa, Homo sapiens
MDDVESSEEEEEEDEKLERVPSPDHRRRSYRDLDKPRRSPTLRYRRSRSRSPRRRSRSPKRRSPSPRRERHRSKSPRRHRSRSRDRRHRSRSKSPGHHRSHRHRSHSKSPERSKKSHKKSRRGNE

SEQ ID NO: 4844 - protein, 425 aa, Homo sapiens
MATAEVLNIGKKLYEGKTKEVYELLDSPGKVLLQSKDQITAGNAARKNHLEGKAAISNKITSCIFQLLQEAGIKTAFTRKCGETAFIAPQCEMIPIEWVCRRIATGSFLKRNPGVKEGYKFYPPKVELFFKDDANNDPQWSEEQLIAAKFCFAGLLIGQTEVDIMSHATQAIFEILEKSWLPQNCTLVDMKIEFGVDVTTKEIVLADVIDNDSWRLWPSGDRSQQKDKQSYRDLKEVTPEGLQMVKKNFEWVAERVELLLKSESQCRVVVLMGSTSDLGHCEKIKKACGNFGIPCELRVTSAHKGPDETLRIKAEYEGDGIPTVFVAVAGRSNGLGPVMSGNTAYPVISCPPLTPDWGVQDVWSSLRLPSGLGCSTVLSPEGSAQFAAQIFGLSNHLVWSKLRASILNTWISLKQADKKIRECNL

SEQ ID NO: 4845 - protein, 432 aa, Homo sapiens
MATAEVLNIGKKLYEGKTKEVYELLDSPGKVLLQSKDQITAGNAARKNHLEGKAAISNKITSCIFQLLQEAVTSYKSNRIKTAFTRKCGETAFIAPQCEMIPIEWVCRRIATGSFLKRNPGVKEGYKFYPPKVELFFKDDANNDPQWSEEQLIAAKFCFAGLLIGQTEVDIMSHATQAIFEILEKSWLPQNCTLVDMKIEFGVDVTTKEIVLADVIDNDSWRLWPSGDRSQQKDKQSYRDLKEVTPEGLQMVKKNFEWVAERVELLLKSESQCRVVVLMGSTSDLGHCEKIKKACGNFGIPCELRVTSAHKGPDETLRIKAEYEGDGIPTVFVAVAGRSNGLGPVMSGNTAYPVISCPPLTPDWGVQDVWSSLRLPSGLGCSTVLSPEGSAQFAAQIFGLSNHLVWSKLRASILNTWISLKQADKKIRECNL

SEQ ID NO: 4846 - protein, 347 aa, Homo sapiens
MERARRRGGGGGRGRGGKNVGGSGLSKSRLYPQAQHSHYPHYAASATPNQAGGAAEIQELASKRVDIQKKRFYLDVKQSSRGRFLKIAEVWIGRGRQDNIRKSKLTLSLSVAAELKDCLGDFIEHYAHLGLKGHRQEHGHSKEQGSRRRQKHSAPSPPVSVGSEEHPHSVLKTDYIERDNRKYYLDLKENQRGRFLRIRQTMMRGTGMIGYFGHSLGQEQTIVLPAQGMIEFRDALVQLIEDYGEGDIEERRGGDDDPLELPEGTSFRVDNKRFYFDVGSNKYGIFLKVSEVRPPYRNTITVPFKAWTRFGENFIKYEEEMRKICNSHKEKRMDGRKASGEEQECLD

SEQ ID NO: 4847 - protein, 322 aa, Homo sapiens
MERARRRGGGGGRGRGGKNVGGSGLSKSRLYPQAQHSHYPHYAASATPNQAGGAAEIQELASKRVDIQKKRFYLDVKQSSRGRFLKIAEVWIGRGRQDNIRKSKLTLSLSVAAELKDCLGDFIEHYAHLGLKGHRQEHGHSKEQGSRRRQKHSAPSPPVSVGSEEHPHSVLKTDYIERDNRKYYLDLKENQRGRFLRIRQTMMRGTGMIGYFGHSLGQEQTIVLPAQGMIEFRDALVQLIEDYGEGDIEERRGGDDDPLELPEGTSFRVDNKRFYFDVGSNKYGIFLKLTNYPKSRENINLFHCCQIKHKEQPHDTTKTVEE

SEQ ID NO: 4848 - protein, 1843 aa, Homo sapiens
MEPAERAGVGEPPEPGGRPEPGPRGFVPQKEIVYNKLLPYAERLDAESDLQLAQIKCNLGRAVQLQELWPGGLFWTRKLSTYIRLYGRKFSKEDHVLFIKLLYELVSIPKLEISMMQGFARLLINLLKKKELLSRADLELPWRPLYDMVERILYSKTEHLGLNWFPNSVENILKTLVKSCRPYFPADATAEMLEEWRPLMCPFDVTMQKAITYFEIFLPTSLPPELHHKGFKLWFDELIGLWVSVQNLPQWEGQLVNLFARLATDNIGYIDWDPYVPKIFTRILRSLNLPVGSSQVLVPRFLTNAYDIGHAVIWITAMMGGPSKLVQKHLAGLFNSITSFYHPSNNGRWLNKLMKLLQRLPNSVVRRLHRERYKKPSWLTPVPDSHKLTDQDVTDFVQCIIQPVLLAMFSKTGSLEAAQALQNLALMRPELVIPPVLERTYPALETLTEPHQLTATLSCVIGVARSLVSGGRWFPEGPTHMLPLLMRALPGVDPNDFSKCMITFQFIATFSTLVPLVDCSSVLQERNDLTEVERELCSATAEFEDFVLQFMDRCFGLIESSTLEQTREETETEKMTHLESLVELGLSSTFSTILTQCSKEIFMVALQKVFNFSTSHIFETRVAGRMVADMCRAAVKCCPEESLKLFVPHCCSVITQLTMNDDVLNDEELDKELLWNLQLLSEITRVDGRKLLLYREQLVKILQRTLHLTCKQGYTLSCNLLHHLLRSTTLIYPTEYCSVPGGFDKPPSEYFPIKDWGKPGDLWNLGIQWHVPSSEEVSFAFYLLDSFLQPELVKLQHCGDGKLEMSRDDILQSLTIVHNCLIGSGNLLPPLKGEPVTNLVPSMVSLEETKLYTGLEYDLSRENHREVIATVIRKLLNHILDNSEDDTKSLFLIIKIIGDLLQFQGSHKHEFDSRWKSFNLVKKSMENRLHGKKQHIRALLIDRVMLQHELRTLTVEGCEYKKIHQDMIRDLLRLSTSSYSQVRNKAQQTFFAALGAYNFCCRDIIPLVLEFLRPDRQGVTQQQFKGALYCLLGNHSGVCLANLHDWDCIVQTWPAIVSSGLSQAMSLEKPSIVRLFDDLAEKIHRQYETIGLDFTIPKSCVEIAELLQQSKNPSINQILLSPEKIKEGIKRQQEKNADALRNYENLVDTLLDGVEQRNLPWKFEHIGIGLLSLLLRDDRVLPLRAIRFFVENLNHDAIVVRKMAISAVAGILKQLKRTHKKLTINPCEISGCPKPTQIIAGDRPDNHWLHYDSKTIPRTKKEWESSCFVEKTHWGYYTWPKNMVVYAGVEEQPKLGRSREDMTEAEQIIFDHFSDPKFVEQLITFLSLEDRKGKDKFNPRRFCLFKGIFRNFDDAFLPVLKPHLEHLVADSHESTQRCVAEIIAGLIRGSKHWTFEKVEKLWELLCPLLRTALSNITVETYNDWGACIATSCESRDPRKLHWLFELLLESPLSGEGGSFVDACRLYVLQGGLAQQEWRVPELLHRLLKYLEPKLTQVYKNVRERIGSVLTYIFMIDVSLPNTTPTISPHVPEFTARILEKLKPLMDVDEEIQNHVMEENGIGEEDERTQGIKLLKTILKWLMASAGRSFSTAVTEQLQLLPLFFKIAPVENDNSYDELKRDAKLCLSLMSQGLLYPHQVPLVLQVLKQTARSSSWHARYTVLTYLQTMVFYNLFIFLNNEDAVKDIRWLVISLLEDEQLEVREMAATTLSGLLQCNFLTMDSPMQIHFEQLCKTKLPKKRKRDPGSVGDTIPSAELVKRHAGVLGLGACVLSSPYDVPTWMPQLLMNLSAHLNDPQPIEMTVKKTLSNFRRTHHDNWQEHKQQFTDDQLLVLTDLLVSPCYYA

SEQ ID NO: 4849 - protein, 1218 aa, Homo sapiens
MVADMCRAAVKCCPEESLKLFVPHCCSVITQLTMNDDVLNDEELDKELLWNLQLLSEITRVDGRKLLLYREQLVKILQRTLHLTCKQGYTLSCNLLHHLLRSTTLIYPTEYCSVPGGFDKPPSEYFPIKDWGKPGDLWNLGIQWHVPSSEEVSFAFYLLDSFLQPELVKLQHCGDGKLEMSRDDILQSLTIVHNCLIGSGNLLPPLKGEPVTNLVPSMVSLEETKLYTGLEYDLSRENHREVIATVIRKLLNHILDNSEDDTKSLFLIIKIIGDLLQFQGSHKHEFDSRWKSFNLVKKSMENRLHGKKQHIRALLIDRVMLQHELRTLTVEGCEYKKIHQDMIRDLLRLSTSSYSQVRNKAQQTFFAALGAYNFCCRDIIPLVLEFLRPDRQGVTQQQFKGALYCLLGNHSGVCLANLHDWDCIVQTWPAIVSSGLSQAMSLEKPSIVRLFDDLAEKIHRQYETIGLDFTIPKSCVEIAELLQQSKNPSINQILLSPEKIKEGIKRQQEKNADALRNYENLVDTLLDGVEQRNLPWKFEHIGIGLLSLLLRDDRVLPLRAIRFFVENLNHDAIVVRKMAISAVAGILKQLKRTHKKLTINPCEISGCPKPTQIIAGDRPDNHWLHYDSKTIPRTKKEWESSCFVEKTHWGYYTWPKNMVVYAGVEEQPKLGRSREDMTEAEQIIFDHFSDPKFVEQLITFLSLEDRKGKDKFNPRRFCLFKGIFRNFDDAFLPVLKPHLEHLVADSHESTQRCVAEIIAGLIRGSKHWTFEKVEKLWELLCPLLRTALSNITVETYNDWGACIATSCESRDPRKLHWLFELLLESPLSGEGGSFVDACRLYVLQGGLAQQEWRVPELLHRLLKYLEPKLTQVYKNVRERIGSVLTYIFMIDVSLPNTTPTISPHVPEFTARILEKLKPLMDVDEEIQNHVMEENGIGEEDERTQGIKLLKTILKWLMASAGRSFSTAVTEQLQLLPLFFKIAPVENDNSYDELKRDAKLCLSLMSQGLLYPHQVPLVLQVLKQTARSSSWHARYTVLTYLQTMVFYNLFIFLNNEDAVKDIRWLVISLLEDEQLEVREMAATTLSGLLQCNFLTMDSPMQIHFEQLCKTKLPKKRKRDPGSVGDTIPSAELVKRHAGVLGLGACVLSSPYDVPTWMPQLLMNLSAHLNDPQPIEMTVKKTLSNFRRTHHDNWQEHKQQFTDDQLLVLTDLLVSPCYYA

SEQ ID NO: 4850 - protein, 987 aa, Homo sapiens
MGENLAKKIMFFLLIIRKLLNHILDNSEDDTKSLFLIIKIIGDLLQFQGSHKHEFDSRWKSFNLVKKSMENRLHGKKQHIRALLIDRVMLQHELRTLTVEGCEYKKIHQDMIRDLLRLSTSSYSQVRNKAQQTFFAALGAYNFCCRDIIPLVLEFLRPDRQGVTQQQFKGALYCLLGNHSGVCLANLHDWDCIVQTWPAIVSSGLSQAMSLEKPSIVRLFDDLAEKIHRQYETIGLDFTIPKSCVEIAELLQQSKNPSINQILLSPEKIKEGIKRQQEKNADALRNYENLVDTLLDGVEQRNLPWKFEHIGIGLLSLLLRDDRVLPLRAIRFFVENLNHDAIVVRKMAISAVAGILKQLKRTHKKLTINPCEISGCPKPTQIIAGDRPDNHWLHYDSKTIPRTKKEWESSCFVEKTHWGYYTWPKNMVVYAGVEEQPKLGRSREDMTEAEQIIFDHFSDPKFVEQLITFLSLEDRKGKDKFNPRRFCLFKGIFRNFDDAFLPVLKPHLEHLVADSHESTQRCVAEIIAGLIRGSKHWTFEKVEKLWELLCPLLRTALSNITVETYNDWGACIATSCESRDPRKLHWLFELLLESPLSGEGGSFVDACRLYVLQGGLAQQEWRVPELLHRLLKYLEPKLTQVYKNVRERIGSVLTYIFMIDVSLPNTTPTISPHVPEFTARILEKLKPLMDVDEEIQNHVMEENGIGEEDERTQGIKLLKTILKWLMASAGRSFSTAVTEQLQLLPLFFKIAPVENDNSYDELKRDAKLCLSLMSQGLLYPHQVPLVLQVLKQTARSSSWHARYTVLTYLQTMVFYNLFIFLNNEDAVKDIRWLVISLLEDEQLEVREMAATTLSGLLQCNFLTMDSPMQIHFEQLCKTKLPKKRKRDPGSVGDTIPSAELVKRHAGVLGLGACVLSSPYDVPTWMPQLLMNLSAHLNDPQPIEMTVKKTLSNFRRTHHDNWQEHKQQFTDDQLLVLTDLLVSPCYYA

SEQ ID NO: 4851 - protein, 215 aa, Homo sapiens
MSQGLLYPHQVPLVLQVLKQTARSSSWHARYTVLTYLQTMVFYNLFIFLNNEDAVKDIRWLVISLLEDEQLEVREMAATTLSGLLQCNFLTMDSPMQIHFEQLCKTKLPKKRKRDPGSVGDTIPSAELVKRHAGVLGLGACVLSSPYDVPTWMPQLLMNLSAHLNDPQPIEMTVKKTLSNFRRTHHDNWQEHKQQFTDDQLLVLTDLLVSPCYYA

SEQ ID NO: 4852 - protein, 91 aa, Homo sapiens
MGLEDEQKMLTESGDPEEEEEEEEELVDPLTTVREQCEQLEKCVKARERLELYDEHVSSRSHTEEDCTEELFDFLHAKDHCVAHKLFNNLK

SEQ ID NO: 4853 - protein, 97 aa, Homo sapiens
MASSAELDFNLQALLEQLSQDELSKFKSLIRTISLGKELQTVPQTEVDKANGKQLVEIFTSHSCSYWAGMAAIQVFEKMNQTHLSGRADEHCVMPPP

SEQ ID NO: 4854 - protein, 847 aa, Homo sapiens
MAKPLTDQEKRRQISIRGIVGVENVAELKKSFNRHLHFTLVKDRNVATTRDYYFALAHTVRDHLVGRWIRTQQHYYDKCPKRVYYLSLEFYMGRTLQNTMINLGLQNACDEAIYQLGLDIEELEEIEEDAGLGNGGLGRLAACFLDSMATLGLAAYGYGIRYEYGIFNQKIRDGWQVEEADDWLRYGNPWEKSRPEFMLPVHFYGKVEHTNTGTKWIDTQVVLALPYDTPVPGYMNNTVNTMRLWSARAPNDFNLRDFNVGDYIQAVLDRNLAENISRVLYPNDNFFEGKELRLKQEYFVVAATLQDIIRRFKASKFGSTRGAGTVFDAFPDQVAIQLNDTHPALAIPELMRIFVDIEKLPWSKAWELTQKTFAYTNHTVLPEALERWPVDLVEKLLPRHLEIIYEINQKHLDRIVALFPKDVDRLRRMSLIEEEGSKRINMAHLCIVGSHAVNGVAKIHSDIVKTKVFKDFSELEPDKFQNKTNGITPRRWLLLCNPGLAELIAEKIGEDYVKDLSQLTKLHSFLGDDVFLRELAKVKQENKLKFSQFLETEYKVKINPSSMFDVQVKRIHEYKRQLLNCLHVITMYNRIKKDPKKLFVPRTVIIGGKAAPGYHMAKMIIKLITSVADVVNNDPMVGSKLKVIFLENYRVSLAEKVIPATDLSEQISTAGTEASGTGNMKFMLNGALTIGTMDGANVEMAEEAGEENLFIFGMRIDDVAALDKKGYEAKEYYEALPELKLVIDQIDNGFFSPKQPDLFKDIINMLFYHDRFKVFADYEAYVKCQDKVSQLYMNPKAWNTMVLKNIAASGKFSSDRTIKEYAQNIWNVEPSDLKISLSNESNKVNGN

SEQ ID NO: 4855 - protein, 813 aa, Homo sapiens
MAKPLTDQEKRRQISIRGIVGVENVAELKKSFNRHLHFTLVKDRNVATTRDYYFALAHTVRDHLVGRWIRTQQHYYDKCPKLGLDIEELEEIEEDAGLGNGGLGRLAACFLDSMATLGLAAYGYGIRYEYGIFNQKIRDGWQVEEADDWLRYGNPWEKSRPEFMLPVHFYGKVEHTNTGTKWIDTQVVLALPYDTPVPGYMNNTVNTMRLWSARAPNDFNLRDFNVGDYIQAVLDRNLAENISRVLYPNDNFFEGKELRLKQEYFVVAATLQDIIRRFKASKFGSTRGAGTVFDAFPDQVAIQLNDTHPALAIPELMRIFVDIEKLPWSKAWELTQKTFAYTNHTVLPEALERWPVDLVEKLLPRHLEIIYEINQKHLDRIVALFPKDVDRLRRMSLIEEEGSKRINMAHLCIVGSHAVNGVAKIHSDIVKTKVFKDFSELEPDKFQNKTNGITPRRWLLLCNPGLAELIAEKIGEDYVKDLSQLTKLHSFLGDDVFLRELAKVKQENKLKFSQFLETEYKVKINPSSMFDVQVKRIHEYKRQLLNCLHVITMYNRIKKDPKKLFVPRTVIIGGKAAPGYHMAKMIIKLITSVADVVNNDPMVGSKLKVIFLENYRVSLAEKVIPATDLSEQISTAGTEASGTGNMKFMLNGALTIGTMDGANVEMAEEAGEENLFIFGMRIDDVAALDKKGYEAKEYYEALPELKLVIDQIDNGFFSPKQPDLFKDIINMLFYHDRFKVFADYEAYVKCQDKVSQLYMNPKAWNTMVLKNIAASGKFSSDRTIKEYAQNIWNVEPSDLKISLSNESNKVNGN

SEQ ID NO: 4856 - protein, 113 aa, Homo sapiens
MESKYKEILLLTSLDNITDEELDRFKCFLPDEFNIATGKLHTLNSTSSQLDLKRWHGVCSEEDRIFQKLNYMLVAKCLREEQETGICGSPSSARSVSQSRLGLSFHGISGNAC

SEQ ID NO: 4857 - protein, 206 aa, Homo sapiens
MAANKSKGQSSLALHKVIMVGSGGVGKSALTLQFMYDEFVEDYEPTKADSYRKKVVLDGEEVQIDILDTAGQEDYAAIRDNYFRSGEGFLLVFSITEHESFTATAEFREQILRVKAEEDKIPLLVVGNKSDLEERRQVPVEEARSKAEEWGVQYVETSAKTRANVDKVFFDLMREIRTKKMSENKDKNGKKSSKNKKSFKERCCLL

SEQ ID NO: 4858 - protein, 228 aa, Homo sapiens
MKQRQSALQWVICVSQPQKTSEMAANKSKGQSSLALHKVIMVGSGGVGKSALTLQFMYDEFVEDYEPTKADSYRKKVVLDGEEVQIDILDTAGQEDYAAIRDNYFRSGEGFLLVFSITEHESFTATAEFREQILRVKAEEDKIPLLVVGNKSDLEERRQVPVEEARSKAEEWGVQYVETSAKTRANVDKVFFDLMREIRTKKMSENKDKNGKKSSKNKKSFKERCCLL

SEQ ID NO: 4859 - protein, 227 aa, Homo sapiens
MAANKSKGQSSLALHKVIMVGSGGVGKSALTLQFMNVSKSLAYDKKKYTANKKVEGILEFVEDYEPTKADSYRKKVVLDGEEVQIDILDTAGQEDYAAIRDNYFRSGEGFLLVFSITEHESFTATAEFREQILRVKAEEDKIPLLVVGNKSDLEERRQVPVEEARSKAEEWGVQYVETSAKTRANVDKVFFDLMREIRTKKMSENKDKNGKKSSKNKKSFKERCCLL

SEQ ID NO: 4860 - protein, 435 aa, Homo sapiens
MAPFGRNLLKTRHKNRSPTKDMDSEEKEIVVWVCQEEKLVCGLTKRTTSADVIQALLEEHEATFGEKRFLLGKPSDYCIIEKWRGSERVLPPLTRILKLWKAWGDEQPNMQFVLVKADAFLPVPLWRTAEAKLVQNTEKLWELSPANYMKTLPPDKQKRIVRKTFRKLAKIKQDTVSHDRDNMETLVHLIISQDHTIHQQVKRMKELDLEIEKCEAKFHLDRVENDGENYVQDAYLMPSFSEVEQNLDLQYEENQTLEDLSESDGIEQLEERLKYYRILIDKLSAEIEKEVKSVCIDINEDAEGEAASELESSNLESVKCDLEKSMKAGLKIHSHLSGIQKEIKYSDSLLQMKAKEYELLAKEFNSLHISNKDGCQLKENRAKESEVPSSNGEIPPFTQRVFSNYTNDTDSDTGISSNHSQDSETTVGDVVLLST

SEQ ID NO: 4861 - protein, 784 aa, Homo sapiens
MASLDDPGEVREGFLCPLCLKDLQSFYQLHSHYEEEHSGEDRDVKGQIKSLVQKAKKAKDRLLKREGDDRAESGTQGYESFSYGGVDPYMWEPQELGAVRSHLSDFKKHRAARIDHYVVEVNKLIIRLEKLTAFDRTNTESAKIRAIEKSVVPWVNDQDVPFCPDCGNKFSIRNRRHHCRLCGSIMCKKCMELISLPLANKLTSASKESLSTHTSPSQSPNSVHGSRRGSISSMSSVSSVLDEKDDDRIRCCTHCKDTLLKREQQIDEKEHTPDIVKLYEKLRLCMEKVDQKAPEYIRMAASLNAGETTYSLEHASDLRVEVQKVYELIDALSKKILTLGLNQDPPPHPSNLRLQRMIRYSATLFVQEKLLGLMSLPTKEQFEELKKKRKEEMERKRAVERQAALESQRRLEERQSGLASRAANGEVASLRRGPAPLRKAEGWLPLSGGQGQSEDSDPLLQQIHNITSFIRQAKAAGRMDEVRTLQENLRQLQDEYDQQQTEKAIELSRRQAEEEDLQREQLQMLRERELEREREQFRVASLHTRTRSLDFREIGPFQLEPSREPRTHLAYALDLGSSPVPSSTAPKTPSLSSTQPTRVWSGPPAVGQERLPQSSMPQQHEGPSLNPFDEEDLSSPMEEATTGPPAAGVSLDPSARILKEYNPFEEEDEEEEAVAGNPFIQPDSPAPNPFSEEDEHPQQRLSSPLVPGNPFEEPTCINPFEMDSDSGPEAEEPIEEELLLQQIDNIKAYIFDAKQCGRLDEVEVLTENLRELKHTLAKQKGGTD

SEQ ID NO: 4862 - protein, 208 aa, Homo sapiens
MASLDDPGEVREGFLCPLCLKDLQSFYQLHSHYEEEHSGEDRDVKGQIKSLVQKAKKAKDRLLKREGDDRAESGTQGYESFSYGGVDPYMWEPQELGAVRSHLSDFKKHRAARIDHYVVEVNKLIIRLEKLTAFDRTNTESAKIRAIEKSVVPWVNDQDVPFCPDCGNKFSIRNRRHHCRLCGSIMCKKCMELISLPLAKITTLHGES

SEQ ID NO: 4863 - protein, 850 aa, Homo sapiens
MAAAAPAAAAASSEAPAASATAEPEAGDQDSREVRVLQSLRGKICEAKNLLPYLGPHKMRDCFCTINLDQEEVYRTQVVEKSLSPFFSEEFYFEIPRTFQYLSFYVYDKNVLQRDLRIGKVAIKKEDLCNHSGKETWFSLQPVDSNSEVQGKVHLELKLNELITENGTVCQQLVVHIKACHGLPLINGQSCDPYATVSLVGPSRNDQKKTKVKKKTSNPQFNEIFYFEVTRSSSYTRKSQFQVEEEDIEKLEIRIDLWNNGNLVQDVFLGEIKVPVNVLRTDSSHQAWYLLQPRDNGNKSSKTDDLGSLRLNICYTEDYVLPSEYYGPLKTLLLKSPDVQPISASAAYILSEICRDKNDAVLPLVRLLLHHDKLVPFATAVAELDLKDTQDANTIFRGNSLATRCLDEMMKIVGGHYLKVTLKPILDEICDSSKSCEIDPIKLKEGDNVENNKENLRYYVDKLFNTIVKSSMSCPTVMCDIFYSLRQMATQRFPNDPHVQYSAVSSFVFLRFFAVAVVSPHTFHLRPHHPDAQTIRTLTLISKTIQTLGSWGSLSKSKSSFKETFMCEFFKMFQEEGYIIAVKKFLDEISSTETKESSGTSEPVHLKEGEMYKRAQGRTRIGKKNFKKRWFCLTSRELTYHKQPGSKDAIYTIPVKNILAVEKLEESSFNKKNMFQVIHTEKPLYVQANNCVEANEWIDVLCRVSRCNQNRLSFYHPSVYLNGNWLCCQETGENTLGCKPCTAGVPADIQIDIDEDRETERIYSLFTLSLLKLQKMEEACGTIAVYQGPQKEPDDYSNFVIEDSVTTFKTIQQIKSIIEKLDEPHEKYRKKRSSSAKYGSKENPIVGKAS

SEQ ID NO: 4864 - protein, 849 aa, Homo sapiens
MAAAAPAAAAASSEAPAASATAEPEAGDQDSREVRVLQSLRGKICEAKNLLPYLGPHKMRDCFCTINLDQEEVYRTQVVEKSLSPFFSEEFYFEIPRTFQYLSFYVYDKNVLQRDLRIGKVAIKKEDLCNHSGKETWFSLQPVDSNSEVQGKVHLELKLNELITENGTVCQQLVVHIKACHGLPLINGQSCDPYATVSLVGPSRNDQKKTKVKKKTSNPQFNEIFYFEVTRSSSYTRKSQFQVEEEDIEKLEIRIDLWNNGNLVQDVFLGEIKVPVNVLRTDSSHQAWYLLQPRDNGNKSSKTDDLGSLRLNICYTEDYVLPSEYYGPLKTLLLKSPDVQPISASAAYILSEICRDKNDAVLPLVRLLLHHDKLVPFATAVAELDLKDTQDANTIFRGNSLATRCLDEMMKIVGGHYLKVTLKPILDEICDSSKSCEIDPIKLKEGDNVENNKENLRYYVDKLFNTIVKSSMSCPTVMCDIFYSLRQMATQRFPNDPHVQYSAVSSFVFLRFFAVAVVSPHTFHLRPHHPDAQTIRTLTLISKTIQTLGSWGSLSKSKSSFKETFMCEFFKMFQEEGYIIAVKKFLDEISSTETKESSGTSEPVHLKEGEMYKRAQGRTRIGKKNFKKRWFCLTSRELTYHKQPGKDAIYTIPVKNILAVEKLEESSFNKKNMFQVIHTEKPLYVQANNCVEANEWIDVLCRVSRCNQNRLSFYHPSVYLNGNWLCCQETGENTLGCKPCTAGVPADIQIDIDEDRETERIYSLFTLSLLKLQKMEEACGTIAVYQGPQKEPDDYSNFVIEDSVTTFKTIQQIKSIIEKLDEPHEKYRKKRSSSAKYGSKENPIVGKAS

SEQ ID NO: 4865 - protein, 759 aa, Homo sapiens
MAGLTLFVGRLPPSARSEQLEELFSQVGPVKQCFVVTEKGSKACRGFGYVTFSMLEDVQRALKEITTFEGCKINVTVAKKKLRNKTKEKGKNENSECPKKEPKAKKAKVADKKARLIIRNLSFKCSEDDLKTVFAQFGAVLEVNIPRKPDGKMRGFGFVQFKNLLEAGKALKGMNMKEIKGRTVAVDWAVAKDKYKDTQSVSAIGEEKSHESKHQESVKKKGREEEDMEEEENDDDDDDDDEEDGVFDDEDEEEENIESKVTKPVQIQKRAVKRPAPAKSSDHSEEDSDLEESDSIDDGEELAQSDTSTEEQEDKAVQVSNKKKRKLPSDVNEGKTVFIRNLSFDSEEEELGELLQQFGELKYVRIVLHPDTEHSKGCAFAQFMTQEAAQKCLLAASPENEAGGLKLDGRQLKVDLAVTRDEAAKLQTTKVKKPTGTRNLYLAREGLIRAGTKAAEGVSAADMAKRERFELLKHQKLKDQNIFVSRTRLCLHNLPKAVDDKQLRKLLLSATSGEKGVRIKECRVMRDLKGVHGNMKGQSLGYAFAEFQEHEHALKALRLINNNPEIFGPLKRPIVEFSLEDRRKLKMKELRIQRSLQKMRSKPATGEPQKGQPEPAKDQQQKAAQHHTEEQSKVPPEQKRKAGSTSWTGFQTKAEVEQVELPDGKKRRKVLALPSHRGPKIRLRDKGKVKPVHPKKPKPQINQWKQEKQQLSSEQVSRKKAKGNKTETRFNQLVEQYKQKLLGPSKGAPLAKRSKWFDS

SEQ ID NO: 4866 - protein, 618 aa, Homo sapiens
MAGLTLFVGRLPPSARSEQLEELFSQVGPVKQCFVVTEKGRTVAVDWAVAKDKYKDTQSVSAIGEEKSHESKHQESVKKKGREEEDMEEEENDDDDDDDDEEDGVFDDEDEEEENIESKVTKPVQIQKRAVKRPAPAKSSDHSEEDSDLEESDSIDDGEELAQSDTSTEEQEDKAVQVSNKKKRKLPSDVNEGKTVFIRNLSFDSEEEELGELLQQFGELKYVRIVLHPDTEHSKGCAFAQFMTQEAAQKCLLAASPENEAGGLKLDGRQLKVDLAVTRDEAAKLQTTKVKKPTGTRNLYLAREGLIRAGTKAAEGVSAADMAKRERFELLKHQKLKDQNIFVSRTRLCLHNLPKAVDDKQLRKLLLSATSGEKGVRIKECRVMRDLKGVHGNMKGQSLGYAFAEFQEHEHALKALRLINNNPEIFGPLKRPIVEFSLEDRRKLKMKELRIQRSLQKMRSKPATGEPQKGQPEPAKDQQQKAAQHHTEEQSKVPPEQKRKAGSTSWTGFQTKAEVEQVELPDGKKRRKVLALPSHRGPKIRLRDKGKVKPVHPKKPKPQINQWKQEKQQLSSEQVSRKKAKGNKTETRFNQLVEQYKQKLLGPSKGAPLAKRSKWFDS

SEQ ID NO: 4867 - protein, 507 aa, Homo sapiens
MDPSEKKISVWICQEEKLVSGLSRRTTCSDVVRVLLEDGCRRRRRQRRSRRLGSAGDPHGPGELPEPPNEDDEDDDEALPQGMLCGPPQCYCIVEKWRGFERILPNKTRILRLWAAWGEEQENVRFVLVRSEASLPNAGPRSAEARVVLSRERPCPARGAPARPSLAMTQEKQRRVVRKAFRKLAKLNRRRQQQTPSSCSSTSSSTASSCSSSPRTHESASVERMETLVHLVLSQDHTIRQQVQRLHELDREIDHYEAKVHLDRMRRHGVNYVQDTYLVGAGIELDGSRPGEEPEEVAAEAEEAAAAPPLAGEAQAAALEELARRCDDLLRLQEQRVQQEELLERLSAEIQEELNQRWMRRRQEELAAREEPLEPDGGPDGELLLEQERVRTQLSTSLYIGLRLNTDLEAVKSDLDYSQQQWDSKKRELQGLLQTLHTLELTVAPDGAPGSGSPSREPGPQACADMWVDQARGLAKSGPGNDEDSDTGLSSMHSQDSDSLPMCESLV

SEQ ID NO: 4868 - protein, 198 aa, Homo sapiens
MPLFGWMKWPKNDSYKPTHYPGSDIVTKTLLRELKWHLKERERLIQEIENEQKVKKTGVDYNWLRNYQNPHTTIPVTEQRQLEVLCSQVQPCQTGTILSRFREVLAENDVLPWEIVYIFKQVLKDFLSSSDRGSEQEDLEDSGSMDCSAPSVIQGDSSKRADKDEIPTISSYVDKNTKDRFPVFSHRIWNLPYYHPSS

SEQ ID NO: 4869 - protein, 216 aa, Homo sapiens
MGTRDDEYDYLFKVVLIGDSGVGKSNLLSRFTRNEFNLESKSTIGVEFATRSIQVDGKTIKAQIWDTAGQERYRAITSAYYRGAVGALLVYDIAKHLTYENVERWLKELRDHADSNIVIMLVGNKSDLRHLRAVPTDEARAFAEKNGLSFIETSALDSTNVEAAFQTILTEIYRIVSQKQMSDRRENDMSPSNNVVPIHVPPTTENKPKVQCCQNI

SEQ ID NO: 4870 - protein, 155 aa, Homo sapiens
MGTRDDEYDYLFKVVLIGDSGVGKSNLLSRFTRNEFNLESKSTIGVEFATRSIQVDGKTIKAQIWDTAGQERYRAITSAYYRGAVGALLVYDIAKHLTYENVERWLKELRDHADSNIVIMLVGNKSDLRHLRAVPTDEARAFAEKNEANVRQTRK

SEQ ID NO: 4871 - protein, 195 aa, Homo sapiens
MSLISWLRWNEAPSRLSTRSPAEMVLETLMMELTGQMREAERQQRERSNAVRKVCTGVDYSWLASTPRSTYDLSPIERLQLEDVCVKIHPSYCGPAILRFRQLLAEQEPEVQEVSQLFRSVLQEVLERMKQEEEAHKLTRQWSLRPRGSLATFKTRARISPFASDIRTISEDVERDTPPPLRSWSMPEFRAPKAD

SEQ ID NO: 4872 - protein, 425 aa, Homo sapiens
MADKEAAFDDAVEERVINEEYKIWKKNTPFLYDLVMTHALEWPSLTAQWLPDVTRPEGKDFSIHRLVLGTHTSDEQNHLVIASVQLPNDDAQFDASHYDSEKGEFGGFGSVSGKIEIEIKINHEGEVNRARYMPQNPCIIATKTPSSDVLVFDYTKHPSKPDPSGECNPDLRLRGHQKEGYGLSWNPNLSGHLLSASDDHTICLWDISAVPKEGKVVDAKTIFTGHTAVVEDVSWHLLHESLFGSVADDQKLMIWDTRSNNTSKPSHSVDAHTAEVNCLSFNPYSEFILATGSADKTVALWDLRNLKLKLHSFESHKDEIFQVQWSPHNETILASSGTDRRLNVWDLSKIGEEQSPEDAEDGPPELLFIHGGHTAKISDFSWNPNEPWVICSVSEDNIMQVWQMAENIYNDEDPEGSVDPEGQGS

SEQ ID NO: 4873 - protein, 424 aa, Homo sapiens
MADKEAFDDAVEERVINEEYKIWKKNTPFLYDLVMTHALEWPSLTAQWLPDVTRPEGKDFSIHRLVLGTHTSDEQNHLVIASVQLPNDDAQFDASHYDSEKGEFGGFGSVSGKIEIEIKINHEGEVNRARYMPQNPCIIATKTPSSDVLVFDYTKHPSKPDPSGECNPDLRLRGHQKEGYGLSWNPNLSGHLLSASDDHTICLWDISAVPKEGKVVDAKTIFTGHTAVVEDVSWHLLHESLFGSVADDQKLMIWDTRSNNTSKPSHSVDAHTAEVNCLSFNPYSEFILATGSADKTVALWDLRNLKLKLHSFESHKDEIFQVQWSPHNETILASSGTDRRLNVWDLSKIGEEQSPEDAEDGPPELLFIHGGHTAKISDFSWNPNEPWVICSVSEDNIMQVWQMAENIYNDEDPEGSVDPEGQGS

SEQ ID NO: 4874 - protein, 410 aa, Homo sapiens
MADKEAAFDDAVEERVINEEYKIWKKNTPFLYDLVMTHALEWPSLTAQWLPDVTRPEGKDFSIHRLVLGTHTSDEQNHLVIASVQLPNDDAQFDASHYDSEKGEFGGFGSVSGKIEIEIKINHEGEVNRARYMPQNPCIIATKTPSSDVLVFDYTKHPSKPDPSGECNPDLRLRGHQKEGYGLSWNPNLSGHLLSASDDHTICLWDISAVPKEGKVVDAKTIFTGHTAVVEDVSWHLLHESLFGSVADDQKLMIWDTRSNNTSKPSHSVDAHTAEVNCLSFNPYSEFILATGSADKTVALWDLRNLKLKLHSFESHKDEIFQVQWSPHNETILASSGTDRRLNVWDLSKIGEEQSPEDAEDGPPELLFIHGGHTAKISDFSWNPNEPWVICSVSEDNIMQVWQMELVLDH

SEQ ID NO: 4875 - protein, 390 aa, Homo sapiens
MTHALEWPSLTAQWLPDVTRPEGKDFSIHRLVLGTHTSDEQNHLVIASVQLPNDDAQFDASHYDSEKGEFGGFGSVSGKIEIEIKINHEGEVNRARYMPQNPCIIATKTPSSDVLVFDYTKHPSKPDPSGECNPDLRLRGHQKEGYGLSWNPNLSGHLLSASDDHTICLWDISAVPKEGKVVDAKTIFTGHTAVVEDVSWHLLHESLFGSVADDQKLMIWDTRSNNTSKPSHSVDAHTAEVNCLSFNPYSEFILATGSADKTVALWDLRNLKLKLHSFESHKDEIFQVQWSPHNETILASSGTDRRLNVWDLSKIGEEQSPEDAEDGPPELLFIHGGHTAKISDFSWNPNEPWVICSVSEDNIMQVWQMAENIYNDEDPEGSVDPEGQGS

SEQ ID NO: 4876 - protein, 729 aa, Homo sapiens
MFSALKKLVGSDQAPGRDKNIPAGLQSMNQALQRRFAKGVQYNMKIVIRGDRNTGKTALWHRLQGRPFVEEYIPTQEIQVTSIHWSYKTTDDIVKVEVWDVVDKGKCKKRGDGLKMENDPQEAESEMALDAEFLDVYKNCNGVVMMFDITKQWTFNYILRELPKVPTHVPVCVLGNYRDMGEHRVILPDDVRDFIDNLDRPPGSSYFRYAESSMKNSFGLKYLHKFFNIPFLQLQRETLLRQLETNQLDMDATLEELSVQQETEDQNYGIFLEMMEARSRGHASPLAANGQSPSPGSQSPVVPAGAVSTGSSSPGTPQPAPQLPLNAAPPSSVPPVPPSEALPPPACPSAPAPRRSIISRLFGTSPATEAAPPPPEPVPAAEGPATVQSVEDFVPDDRLDRSFLEDTTPARDEKKVGAKAAQQDSDSDGEALGGNPMVAGFQDDVDLEDQPRGSPPLPAGPVPSQDITLSSEEEAEVAAPTKGPAPAPQQCSEPETKWSSIPASKPRRGTAPTRTAAPPWPGGVSVRTGPEKRSSTRPPAEMEPGKGEQASSSESDPEGPIAAQMLSFVMDDPDFESEGSDTQRRADDFPVRDDPSDVTDEDEGPAEPPPPPKLPLPAFRLKNDSDLFGLGLEEAGPKESSEEGKEGKTPSKEKKKKKKKGKEEEEKAAKKKSKHKKSKDKEEGKEERRRRQQRPPRSRERTAADELEAFLGGGAPGGRHPGGGDYEEL

SEQ ID NO: 4877 - protein, 730 aa, Homo sapiens
MFSALKKLVGSDQAPGRDKNIPAGLQSMNQALQRRFAKGVQYNMKIVIRGDRNTGKTALWHRLQGRPFVEEYIPTQEIQVTSIHWSYKTTDDIVKVEVWDVVDKGKCKKRGDGLKMENDPQEAESEMALDAEFLDVYKNCNGVVMMFDITKQWTFNYILRELPKVPTHVPVCVLGNYRDMGEHRVILPDDVRDFIDNLDSRPPGSSYFRYAESSMKNSFGLKYLHKFFNIPFLQLQRETLLRQLETNQLDMDATLEELSVQQETEDQNYGIFLEMMEARSRGHASPLAANGQSPSPGSQSPVVPAGAVSTGSSSPGTPQPAPQLPLNAAPPSSVPPVPPSEALPPPACPSAPAPRRSIISRLFGTSPATEAAPPPPEPVPAAEGPATVQSVEDFVPDDRLDRSFLEDTTPARDEKKVGAKAAQQDSDSDGEALGGNPMVAGFQDDVDLEDQPRGSPPLPAGPVPSQDITLSSEEEAEVAAPTKGPAPAPQQCSEPETKWSSIPASKPRRGTAPTRTAAPPWPGGVSVRTGPEKRSSTRPPAEMEPGKGEQASSSESDPEGPIAAQMLSFVMDDPDFESEGSDTQRRADDFPVRDDPSDVTDEDEGPAEPPPPPKLPLPAFRLKNDSDLFGLGLEEAGPKESSEEGKEGKTPSKEKKKKKKKGKEEEEKAAKKKSKHKKSKDKEEGKEERRRRQQRPPRSRERTAADELEAFLGGGAPGGRHPGGGDYEEL

SEQ ID NO: 4878 - protein, 520 aa, Homo sapiens
MFSALKKLVGSDQAPGRDKNIPAGLQSMNQALQRRFAKGVQYNMKIVIRGDRNTGKTALWHRLQGRPFVEEYIPTQEIQVTSIHWSYKTTDDIVKVEVWDVVDKGKCKKRGDGLKMENDPQEAESEMALDAEFLDVYKNCNGVVMMFDITKQWTFNYILRELPKVPTHVPVCVLGNYRDMGEHRVILPDDVRDFIDNLDRPPGSSYFRYAESSMKNSFGLKYLHKFFNIPFLQLQRETLLRQLETNQLDMDATLEELSVQQETEDQNYGIFLEMMEARSRGHASPLAANGQSPSPGSQSPVVPAGAVSTGSSSPGTPQPAPQLPLNAAPPSSVPPVPPSEALPPPACPSAPAPRRSIISRPPPWGWRLRGALGRRGQWPPWGGGRACHCLGRHLPLYHRLCRCPVAAVCASELEEAGHWWSPGWALQVLGLQAQCEPALQEGRGQLASARLGGHPGPLGAEPPVFLRDVTEAQEGPVRVCLQRLGRGRLAVGCALPRHLLALRAHLGPQHAYGSASGREP

SEQ ID NO: 4879 - protein, 257 aa, Homo sapiens
MFSALKKLVGSDQAPGRDKNIPAGLQSMNQALQRRFAKGVQYNMKIVIRGDRNTGKTALWHRLQGRPFVEEYIPTQEIQVTSIHWSYKTTDDIVKVEVWDVVDKGKCKKRGDGLKMENDPQEAESEMALDAEFLDVYKNCNGVVMMFDITKQWTFNYILRELPKVPTHVPVCVLGNYRDMGEHRVILPDDVRDFIDNLDRPPGSSYFRYAESSMKNSFGLKYLHKFFNIPFLQLQVSTHHVGWSGCWSLTSFQVSPV

SEQ ID NO: 4880 - protein, 258 aa, Homo sapiens
MFSALKKLVGSDQAPGRDKNIPAGLQSMNQALQRRFAKGVQYNMKIVIRGDRNTGKTALWHRLQGRPFVEEYIPTQEIQVTSIHWSYKTTDDIVKVEVWDVVDKGKCKKRGDGLKMENDPQEAESEMALDAEFLDVYKNCNGVVMMFDITKQWTFNYILRELPKVPTHVPVCVLGNYRDMGEHRVILPDDVRDFIDNLDSRPPGSSYFRYAESSMKNSFGLKYLHKFFNIPFLQLQVSTHHVGWSGCWSLTSFQVSPV

SEQ ID NO: 4881 - protein, 314 aa, Homo sapiens
MFSALKKLVGSDQAPGRDKNIPAGLQSMNQALQRRFAKGVQYNMKIVIRGDRNTGKTALWHRLQGRPFVEEYIPTQEIQVTSIHWSYKTTDDIVKVEVWDVVDKGKCKKRGDGLKMENDPQEAESEMALDAEFLDVYKNCNGVVMMFDITKQWTFNYILRELPKVPTHVPVCVLGNYRDMGEHRVILPDDVRDFIDNLDRPPGSSYFRYAESSMKNSFGLKYLHKFFNIPFLQLQKDVRLAQERGCAVVLVSEEVRMPAGWDCCWGRLGWKEGGSQTCPVPALLGRPLLPAEPSPHHWVDYSLESSPLLSCSIP

SEQ ID NO: 4882 - protein, 1191 aa, Homo sapiens
MPVQAAQWTEFLSCPICYNEFDENVHKPISLGCSHTVCKTCLNKLHRKACPFDQTAINTDIDVLPVNFALLQLVGAQVPDHQSIKLSNLGENKHYEVAKKCVEDLALYLKPLSGGKGVASLNQSALSRPMQRKLVTLVNCQLVEEEGRVRAMRAARSLGERTVTELILQHQNPQQLSANLWAAVRARGCQFLGPAMQEEALKLVLLALEDGSALSRKVLVLFVVQRLEPRFPQASKTSIGHVVQLLYRASCFKVTKRDEDSSLMQLKEEFRSYEALRREHDAQIVHIAMEAGLRISPEQWSSLLYGDLAHKSHMQSIIDKLQSPESFAKSVQELTIVLQRTGDPANLNRLRPHLELLANIDPNPDAVSPTWEQLENAMVAVKTVVHGLVDFIQNYSRKGHETPQPQPNSKYKTSMCRDLRQQGGCPRGTNCTFAHSQEELEKYRLRNKKINATVRTFPLLNKVGVNNTVTTTAGNVISVIGSTETTGKIVPSTNGISNAENSVSQLISRSTDSTLRALETVKKVGKVGANGQNAAGPSADSVTENKIGSPPKTPVSNVAATSAGPSNVGTELNSVPQKSSPFLTRVPVYPPHSENIQYFQDPRTQIPFEVPQYPQTGYYPPPPTVPAGVAPCVPRFVRSNNVPESSLPPASMPYADHYSTFSPRDRMNSSPYQPPPPQPYGPVPPVPSGMYAPVYDSRRIWRPPMYQRDDIIRSNSLPPMDVMHSSVYQTSLRERYNSLDGYYSVACQPPSEPRTTVPLPREPCGHLKTSCEEQIRRKPDQWAQYHTQKAPLVSSTLPVATQSPTPPSPLFSVDFRADFSESVSGTKFEEDHLSHYSPWSCGTIGSCINAIDSEPKDVIANSNAVLMDLDSGDVKRRVHLFETQRRTKEEDPIIPFSDGPIISKWGAISRSSRTGYHTTDPVQATASQGSATKPISVSDYVPYVNAVDSRWSSYGNEATSSAHYVERDRFIVTDLSGHRKHSSTGDLLSLELQQAKSNSLLLQREANALAMQQKWNSLDEGRHLTLNLLSKEIELRNGELQSDYTEDATDTKPDRDIELELSALDTDEPDGQSEPIEEILDIQLGISSQNDQLLNGMAVENGHPVQQHQKEPPKQKKQSLGEDHVILEEQKTILPVTSCFSQPLPVSISNASCLPITTSVSAGNLILKTHVMSEDKNDFLKPVANGKMVNS

SEQ ID NO: 4883 - protein, 478 aa, Homo sapiens
MPVQAAQWTEFLSCPICYNEFDENVHKPISLGCSHTVCKTCLNKLHRKACPFDQTAINTDIDVLPVNFALLQLVGAQVPDHQSIKLSNLGENKHYEVAKKCVEDLALYLKPLSGGKGVASLNQSALSRPMQRKLVTLVNCQLVEEEGRVRAMRAARSLGERTVTELILQHQNPQQLSANLWAAVRARGCQFLGPAMQEEALKLVLLALEDGSALSRKVLVLFVVQRLEPRFPQASKTSIGHVVQLLYRASCFKVTKRDEDSSLMQLKEEFRSYEALRREHDAQIVHIAMEAGLRISPEQWSSLLYGDLAHKSHMQSIIDKLQSPESFAKSVQELTIVLQRTGDPANLNRLRPHLELLANIDPNPDAVSPTWEQLENAMVAVKTVVHGLVDFIQNYSRKGHETPQPQPNSKYKTSMCRDLRQQGGCPRGTNCTFAHSQEELEKYRLRNKKINATEVLKQQGKLFQVQTEFQMQKTVFPS

SEQ ID NO: 4884 - protein, 506 aa, Homo sapiens
MPVQAAQWTEFLSCPICYNEFDENVHKPISLGCSHTVCKTCLNKLHRKACPFDQTAINTDIDVLPVNFALLQLVGAQVPDHQSIKLSNLGENKHYEVAKKCVEDLALYLKPLSGGKGVASLNQSALSRPMQRKLVTLVNCQLVEEEGRVRAMRAARSLGERTVTELILQHQNPQQLSANLWAAVRARGCQFLGPAMQEEALKLVLLALEDGSALSRKVLVLFVVQRLEPRFPQASKTSIGHVVQLLYRASCFKVTKRDEDSSLMQLKEEFRSYEALRREHDAQIVHIAMEAGLRISPEQWSSLLYGDLAHKSHMQSIIDKLQSPESFAKSVQELTIVLQRTGDPANLNRLRPHLELLANIDPNPDAVSPTWEQLENAMVAVKTVVHGLVDFIQNYSRKGHETPQPQPNSKYKTSMCRDLRQQGGCPRGTNCTFAHSQEELEKCNPRGLYLHCCLLSSVASLGTVHNELYKQQHCDREKISVCAVKRAETCFSSQFFSPLEEPREED

SEQ ID NO: 4885 - protein, 1064 aa, Homo sapiens
MPVQAAQWTEFLSCPICYNEFDENVHKPISLGCSHTVCKTCLNKLHRKACPFDQTAINTDIDVLPVNFALLQLVGAQVPDHQSIKLSNLGENKHYEVAKKCVEDLALYLKPLSGGKGVASLNQSALSRPMQRKLVTLVNCQLVEEEGRVRAMRAARSLGERTVTELILQHQNPQQLSANLWAAVRARGCQFLGPAMQEEALKLVLLALEDGSALSRKVLVLFVVQRLEPRFPQASKTSIGHVVQLLYRASCFKVTKRDEDSSLMQLKEEFRSYEALRREHDAQIVHIAMEAGLRISPEQWSSLLYGDLAHKSHMQSIIDKLQSPESFAKSVQELTIVLQRTGDPANLNRLRPHLELLANIDPNPDAVSPTWEQLENAMVAVKTVVHGLVDFIQNYSRKGHETPQPQPNSKYKTSMCRDLRQQGGCPRGTNCTFAHSQEELEKYRLRNKKINATVRTFPLLNKVGVNNTVTTTAGNVISVIGSTETTGKIVPSTNGISNAENSVSQLISRSTDSTLRALETVKKVGKVGANGQNAAGPSADSVTENKIGSPPKTPVSNVAATSAGPSNVGTELNSVPQKSSPFLTRVPVYPPHSENIQYFQDPRTQIPFEVPQYPQTGYYPPPPTVPAGVAPCVPRFVRSNNVPESSLPPASMPYADHYSTFSPRDRMNSSPYQPPPPQPYGPVPPVPSGMYAPVYDSRRIWRPPMYQRDDIIRSNSLPPMDVMHSSVYQTSLRERYNSLDGYYSVACQPPSEPRTTVPLPREPCGHLKTSCEEQIRRKPDQWAQYHTQKAPLVSSTLPVATQSPTPPSPLFSVDFRADFSESVSGTKFEEDHLSHYSPWSCGTIGSCINAIDSEPKDVIANSNAVLMDLDSGDVKRRVHLFETQRRTKEEDPIIPFSDGPIISKWGAISRSSRTGYHTTDPVQATASQGSATKPISVSDYVPYVNAVDSRWSSYGNEATSSAHYVERDRFIVTDLSGHRKHSSTGDLLSLELQQAKSNSLLLQREANALAMQQKWNSLDEGRHLTLNLLSKEIELRNGEVKKLNLSASCLMYLFSAAASWLYHY

SEQ ID NO: 4886 - protein, 218 aa, Homo sapiens
MPVQAAQWTEFLSCPICYNEFDENVHKPISLGCSHTVCKTCLNKLHRKACPFDQTAINTDIDVLPVNFALLQLVGAQVPDHQSIKLSNLGENKHYEVAKKCVEDLALYLKPLSGGKGVASLNQSALSRPMQRKLVTLVNCQLVEEEGRVRAMRAARSLGERTVTELILQHQNPQQLSANLWAAVRARGCQFLGPGKIGYYLTFFISYWGLRMPISGAR

SEQ ID NO: 4887 - protein, 869 aa, Homo sapiens
MQEEALKLVLLALEDGSALSRKVLVLFVVQRLEPRFPQASKTSIGHVVQLLYRASCFKVTKRDEDSSLMQLKEEFRSYEALRREHDAQIVHIAMEAGLRISPEQWSSLLYGDLAHKSHMQSIIDKLQSPESFAKSVQELTIVLQRTGDPANLNRLRPHLELLANIDPNPDAVSPTWEQLENAMVAVKTVVHGLVDFIQNYSRKGHETPQPQPNSKYKTSMCRDLRQQGGCPRGTNCTFAHSQEELEKYRLRNKKINATVRTFPLLNKVGVNNTVTTTAGNVISVIGSTETTGKIVPSTNGISNAENSVSQLISRSTDSTLRALETVKKVGKVGANGQNAAGPSADSVTENKIGSPPKTPVSNVAATSAGPSNVGTELNSVPQKSSPFLTRVPVYPPHSENIQYFQDPRTQIPFEVPQYPQTGYYPPPPTVPAGVAPCVPRFVRSNNVPESSLPPASMPYADHYSTFSPRDRMNSSPYQPPPPQPYGPVPPVPSGMYAPVYDSRRIWRPPMYQRDDIIRSNSLPPMDVMHSSVYQTSLRERYNSLDGYYSVACQPPSEPRTTVPLPREPCGHLKTSCEEQIRRKPDQWAQYHTQKAPLVSSTLPVATQSPTPPSPLFSVDFRADFSESVSGTKFEEDHLSHYSPWSCGTIGSCINAIDSEPKDVIANSNAVLMDLDSGDVKRRVHLFETQRRTKEEDPIIPFSDGPIISKWGAISRSSRTGYHTTDPVQATASQGSATKPISVSDYVPYVNAVDSRWSSYGNEATSSAHYVERDRFIVTDLSGHRKHSSTGDLLSLELQQAKSNSLLLQREANALAMQQKWNSLDEGRHLTLNLLSKEIELRNGEVKKLNLSASCLMYLFSAAASWLYHY

SEQ ID NO: 4888 - protein, 201 aa, Homo sapiens
MNPEYDYLFKLLLIGDSGVGKSCLLLRFADDTYTESYISTIGVDFKIRTIELDGKTIKLQIWDTAGQERFRTITSSYYRGAHGIIVVYDVTDQESYANVKQWLQEIDRYASENVNKLLVGNKSDLTTKKVVDNTTAKEFADSLGIPFLETSAKNATNVEQAFMTMAAEIKKRMGPGAASGGERPNLKIDSTPVKPAGGGCC

SEQ ID NO: 4889 - protein, 213 aa, Homo sapiens
MAETYDFLFKFLVIGSAGTGKSCLLHQFIENKFKQDSNHTIGVEFGSRVVNVGGKTVKLQIWDTAGQERFRSVTRSYYRGAAGALLVYDITSRETYNSLAAWLTDARTLASPNIVVILCGNKKDLDPEREVTFLEASRFAQENELMFLETSALTGENVEEAFLKCARTILNKIDSGELDPERMGSGIQYGDASLRQLRQPRSAQAVAPQPCGC

SEQ ID NO: 4890 - protein, 248 aa, Homo sapiens
MSVSLPLTVMVRERDWIGIHLFSLYLSLPVGIPDFGSIWSDFLFKFLVIGSAGTGKSCLLHQFIENKFKQDSNHTIGVEFGSRVVNVGGKTVKLQIWDTAGQERFRSVTRSYYRGAAGALLVYDITSRETYNSLAAWLTDARTLASPNIVVILCGNKKDLDPEREVTFLEASRFAQENELMFLETSALTGENVEEAFLKCARTILNKIDSGELDPERMGSGIQYGDASLRQLRQPRSAQAVAPQPCGC

SEQ ID NO: 4891 - protein, 364 aa, Homo sapiens
MAASGPGCRSWCLCPEVPSATFFTALLSLLVSGPRLFLLQQPLAPSGLTLKSEALRNWQVYRLVTYIFVYENPISLLCGAIIIWRFAGNFERTVGTVRHCFFTVIFAIFSAIIFLSFEAVSSLSKLGEVEDARGFTPVAFAMLGVTTVRSRMRRALVFGMVVPSVLVPWLLLGASWLIPQTSFLSNVCGLSIGLAYGLTYCYSIDLSERVALKLDQTFPFSLMRRISVFKYVSGSSAERRAAQSRKLNPVPGSYPTQSCHPHLSPSHPVSQTQHASGQKLASWPSCTPGHMPTLPPYQPASGLCYVQNHFGPNPTSSSVYPASAGTSLGIQPPTPVNSPGTVYSGALGTPGAAGSKESSRVPMP

SEQ ID NO: 4892 - protein, 409 aa, Homo sapiens
MGRGLWEAWPPAGSSAVAKGNCREEAEGAEDRQPASRRGAGTTAAMAASGPGCRSWCLCPEVPSATFFTALLSLLVSGPRLFLLQQPLAPSGLTLKSEALRNWQVYRLVTYIFVYENPISLLCGAIIIWRFAGNFERTVGTVRHCFFTVIFAIFSAIIFLSFEAVSSLSKLGEVEDARGFTPVAFAMLGVTTVRSRMRRALVFGMVVPSVLVPWLLLGASWLIPQTSFLSNVCGLSIGLAYGLTYCYSIDLSERVALKLDQTFPFSLMRRISVFKYVSGSSAERRAAQSRKLNPVPGSYPTQSCHPHLSPSHPVSQTQHASGQKLASWPSCTPGHMPTLPPYQPASGLCYVQNHFGPNPTSSSVYPASAGTSLGIQPPTPVNSPGTVYSGALGTPGAAGSKESSRVPMP

SEQ ID NO: 4893 - protein, 223 aa, Homo sapiens
MLGVTTVRSRMRRALVFGMVVPSVLVPWLLLGASWLIPQTSFLSNVCGLSIGLAYGLTYCYSIDLSERVALKLDQTFPFSLMRRISVFKYVSGSSAERRAAQSRKLNPVPGSYPTQSCHPHLSPSHPVSQTQHASGQKLASWPSCTPGHMPTLPPYQPASGLCYVQNHFGPNPTSSSVYPASAGTSLGIQPPTPVNSPGTVYSGALGTPGAAGSKESSRVPMP

SEQ ID NO: 4894 - protein, 142 aa, Homo sapiens
MARYMLLLLLAVWVLTGELWPGAEARAAPYGVRLCGREFIRAVIFTCGGSRWRRSDILAHEAMGDTFPDADADEDSLAGELDEAMGSSEWLALTKSPQAFYRGRPSWQGTPGVLRGSRDVLAGLSSSCCKWGCSKSEISSLC

SEQ ID NO: 4895 - protein, 196 aa, Homo sapiens
MAAIRKKLVVVGDGACGKTCLLIVFSKDEFPEVYVPTVFENYVADIEVDGKQVELALWDTAGQEDYDRLRPLSYPDTDVILMCFSVDSPDSLENIPEKWVPEVKHFCPNVPIILVANKKDLRSDEHVRTELARMKQEPVRTDDGRAMAVRIQAYDYLECSAKTKEGVREVFETATRAALQKRYGSQNGCINCCKVL

SEQ ID NO: 4896 - protein, 2472 aa, Homo sapiens
MTARGQSPLAPLLETLEDPSASHGGQTDAYLTLTSRMTGEEGKEVITEIEKKLPRLYKVLKTHISSQNSELSSAALQALGFCLYNPKITSELSEANALELLSKLNDTIKNSDKNVRTRALWVISKQTFPSEVVGKMVSSIIDSLEILFNKGETHSAVVDFEALNVIVRLIEQAPIQMGEEAVRWAKLVIPLVVHSAQKVHLRGATALEMGMPLLLQKQQEIASITEQLMTTKLISELQKLFMSKNETYVLKLWPLFVKLLGRTLHRSGSFINSLLQLEELGFRSGAPMIKKIAFIAWKSLIDNFALNPDILCSAKRLKLLMQPLSSIHVRTETLALTKLEVWWYLLMRLGPHLPANFEQVCVPLIQSTISIDSNASPQGNSCHVATSPGLNPMTPVHKGASSPYGAPGTPRMNLSSNLGGMATIPSIQLLGLEMLLHFLLGPEALSFAKQNKLVLSLEPLEHPLISSPSFFSKHANTLITAVHDSFVAVGKDAPDVVVSAIWKELISLVKSVTESGNKKEKPGSEVLTLLLKSLESIVKSEVFPVSKTLVLMEITIKGLPQKVLGSPAYQVANMDILNGTPALFLIQLIFNNFLECGVSDERFFLSLESLVGCVLSGPTSPLAFSDSVLNVINQNAKQLENKEHLWKMWSVIVTPLTELINQTNEVNQGDALEHNFSAIYGALTLPVNHIFSEQRFPVATMKTLLRTWSELYRAFARCAALVATAEENLCCEELSSKIMSSLEDEGFSNLLFVDRIIYIITVMVDCIDFSPYNIKYQPKVKSPQRPSDWSKKKNEPLGKLTSLFKLIVKVIYSFHTLSFKEAHSDTLFTIGNSITGIISSVLGHISLPSMIRKIFATLTRPLALFYENSKLDEVPKVYSCLNNKLEKLLGEIIACLQFSYTGTYDSELLEQLSPLLCIIFLHKNKQIRKQSAQFWNATFAKVMMLVYPEELKPVLTQAKQKFLLLLPGLETVEMMEESSGPYSDGTENSQLNVKISGMERKSNGKRDSFLAQTKNKKENMKPAAKLKLESSSLKVKGEILLEEEKSTDFVFIPPEGKDAKERILTDHQKEVLKTKRCDIPAMYNNLDVSQDTLFTQYSQEEPMEIPTLTRKPKEDSKMMITEEQMDSDIVIPQDVTEDCGMAEHLEKSSLSNNECGSLDKTSPEMSNSNNDERKKALISSRKTSTECASSTENSFVVSSSSVSNTTVAGTPPYPTSRRQTFITLEKFDGSENRPFSPSPLNNISSTVTVKNNQETMIKTDFLPKAKQREGTFSKSDSEKIVNGTKRSSRRAGKAEQTGNKRSKPLMRSEPEKNTEESVEGIVVLENNPPGLLNQTECVSDNQVHLSESTMEHDNTKLKAATVENAVLLETNTVEEKNVEINLESKENTPPVVISADQMVNEDSQVQITPNQKTLRRSSRRRSEVVESTTESQDKENSHQKKERRKEEEKPLQKSPLHIKDDVLPKQKLIAEQTLQENLIEKGSNLHEKTLGETSANAETEQNKKKADPENIKSEGDGTQDIVDKSSEKLVRGRTRYQTRRASQGLLSSIENSESDSSEAKEEGSRKKRSGKWKNKSNESVDIQDQEEKVVKQECIKAENQSHDYKATSEEDVSIKSPICEKQDESNTVICQDSTVTSDLLQVPDDLPNVCEEKNETSKYAEYSFTSLPVPESNLRTRNAIKRLHKRDSFDNCSLGESSKIGISDISSLSEKTFQTLECQHKRSRRVRRSKGCDCCGEKSQPQEKSLIGLKNTENNDVEISETKKADVQAPVSPSETSQANPYSEGQFLDEHHSVNFHLGLKEDNDTINDSLIVSETKSKENTMQESLPSGIVNFREEICDMDSSEAMSLESQESPNENFKTVGPCLGDSKNVSQESLETKEEKPEETPKMELSLENVTVEGNACKVTESNLEKAKTMELNVGNEASFHGQERTKTGISEEAAIEENKRNDDSEADTAKLNAKEVATEEFNSDISLSDNTTPVKLNAQTEISEQTAAGELDGGNDVSDLHSSEETNTKMKNNEEMMIGEAMAETGHDGETENEGITTKTSKPDEAETNMLTAEMDNFVCDTVEMSTEEGIIDANKTETNTEYSKSEEKLDNNQMVMESDILQEDHHTSQKVEEPSQCLASGTAISELIIEDNNASPQKLRELDPSLVSANDSPSGMQTRCVWSPLASPSTSILKRGLKRSQEDEISSPVNKVRRVSFADPIYQAGLADDIDRRCSIVRSHSSNSSPIGKSVKTSPTTQSKHNTTSAKGFLSPGSRSPKFKSSKKCLISEMAKESIPCPTESVYPPLVNCVAPVDIILPQITSNMWARGLGQLIRAKNIKTIGDLSTLTASEIKTLPIRSPKVSNVKKALRIYHEQQVKTRGLEEIPVFDISEKTVNGIENKSLSPDEERLVSDIIDPVALEIPLSKNLLAQISALALQLDSEDLHNYSGSQLFEMHEKLSCMANSVIKNLQSRWRSPSHENSI

SEQ ID NO: 4897 - protein, 2446 aa, Homo sapiens
MTARGQSPLAPLLETLEDPSASHGGQTDAYLTLTSRMTGEEGKEVITEIEKKLPRLYKVLKTHISSQNSELSSAALQALGFCLYNPKITSELSEANALELLSKLNDTIKNSDKNVRTRALWVISKQTFPSEVVGKMVSSIIDSLEILFNKGETHSAVVDFEALNVIVRLIEQAPIQMGEEAVRWAKLVIPLVVHSAQKVHLRGATALEMGMPLLLQKQQEIASITEQLMTTKLISELQKLFMSKNETYVLKLWPLFVKLLGRTLHRSGSFINSLLQLEELGFRSGAPMIKKIAFIAWKSLIDNFALNPDILCSAKRLKLLMQPLSSIHVRTETLALTKLEVWWYLLMRLGPHLPANFEQVCVPLIQSTISIDSNASPQGNSCHVATSPGLNPMTPVHKGASSPYGAPGTPRMNLSSNLGGMATIPSIQLLGLEMLLHFLLGPEALSFAKQNKLVLSLEPLEHPLISSPSFFSKHANTLITAVHDSFVAVGKDAPDVVVSAIWKELISLVKSVTESGNKKEKPGSEVLTLLLKSLESIVKSEVFPVSKTLVLMEITIKGLPQKVLGSPAYQVANMDILNGTPALFLIQLIFNNFLECGVSDERFFLSLESLVGCVLSGPTSPLAFSDSVLNVINQNAKQLENKEHLWKMWSVIVTPLTELINQTNEVNQGDALEHNFSAIYGALTLPVNHIFSEQRFPVATMKTLLRTWSELYRAFARCAALVATAEENLCCEELSSKIMSSLEDEGFSNLLFVDRIIYIITVMVDCIDFSPYNIKYQPKVKSPQRPSDWSKKKNEPLGKLTSLFKLIVKVIYSFHTLSFKEAHSDTLFTIGNSITGIISSVLGHISLPSMIRKIFATLTRPLALFYENSKLDEVPKVYSCLNNKLEKLLGEIIACLQFSYTGTYDSELLEQLSPLLCIIFLHKNKQIRKQSAQFWNATFAKVMMLVYPEELKPVLTQAKQKFLLLLPGLETVEMMEESSGPYSDGTENSQLNVKISGMERKSNGKRDSFLAQTKNKKENMKPAAKLKLESSSLKVKGEILLEEEKSTDFVFIPPEGKDAKERILTDHQKEVLKTKRCDIPAMYNNLDVSQDTLFTQYSQEEPMEIPTLTRKPKEDSKMMITEEQMDSDIVIPQDVTEDCGMAEHLEKSSLSNNECGSLDKTSPEMSNSNNDERKKALISSRKTSTECASSTENSFVVSSSSVSNTTVAGTPPYPTSRRQTFITLEKFDGSENRPFSPSPLNNISSTVTVKNNQETMIKTDFLPKAKQREGTFSKSDSEKIVNGTKRSSRRAGKAEQTGNKRSKPLMRSEPEKNTEESVEGIVVLENNPPGLLNQTECVSDNQVHLSESTMEHDNTKLKAATVENAVLLETNTVEEKNVEINLESKENTPPVVISADQMVNEDSQVQITPNQKTLRRSSRRRSEVVESTTESQDKENSHQKKERRKEEEKPLQKSPLHIKDDVLPKQKLIAEQTLQENLIEKGSNLHEKTLGETSANAETEQNKKKADPENIKSEGDGTQDIVDKSSEKLVRGRTRYQTRRASQGLLSSIENSESDSSEAKEEGSRKKRSGKWKNKSNESVDIQDQEEKVVKQECIKAENQSHDYKATSEEDVSIKSPICEKQDESNTVICQDSTVTSDLLQVPDDLPNVCEEKNETSKYAEYSFTSLPVPESNLRTRNAIKRLHKRDSFDNCSLGESSKIGISDISSLSEKTFQTLECQHKRSRRVRRSKGCDCCGEKSQPQEKSLIGLKNTENNDVEISETKKADVQAPVSPSETSQANPYSEGQFLDEHHSVNFHLGLKEDNDTINDSLIVSETKSKENTMQESLPSGIVNFREEICDMDSSEAMSLESQESPNENFKTVGPCLGDSKNVSQESLETKEEKPEETPKMELSLENVTVEGNACKVTESNLEKAKTMELNVGNEASFHGQERTKTGISEEAAIEENKRNDDSEADTAKLNAKEVATEEFNSDISLSDNTTPVKLNAQTEISEQTAAGELDGGNDVSDLHSSEETNTKMKNNEEMMIGEAMAETGHDGETENEGITTKTSKPDEAETNMLTAEMDNFVCDTVEMSTEEGIIDANKTETNTEYSKSEEKLDNNQMVMESDILQEDHHTSQKVEEPSQCLASGTAISELIIEDNNASPQKLRELDPSLVSANDSPSGMQTRCVWSPLASPSTSILKRGLKRSQEDEISSPVNKVRRVSFADPIYQAGLADDIDRRCSIVRSHSSNSSPIGKSVKTSPTTQSKISEMAKESIPCPTESVYPPLVNCVAPVDIILPQITSNMWARGLGQLIRAKNIKTIGDLSTLTASEIKTLPIRSPKVSNVKKALRIYHEQQVKTRGLEEIPVFDISEKTVNGIENKSLSPDEERLVSDIIDPVALEIPLSKNLLAQISALALQLDSEDLHNYSGSQLFEMHEKLSCMANSVIKNLQSRWRSPSHENSI

SEQ ID NO: 4898 - protein, 205 aa, Homo sapiens
MSNFLHLKYNEKSVSVTKALTVRFLTKRFIGEYASNFESIYKKHLCLERKQLNLEIYDPCSQTQKAKFSLTSELHWADGFVIVYDISDRSSFAFAKALIYRIREPQTSHCKRAVESAVFLVGNKRDLCHVREVGWEEGQKLALENRCQFCELSAAEQSLEVEMMFIRIIKDILINFKLKEKRRPSGSKSMAKLINNVFGKRRKSV

SEQ ID NO: 4899 - protein, 2087 aa, Homo sapiens
METESESSTLGDDSVFWLESEVIIQVTDCEEEEREEKFRKMKSSVHSEEDDFVPELHRNVHPRERPDWEETLSAMARGADVPEIPGDLTLKTCGSTASMKVKHVKKLPFTKGHFPKMAECAHFHYENVEFGSIQLSLSEEQNEVMKNGCESKELVYLVQIACQGKSWIVKRSYEDFRVLDKHLHLCIYDRRFSQLSELPRSDTLKDSPESVTQMLMAYLSRLSAIAGNKINCGPALTWMEIDNKGNHLLVHEESSINTPAVGAAHVIKRYTARAPDELTLEVGDIVSVIDMPPKVLSTWWRGKHGFQVGLFPGHCVELINQKVPQSVTNSVPKPVSKKHGKLITFLRTFMKSRPTKQKLKQRGILKERVFGCDLGEHLLNSGFEVPQVLQSCTAFIERYGIVDGIYRLSGVASNIQRLRHEFDSEHVPDLTKEPYVQDIHSVGSLCKLYFRELPNPLLTYQLYEKFSDAVSAATDEERLIKIHDVIQQLPPPHYRTLEFLMRHLSLLADYCSITNMHAKNLAIVWAPNLLRSKQIESACFSGTAAFMEVRIQSVVVEFILNHVDVLFSGRISMAMQEGAASLSRPKSLLVSSPSTKLLTLEEAQARTQAQVNSPIVTENKYIEVGEGPAALQGKFHTIIEFPLERKRPQNKMKKSPVGSWRSFFNLGKSSSVSKRKLQRNESEPSEMKAMALKGGRAEGTLRSAKSEESLTSLHAVDGDSKLFRPRRPRSSSDALSASFNGEMLGNRCNSYDNLPHDNESEEEGGLLHIPALMSPHSAEDVDLSPPDIGVASLDFDPMSFQCSPPKAESECLESGASFLDSPGYSKDKPSANKKDAETGSSQCQTPGSTASSEPVSPLQEKLSPFFTLDLSPTEDKSSKPSSFTEKVVYAFSPKIGRKLSKSPSMSISEPISVTLPPRVSEVIGTVSNTTAQNASSSTWDKCVEERDATNRSPTQIVKMKTNETVAQEAYESEVQPLDQVAAEEVELPGKEDQSVSSSQSKAVASGQTQTGAVTHDPPQDSVPVSSVSLIPPPPPPKNVARMLALALAESAQQASTQSLKRPGTSQAGYTNYGDIAVATTEDNLSSSYSAVALDKAYFQTDRPAEQFHLQNNAPGNCDHPLPETTATGDPTHSNTTESGEQHHQVDLTGNQPHQAYLSGDPEKARITSVPLDSEKSDDHVSFPEDQSGKNSMPTVSFLDQDQSPPRFYSGDQPPSYLGASVDKLHHPLEFADKSPTPPNLPSDKIYPPSGSPEENTSTATMTYMTTTPATAQMSTKEASWDVAEQPTTADFAAATLQRTHRTNRPLPPPPSQRSAEQPPVVGQVQAATNIGLNNSHKVQGVVPVPERPPEPRAMDDPASAFISDSGAAAAQCPMATAVQPGLPEKVRDGARVPLLHLRAESVPAHPCGFPAPLPPTRMMESKMIAAIHSSSADATSSSNYHSFVTASSTSVDDALPLPLPVPQPKHASQKTVYSSFARPDVTTEPFGPDNCLHFNMTPNCQYRPQSVPPHHNKLEQHQVYGARSEPPASMGLRYNTYVAPGRNASGHHSKPCSRVEYVSSLSSSVRNTCYPEDIPPYPTIRRVQSLHAPPSSMIRSVPISRTEVPPDDEPAYCPRPLYQYKPYQSSQARSDYHVTQLQPYFENGRVHYRYSPYSSSSSSYYSPDGALCDVDAYGTVQLRPLHRLPNRDFAFYNPRLQGKSLYSYAGLAPRPRANVTGYFSPNDHNVVSMPPAADVKHTYTSWDLEDMEKYRMQSIRRESRARQKVKGPVMSQYDNMTPAVQDDLGGIYVIHLRSKSDPGKTGLLSVAEGKESRHAAKAISPEGEDRFYRRHPEAEMDRAHHHGGHGSTQPEKPSLPQKQSSLRSRKLPDMGCSLPEHRAHQEASHRQFCESKNGPPYPQGAGQLDYGSKGIPDTSEPVSYHNSGVKYAASGQESLRLNHKEVRLSKEMERPWVRQPSAPEKHSRDCYKEEEHLTQSIVPPPKPERSHSLKLHHTQNVERDPSVLYQYQPHGKRQSSVTVVSQYDNLEDYHSLPQHQRGVFGGGGMGTYVPPGFPHPQSRTYATALGQGAFLPAELSLQHPETQIHAE

SEQ ID NO: 4900 - protein, 1738 aa, Homo sapiens
MKSRPTKQKLKQRGILKERVFGCDLGEHLLNSGFEVPQVLQSCTAFIERYGIVDGIYRLSGVASNIQRLRHEFDSEHVPDLTKEPYVQDIHSVGSLCKLYFRELPNPLLTYQLYEKFSDAVSAATDEERLIKIHDVIQQLPPPHYRTLEFLMRHLSLLADYCSITNMHAKNLAIVWAPNLLRSKQIESACFSGTAAFMEVRIQSVVVEFILNHVDVLFSGRISMAMQEGAASLSRPKSLLVSSPSTKLLTLEEAQARTQAQVNSPIVTENKYIEVGEGPAALQGKFHTIIEFPLERKRPQNKMKKSPVGSWRSFFNLGKSSSVSKRKLQRNESEPSEMKAMALKGGRAEGTLRSAKSEESLTSLHAVDGDSKLFRPRRPRSSSDALSASFNGEMLGNRCNSYDNLPHDNESEEEGGLLHIPALMSPHSAEDVDLSPPDIGVASLDFDPMSFQCSPPKAESECLESGASFLDSPGYSKDKPSANKKDAETGSSQCQTPGSTASSEPVSPLQEKLSPFFTLDLSPTEDKSSKPSSFTEKVVYAFSPKIGRKLSKSPSMSISEPISVTLPPRVSEVIGTVSNTTAQNASSSTWDKCVEERDATNRSPTQIVKMKTNETVAQEAYESEVQPLDQVAAEEVELPGKEDQSVSSSQSKAVASGQTQTGAVTHDPPQDSVPVSSVSLIPPPPPPKNVARMLALALAESAQQASTQSLKRPGTSQAGYTNYGDIAVATTEDNLSSSYSAVALDKAYFQTDRPAEQFHLQNNAPGNCDHPLPETTATGDPTHSNTTESGEQHHQVDLTGNQPHQAYLSGDPEKARITSVPLDSEKSDDHVSFPEDQSGKNSMPTVSFLDQDQSPPRFYSGDQPPSYLGASVDKLHHPLEFADKSPTPPNLPSDKIYPPSGSPEENTSTATMTYMTTTPATAQMSTKEASWDVAEQPTTADFAAATLQRTHRTNRPLPPPPSQRSAEQPPVVGQVQAATNIGLNNSHKVQGVVPVPERPPEPRAMDDPASAFISDSGAAAAQCPMATAVQPGLPEKVRDGARVPLLHLRAESVPAHPCGFPAPLPPTRMMESKMIAAIHSSSADATSSSNYHSFVTASSTSVDDALPLPLPVPQPKHASQKTVYSSFARPDVTTEPFGPDNCLHFNMTPNCQYRPQSVPPHHNKLEQHQVYGARSEPPASMGLRYNTYVAPGRNASGHHSKPCSRVEYVSSLSSSVRNTCYPEDIPPYPTIRRVQSLHAPPSSMIRSVPISRTEVPPDDEPAYCPRPLYQYKPYQSSQARSDYHVTQLQPYFENGRVHYRYSPYSSSSSSYYSPDGALCDVDAYGTVQLRPLHRLPNRDFAFYNPRLQGKSLYSYAGLAPRPRANVTGYFSPNDHNVVSMPPAADVKHTYTSWDLEDMEKYRMQSIRRESRARQKVKGPVMSQYDNMTPAVQDDLGGIYVIHLRSKSDPGKTGLLSVAEGKESRHAAKAISPEGEDRFYRRHPEAEMDRAHHHGGHGSTQPEKPSLPQKQSSLRSRKLPDMGCSLPEHRAHQEASHRQFCESKNGPPYPQGAGQLDYGSKGIPDTSEPVSYHNSGVKYAASGQESLRLNHKEVRLSKEMERPWVRQPSAPEKHSRDCYKEEEHLTQSIVPPPKPERSHSLKLHHTQNVERDPSVLYQYQPHGKRQSSVTVVSQYDNLEDYHSLPQHQRGVFGGGGMGTYVPPGFPHPQSRTYATALGQGAFLPAELSLQHPETQIHAE

SEQ ID NO: 4901 - protein, 322 aa, Homo sapiens
MPPKVLSTWWRGKHGFQVGLFPGHCVELINQKVPQSVTNSVPKPVSKKHGKLITFLRTFMKSRPTKQKLKQRGILKERVFGCDLGEHLLNSGFEVPQVLQSCTAFIERYGIVDGIYRLSGVASNIQRLRHEFDSEHVPDLTKEPYVQDIHSVGSLCKLYFRELPNPLLTYQLYEKFSDAVSAATDEERLIKIHDVIQQLPPPHYRTLEFLMRHLSLLADYCSITNMHAKNLAIVWAPNLLRSKQIESACFSGTAAFMEVRIQSVVVEFILNHVDVLLPHFSARTELIVPFPLRLLRKQFTPPLLGPMSPLNPLVQITVCISI

SEQ ID NO: 4902 - protein, 450 aa, Homo sapiens
MQPPRERLVVTGRAGWMGMGRGAGRSALGFWPTLAFLLCSFPAATSPCKILKCNSEFWSATSGSHAPASDDTPEFCAALRSYALCTRRTARTCRGDLAYHSAVHGIEDLMSQHNCSKDGPTSQPRLRTLPPAGDSQERSDSPEICHYEKSFHKHSATPNYTHCGLFGDPHLRTFTDRFQTCKVQGAWPLIDNNYLNVQVTNTPVLPGSAATATSKLTIIFKNFQECVDQKVYQAEMDELPAAFVDGSKNGGDKHGANSLKITEKVSGQHVEIQAKYIGTTIVVRQVGRYLTFAVRMPEEVVNAVEDWDSQGLYLCLRGCPLNQQIDFQAFHTNAEGTGARRLAAASPAPTAPETFPYETAVAKCKEKLPVEDLYYQACVFDLLTTGDVNFTLAAYYALEDVKMLHSNKDKLHLYDRTRDLPGRAAAGLPLAPRPLLGALVPLLALLPVFC

SEQ ID NO: 4903 - protein, 434 aa, Homo sapiens
MGMGRGAGRSALGFWPTLAFLLCSFPAATSPCKILKCNSEFWSATSGSHAPASDDTPEFCAALRSYALCTRRTARTCRGDLAYHSAVHGIEDLMSQHNCSKDGPTSQPRLRTLPPAGDSQERSDSPEICHYEKSFHKHSATPNYTHCGLFGDPHLRTFTDRFQTCKVQGAWPLIDNNYLNVQVTNTPVLPGSAATATSKLTIIFKNFQECVDQKVYQAEMDELPAAFVDGSKNGGDKHGANSLKITEKVSGQHVEIQAKYIGTTIVVRQVGRYLTFAVRMPEEVVNAVEDWDSQGLYLCLRGCPLNQQIDFQAFHTNAEGTGARRLAAASPAPTAPETFPYETAVAKCKEKLPVEDLYYQACVFDLLTTGDVNFTLAAYYALEDVKMLHSNKDKLHLYDRTRDLPGRAAAGLPLAPRPLLGALVPLLALLPVFC

SEQ ID NO: 4904 - protein, 458 aa, Homo sapiens
MGGLGPRRAGTSRERLVVTGRAGWMGMGRGAGRSALGFWPTLAFLLCSFPAATSPCKILKCNSEFWSATSGSHAPASDDTPEFCAALRSYALCTRRTARTCRGDLAYHSAVHGIEDLMSQHNCSKDGPTSQPRLRTLPPAGDSQERSDSPEICHYEKSFHKHSATPNYTHCGLFGDPHLRTFTDRFQTCKVQGAWPLIDNNYLNVQVTNTPVLPGSAATATSKLTIIFKNFQECVDQKVYQAEMDELPAAFVDGSKNGGDKHGANSLKITEKVSGQHVEIQAKYIGTTIVVRQVGRYLTFAVRMPEEVVNAVEDWDSQGLYLCLRGCPLNQQIDFQAFHTNAEGTGARRLAAASPAPTAPETFPYETAVAKCKEKLPVEDLYYQACVFDLLTTGDVNFTLAAYYALEDVKMLHSNKDKLHLYDRTRDLPGRAAAGLPLAPRPLLGALVPLLALLPVFC

SEQ ID NO: 4905 - protein, 351 aa, Homo sapiens
MGDPERPEAAGLDQDERSSSDTNESEIKSNEEPLLRKSSRRFVIFPIQYPDIWKMYKQAQASFWTAEEVDLSKDLPHWNKLKADEKYFISHILAFFAASDGIVNENLVERFSQEVQVPEARCFYGFQILIENVHSEMYSLLIDTYIRDPKKREFLFNAIETMPYVKKKADWALRWIADRKSTFGERVVAFAAVEGVFFSGSFAAIFWLKKRGLMPGLTFSNELISRDEGLHCDFACLMFQYLVNKPSEERVREIIVDAVKIEQEFLTEALPVGLIGMNCILMKQYIEFVADRLLVELGFSKVFQAENPFDFMENISLEGKTNFFEKRVSEYQRFAVMAETTDNVFTLDADF

SEQ ID NO: 4906 - protein, 299 aa, Homo sapiens
MGDPERPEAAGLDQDEVDLSKDLPHWNKLKADEKYFISHILAFFAASDGIVNENLVERFSQEVQVPEARCFYGFQILIENVHSEMYSLLIDTYIRDPKKREFLFNAIETMPYVKKKADWALRWIADRKSTFGERVVAFAAVEGVFFSGSFAAIFWLKKRGLMPGLTFSNELISRDEGLHCDFACLMFQYLVNKPSEERVREIIVDAVKIEQEFLTEALPVGLIGMNCILMKQYIEFVADRLLVELGFSKVFQAENPFDFMENISLEGKTNFFEKRVSEYQRFAVMAETTDNVFTLDADF

SEQ ID NO: 4907 - protein, 139 aa, Homo sapiens
MGDPERPEAAGLDQDEGLHCDFACLMFQYLVNKPSEERVREIIVDAVKIEQEFLTEALPVGLIGMNCILMKQYIEFVADRLLVELGFSKVFQAENPFDFMENISLEGKTNFFEKRVSEYQRFAVMAETTDNVFTLDADF

SEQ ID NO: 4908 - protein, 66 aa, Homo sapiens
MGDPERPEAAGLDQDEVFQAENPFDFMENISLEGKTNFFEKRVSEYQRFAVMAETTDNVFTLDADF

SEQ ID NO: 4909 - protein, 43 aa, Homo sapiens
MGDPERPEAAGLDQDERSSSDTNESEIKSNEEPLLRKSSRRSF

SEQ ID NO: 4910 - protein, 423 aa, Homo sapiens
MLLLRLPPHRSHASPLDCKLQDRCRKCYSPRSGQACPPALAAAWLRRCERRGGRPRGGRRKELTLGLRPARCSAPGPAKDDAWRPQAGRSSSDTNESEIKSNEEPLLRKSSRRFVIFPIQYPDIWKMYKQAQASFWTAEEVDLSKDLPHWNKLKADEKYFISHILAFFAASDGIVNENLVERFSQEVQVPEARCFYGFQILIENVHSEMYSLLIDTYIRDPKKREFLFNAIETMPYVKKKADWALRWIADRKSTFGERVVAFAAVEGVFFSGSFAAIFWLKKRGLMPGLTFSNELISRDEGLHCDFACLMFQYLVNKPSEERVREIIVDAVKIEQEFLTEALPVGLIGMNCILMKQYIEFVADRLLVELGFSKVFQAENPFDFMENISLEGKTNFFEKRVSEYQRFAVMAETTDNVFTLDADF

SEQ ID NO: 4911 - protein, 266 aa, Homo sapiens [sequence omitted]

SEQ ID NO: 4912 - protein, 590 aa, Homo sapiens
MHLARLVGSCSLLLLLGALSGWAASDDPIEKVIEGINRGLSNAEREVGKALDGINSGITHAGREVEKVFNGLSNMGSHTGKELDKGVQGLNHGMDKVAHEINHGIGQAGKEAEKLGHGVNNAAGQVGKEADKLIHHGVHHGANQAGSEAGKFGQGVDNAAGQAGNEAGRFGQGVHHAAGQAGNEAGRFGQGVHHAAGQAGNEAGRFGQGAHHGLSEGWKETEKFGQGIHHAAGQVGKEAEKFGQGAHHAAGQAGNEAGRFGQGVHHGLSEGWKETEKFGQGVHHTAGQVGKEAEKFGQGAHHAAGQAGNEAGRFGQGAHHAAGQAGNEAGRFGQGVHHGLSEGWKETEKFGQGVHHAASQFGKETEKLGHGVHHGVNEAWKEAEKFGQGVHHAASQVGKEEDRVVQGLHHGVSQAGREAGQFGHDIHHTAGQAGKEGDIAVHGVQPGVHEAGKEAGQFGQGVHHTLEQAGKEADKAVQGFHTGVHQAGKEAEKLGQGVNHAADQAGKEVEKLGQGAHHAAGQAGKELQNAHNGVNQASKEANQLLNGNHQSGSSSHQGGATTTPLASGASVNTPFINLPALWRSVANIMP

SEQ ID NO: 4913 - protein, 247 aa, Homo sapiens
MHLARLVGSCSLLLLLGALSGWAASDDPIEKVIEGINRGLSNAEREVGKALDGINSGITHAGREVEKVFNGLSNMGSHTGKELDKGVQGLNHGMDKVAHEINHGIGQAGKEAEKLGHGVNNAAGQAGKEADKAVQGFHTGVHQAGKEAEKLGQGVNHAADQAGKEVEKLGQGAHHAAGQAGKELQNAHNGVNQASKEANQLLNGNHQSGSSSHQGGATTTPLASGASVNTPFINLPALWRSVANIMP

SEQ ID NO: 4914 - protein, 1601 aa, Homo sapiens
MNSPVDPGARQALRKKPPERTPEDLNTIYSYLHGMEILSNLREHQLRLMSARARYERYSGNQVLFCSETIARCWYILLSGSVLVKGSMVLPPCSFGKQFGGKRGCDCLVLEPSEMIVVENAKDNEDSILQREIPARQSRRRFRKINYKGERQTITDDVEVNSYLSLPADLTKMHLTENPHPQVTHVSSSQSGCSIASDSGSSSLSDIYQATESEVGDVDLTRLPEGPVDSEDDEEEDEEIDRTDPLQGRDLVRECLEKEPADKTDDDIEQLLEFMHQLPAFANMTMSVRRELCSVMIFEVVEQAGAIILEDGQELDSWYVILNGTVEISHPDGKVENLFMGNSFGITPTLDKQYMHGIVRTKVDDCQFVCIAQQDYWRILNHVEKNTHKVEEEGEIVMVHEHRELDRSGTRKGHIVIKATPERLIMHLIEEHSIVDPTYIEDFLLTYRTFLESPLDVGIKLLEWFKIDSLRDKVTRIVLLWVNNHFNDFEGDPAMTRFLEEFEKNLEDTKMNGHLRLLNIACAAKAKWRQVVLQKASRESPLQFSLNGGSEKGFGIFVEGVEPGSKAADSGLKRGDQIMEVNGQNFENITFMKAVEILRNNTHLALTVKTNIFVFKELLFRTEQEKSGVPHIPKIAEKKSNRHSIQHVPGDIEQTSQEKGSKKVKANTVSGGRNKIRKILDKTRFSILPPKLFSDGGLSQSQDDSIVGTRHCRHSLAIMPIPGTLSSSSPDLLQPTTSMLDFSNPSDIPDQVIRVFKVDQQSCYIIISKDTTAKEVVFHAVHEFGLTGASDTYSLCEVSVTPEGVIKQRRLPDQFSKLADRIQLNGRYYLKNNMETETLCSDEDAQELVKESQLSMLQLSTIEVATQLSMRDFDLFRNIEPTEYIDDLFKLNSKTGNTHLKRFEDIVNQETFWVASEILTEANQLKRMKIIKHFIKIALHCRECKNFNSMFAIISGLNLASVARLRGTWEKLPSKYEKHLQDLQDIFDPSRNMAKYRNILSSQSMQPPIIPLFPVVKKDMTFLHEGNDSKVDGLVNFEKLRMISKEIRQVVRMTSANMDPAMMFRQRSLSQGSTNSNMLDVQGGAHKKRARRSSLLNAKKLYEDAQMARKVKQYLSSLDVETDEEKFQMMSLQWEPAYGTLTKNLSEKRSAKSSEMSPVPMRSAGQTTKAHLHQPHRVSQVLQVPAVNLHPIRKKGQTKDPALNTSLPQKVLGTTEEISGKKHTEDTISVASSLHSSPPASPQGSPHKGYTLIPSAKSDNLSDSSHSEISSRSSIVSNCSVDSMSAALQDERCSSQALAVPESTGALEKTEHASGIGDHSQHGPGWTLLKPSLIKCLAVSSSVSNEEISQEHIIIEAADSGRGSWTSCSSSSHDNFQSLPNPKSWDFLNSYRHTHLDDPIAEVEPTDSEPYSCSKSCSRTCGQCKGSLERKSWTSSSSLSDTYEPNYGTVKQRVLESTPAESSEGLDPKDATDPVYKTVTSSTEKGLIVYCVTSPKKDDRYREPPPTPPGYLGISLADLKEGPHTHLKPPDYSVAVQRSKMMHNSLSRLPPASLSSNLVACVPSKIVTQPQRHNLQPFHPKLGDVTDADSEADENEQVSAV

SEQ ID NO: 4915 - protein, 1391 aa, Homo sapiens
MNSPVDPGARQALRKKPPERTPEDLNTIYSYLHGMEILSNLREHQLRLMSARARYERYSGNQVLFCSETIARCWYILLSGSVLVKGSMVLPPCSFGKQFGGKRGCDCLVLEPSEMIVVENAKDNEDSILQREIPARQSRRRFRKINYKGERQTITDDVEVNSYLSLPADLTKMHLTENPHPQVTHVSSSQSGCSIASDSGSSSLSDIYQATESEVGDVDLTRLPEGPVDSEDDEEEDEEIDRTDPLQGRDLVRECLEKEPADKTDDDIEQLLEFMHQLPAFANMTMSVRRELCSVMIFEVVEQAGAIILEDGQELDSWYVILNGTVEISHPDGKVENLFMGNSFGITPTLDKQYMHGIVRTKVDDCQFVCIAQQDYWRILNHVEKNTHKVEEEGEIVMVHEHRELDRSGTRKGHIVIKATPERLIMHLIEEHSIVDPTYIEDFLLTYRTFLESPLDVGIKLLEWFKIDSLRDKVTRIVLLWVNNHFNDFEGDPAMTRFLEEFEKNLEDTKMNGHLRLLNIACAAKAKWRQVVLQKASRESPLQFSLNGGSEKGFGIFVEGVEPGSKAADSGLKRGDQIMEVNGQNFENITFMKAVEILRNNTHLALTVKTNIFVFKELLFRTEQEKSGVPHIPKIAEKKSNRHSIQHVPGDIEQTSQEKGSKKVKANTVSGGRNKIRKILDKTRFSILPPKLFSDGGLSQSQDDSIVGTRHCRHSLAIMPIPGTLSSSSPDLLQPTTSMLDFSNPSDIPDQVIRVFKVDQQSCYIIISKDTTAKEVVFHAVHEFGLTGASDTYSLCEVSVTPEGVIKQRRLPDQFSKLADRIQLNGRYYLKNNMETETLCSDEDAQELVKESQLSMLQLSTIEVATQLSMRDFDLFRNIEPTEYIDDLFKLNSKTGNTHLKRFEDIVNQETFWVASEILTEANQLKRMKIIKHFIKIALHCRECKNFNSMFAIISGLNLASVARLRGTWEKLPSKYEKHLQDLQDIFDPSRNMAKYRNILSSQSMQPPIIPLFPVVKKDMTFLHEGNDSKVDGLVNFEKLRMISKEIRQVVRMTSANMDPAMMFRQRSLSQGSTNSNMLDVQGGAHKKRARRSSLLNAKKLYEDAQMARKVKQYLSSLDVETDEEKFQMMSLQWEPAYGTLTKNLSEKRSAKSSEMSPVPMRSAGQTTKAHLHQPHRVSQVLQVPAVNLHPIRKKGQTKDPALNTSLPQKVLGTTEEISGKKHTEDTISVASSLHSSPPASPQGSPHKVGSIISDHSSKISGQSCPGIGGAYLQKKILQITRSTAKRTDSTEKATEENRDRTSCENTTRKRMTSPFRRLRERMLSRERLVNSQKEDTDHNQATESCEKVKDVGSNIKDEKGSAIFNSNSQGNSNTLNCFYTRFKSKRRKTL

SEQ ID NO: 4916 - protein, 1509 aa, Homo sapiens
MNSPVDPGARQALRKKPPERTPEDLNTIYSYLHGMEILSNLREHQLRLMSARARYERYSGNQVLFCSETIARCWYILLSGSVLVKGSMVLPPCSFGKQFGGKRGCDCLVLEPSEMIVVENAKDNEDSILQREIPARQSRRRFRKINYKGERQTITDDVEVNSYLSLPADLTKMHLTENPHPQVTHVSSSQSGCSIASDSGSSSLSDIYQATESEVGDVDLTRLPEGPVDSEDDEEEDEEIDRTDPLQGRDLVRECLEKEPADKTDDDIEQLLEFMHQLPAFANMTMSVRRELCSVMIFEVVEQAGAIILEDGQELDSWYVILNGTVEISHPDGKVENLFMGNSFGITPTLDKQYMHGIVRTKVDDCQFVCIAQQDYWRILNHVEKNTHKVEEEGEIVMVHEHRELDRSGTRKGHIVIKATPERLIMHLIEEHSIVDPTYIEDFLLTYRTFLESPLDVGIKLLEWFKIDSLRDKVTRIVLLWVNNHFNDFEGDPAMTRFLEEFEKNLEDTKMNGHLRLLNIACAAKAKWRQVVLQKASRESPLQFSLNGGSEKGFGIFVEGVEPGSKAADSGLKRGDQIMEVNGQNFENITFMKAVEILRNNTHLALTVKTNIFVFKELLFRTEQEKSGVPHIPKIAEKKSNRHSIQHVPGDIEQTSQEKGSKKVKANTVSGGRNKIRKILDKTRFSILPPKLFSDGGLSQSQDDSIVGTRHCRHSLAIMPIPGTLSSSSPDLLQPTTSMLDFSNPSAVGFYYIPDQVIRVFKVDQQSCYIIISKDTTAKEVVFHAVHEFGLTGASDTYSLCEVSVTPEGVIKQRRLPDQFSKLADRIQLNGRYYLKNNMETETLCSDEDAQELVKESQLSMLQLSTIEVATQLSMRDFDLFRNIEPTEYIDDLFKLNSKTGNTHLKRFEDIVNQETFWVASEILTEANQLKRMKIIKHFIKIALHCRECKNFNSMFAIISGLNLASVARLRGTWEKLPSKYEKHLQDLQDIFDPSRNMAKYRNILSSQSMQPPIIPLFPVVKKDMTFLHEGNDSKVDGLVNFEKLRMISKEIRQVVRMTSANMDPAMMFRQRKKRWRSLGSLSQGSTNSNMLDVQGGAHKKRARRSSLLNAKKLYEDAQMARKVKQYLSSLDVETDEEKFQMMSLQWEPAYGTLTKNLSEKRSAKSSEMSPVPMRSAGQTTKAHLHQPHRVSQVLQVPAVNLHPIRKKGQTKDPALNTSLPQKVLGTTEEISGKKHTEDTISVASSLHSSPPASPQGSPHKGYTLIPSAKSDNLSDSSHSEISSRSSIVSNCSVDSMSAALQDERCSSQALAVPESTGALEKTEHASGIGDHSQHGPGWTLLKPSLIKCLAVSSSVSNEEISQEHIIIEAADSGRGSWTSCSSSSHDNFQSLPNPKSWDFLNSYRHTHLDDPIAEVEPTDSEPYSCSKSCSRTCGQCKGSLERKSWTSSSSLSDTYEPNYGTVKQRVLESTPAESSEGLDPKDATDPVYKTVTSSTEKGLIENEQVSAV

SEQ ID NO: 4917 - protein, 1609 aa, Homo sapiens
MNSPVDPGARQALRKKPPERTPEDLNTIYSYLHGMEILSNLREHQLRLMSARARYERYSGNQVLFCSETIARCWYILLSGSVLVKGSMVLPPCSFGKQFGGKRGCDCLVLEPSEMIVVENAKDNEDSILQREIPARQSRRRFRKINYKGERQTITDDVEVNSYLSLPADLTKMHLTENPHPQVTHVSSSQSGCSIASDSGSSSLSDIYQATESEVGDVDLTRLPEGPVDSEDDEEEDEEIDRTDPLQGRDLVRECLEKEPADKTDDDIEQLLEFMHQLPAFANMTMSVRRELCSVMIFEVVEQAGAIILEDGQELDSWYVILNGTVEISHPDGKVENLFMGNSFGITPTLDKQYMHGIVRTKVDDCQFVCIAQQDYWRILNHVEKNTHKVEEEGEIVMVHEHRELDRSGTRKGHIVIKATPERLIMHLIEEHSIVDPTYIEDFLLTYRTFLESPLDVGIKLLEWFKIDSLRDKVTRIVLLWVNNHFNDFEGDPAMTRFLEEFEKNLEDTKMNGHLRLLNIACAAKAKWRQVVLQKASRESPLQFSLNGGSEKGFGIFVEGVEPGSKAADSGLKRGDQIMEVNGQNFENITFMKAVEILRNNTHLALTVKTNIFVFKELLFRTEQEKSGVPHIPKIAEKKSNRHSIQHVPGDIEQTSQEKGSKKVKANTVSGGRNKIRKILDKTRFSILPPKLFSDGGLSQSQDDSIVGTRHCRHSLAIMPIPGTLSSSSPDLLQPTTSMLDFSNPSDIPDQVIRVFKVDQQSCYIIISKDTTAKEVVFHAVHEFGLTGASDTYSLCEVSVTPEGVIKQRRLPDQFSKLADRIQLNGRYYLKNNMETETLCSDEDAQELVKESQLSMLQLSTIEVATQLSMRDFDLFRNIEPTEYIDDLFKLNSKTGNTHLKRFEDIVNQETFWVASEILTEANQLKRMKIIKHFIKIALHCRECKNFNSMFAIISGLNLASVARLRGTWEKLPSKYEKHLQDLQDIFDPSRNMAKYRNILSSQSMQPPIIPLFPVVKKDMTFLHEGNDSKVDGLVNFEKLRMISKEIRQVVRMTSANMDPAMMFRQRKKRWRSLGSLSQGSTNSNMLDVQGGAHKKRARRSSLLNAKKLYEDAQMARKVKQYLSSLDVETDEEKFQMMSLQWEPAYGTLTKNLSEKRSAKSSEMSPVPMRSAGQTTKAHLHQPHRVSQVLQVPAVNLHPIRKKGQTKDPALNTSLPQKVLGTTEEISGKKHTEDTISVASSLHSSPPASPQGSPHKGYTLIPSAKSDNLSDSSHSEISSRSSIVSNCSVDSMSAALQDERCSSQALAVPESTGALEKTEHASGIGDHSQHGPGWTLLKPSLIKCLAVSSSVSNEEISQEHIIIEAADSGRGSWTSCSSSSHDNFQSLPNPKSWDFLNSYRHTHLDDPIAEVEPTDSEPYSCSKSCSRTCGQCKGSLERKSWTSSSSLSDTYEPNYGTVKQRVLESTPAESSEGLDPKDATDPVYKTVTSSTEKGLIVYCVTSPKKDDRYREPPPTPPGYLGISLADLKEGPHTHLKPPDYSVAVQRSKMMHNSLSRLPPASLSSNLVACVPSKIVTQPQRHNLQPFHPKLGDVTDADSEADENEQVSAV

SEQ ID NO: 4918 - protein, 1504 aa, Homo sapiens
MNSPVDPGARQALRKKPPERTPEDLNTIYSYLHGMEILSNLREHQLRLMSARARYERYSGNQVLFCSETIARCWYILLSGSVLVKGSMVLPPCSFGKQFGGKRGCDCLVLEPSEMIVVENAKDNEDSILQREIPARQSRRRFRKINYKGERQTITDDVEVNSYLSLPADLTKMHLTENPHPQVTHVSSSQSGCSIASDSGSSSLSDIYQATESEVGDVDLTRLPEGPVDSEDDEEEDEEIDRTDPLQGRDLVRECLEKEPADKTDDDIEQLLEFMHQLPAFANMTMSVRRELCSVMIFEVVEQAGAIILEDGQELDSWYVILNGTVEISHPDGKVENLFMGNSFGITPTLDKQYMHGIVRTKVDDCQFVCIAQQDYWRILNHVEKNTHKVEEEGEIVMVHEHRELDRSGTRKGHIVIKATPERLIMHLIEEHSIVDPTYIEDFLLTYRTFLESPLDVGIKLLEWFKIDSLRDKVTRIVLLWVNNHFNDFEGDPAMTRFLEEFEKNLEDTKMNGHLRLLNIACAAKAKWRQVVLQKASRESPLQFSLNGGSEKGFGIFVEGVEPGSKAADSGLKRGDQIMEVNGQNFENITFMKAVEILRNNTHLALTVKTNIFVFKELLFRTEQEKSGVPHIPKIAEKKSNRHSIQHVPGDIEQTSQEKGSKKVKANTVSGGRNKIRKILDKTRFSILPPKLFSDGGLSQSQDDSIVGTRHCRHSLAIMPIPGTLSSSSPDLLQPTTSMLDFSNPSDIPDQVIRVFKVDQQSCYIIISKDTTAKEVVFHAVHEFGLTGASDTYSLCEVSVTPEGVIKQRRLPDQFSKLADRIQLNGRYYLKNNMETETLCSDEDAQELVKESQLSMLQLSTIEVATQLSMRDFDLFRNIEPTEYIDDLFKLNSKTGNTHLKRFEDIVNQETFWVASEILTEANQLKRMKIIKHFIKIALHCRECKNFNSMFAIISGLNLASVARLRGTWEKLPSKYEKHLQDLQDIFDPSRNMAKYRNILSSQSMQPPIIPLFPVVKKDMTFLHEGNDSKVDGLVNFEKLRMISKEIRQVVRMTSANMDPAMMFRQRKKRWRSLGSLSQGSTNSNMLDVQGGAHKKRARRSSLLNAKKLYEDAQMARKVKQYLSSLDVETDEEKFQMMSLQWEPAYGTLTKNLSEKRSAKSSEMSPVPMRSAGQTTKAHLHQPHRVSQVLQVPAVNLHPIRKKGQTKDPALNTSLPQKVLGTTEEISGKKHTEDTISVASSLHSSPPASPQGSPHKGYTLIPSAKSDNLSDSSHSEISSRSSIVSNCSVDSMSAALQDERCSSQALAVPESTGALEKTEHASGIGDHSQHGPGWTLLKPSLIKCLAVSSSVSNEEISQEHIIIEAADSGRGSWTSCSSSSHDNFQSLPNPKSWDFLNSYRHTHLDDPIAEVEPTDSEPYSCSKSCSRTCGQCKGSLERKSWTSSSSLSDTYEPNYGTVKQRVLESTPAESSEGLDPKDATDPVYKTVTSSTEKGLIENEQVSAV

SEQ ID NO: 4919 - protein, 827 aa, Homo sapiens
MNSPVDPGARQALRKKPPERTPEDLNTIYSYLHGMEILSNLREHQLRLMSARARYERYSGNQVLFCSETIARCWYILLSGSVLVKGSMVLPPCSFGKQFGGKRGCDCLVLEPSEMIVVENAKDNEDSILQREIPARQSRRRFRKINYKGERQTITDDVEVNSYLSLPADLTKMHLTENPHPQVTHVSSSQSGCSIASDSGSSSLSDIYQATESEVGDVDLTRLPEGPVDSEDDEEEDEEIDRTDPLQGRDLVRECLEKEPADKTDDDIEQLLEFMHQLPAFANMTMSVRRELCSVMIFEVVEQAGAIILEDGQELDSWYVILNGTVEISHPDGKVENLFMGNSFGITPTLDKQYMHGIVRTKVDDCQFVCIAQQDYWRILNHVEKNTHKVEEEGEIVMVHEHRELDRSGTRKGHIVIKATPERLIMHLIEEHSIVDPTYIEDFLLTYRTFLESPLDVGIKLLEWFKIDSLRDKVTRIVLLWVNNHFNDFEGDPAMTRFLEEFEKNLEDTKMNGHLRLLNIACAAKAKWRQVVLQKASRESPLQFSLNGGSEKGFGIFVEGVEPGSKAADSGLKRGDQIMEVNGQNFENITFMKAVEILRNNTHLALTVKTNIFVFKELLFRTEQEKSGVPHIPKIAEKKSNRHSIQHVPGDIEQTSQEKGSKKVKANTVSGGRNKIRKILDKTRFSILPPKLFSDGGLSQSQDDSIVGTRHCRHSLAIMPIPGTLSSSSPDLLQPTTSMLDFSNPSDIPDQVIRVFKVDQQSCYIIISKDTTAKEVVFHAVHEFGLTGASDTYSLCEVSVTPEGVIKQRRLPDQFSKLADRIQLNGR

SEQ ID NO: 4920 - protein, 442 aa, Homo sapiens
MKPGPPHRAGAAHGAGAGAGAAAGPGARGLLLPPLLLLLLAGRAAGAQRWRSENFERPVDLEGSGDDDSFPDDELDDLYSGSGSGYFEQESGIETAMRFSPDVALAVSTTPAVLPTTNIQPVGTPFEELPSERPTLEPATSPLVVTEVPEEPSQRATTVSTTMATTAATSTGDPTVATVPATVATATPSTPAAPPFTATTAVIRTTGVRRLLPLPLTTVATARATTPEAPSPPTTAAVLDTEAPTPRLVSTATSRPRALPRPATTQEPDIPERSTLPLGTTAPGPTEVAQTPTPETFLTTIRDEPEVPVSGGPSGDFELPEEETTQPDTANEVVAVGGAAAKASSPPGTLPKGARPGPGLLDNAIDSGSSAAQLPQKSILERKEVLVAVIVGGVVGALFAAFLVTLLIYRMKKKDEGSYTLEEPKQASVTYQKPDKQEEFYA

SEQ ID NO: 4921 - protein, 741 aa, Homo sapiens
MESRDHNNPQEGPTSSSGRRAAVEDNHLLIKAVQNEDVDLVQQLLEGGANVNFQEEEGGWTPLHNAVQMSREDIVELLLRHGADPVLRKKNGATPFILAAIAGSVKLLKLFLSKGADVNECDFYGFTAFMEAAVYGKVKALKFLYKRGANVNLRRKTKEDQERLRKGGATALMDAAEKGHVEVLKILLDEMGADVNACDNMGRNALIHALLSSDDSDVEAITHLLLDHGADVNVRGERGKTPLILAVEKKHLGLVQRLLEQEHIEINDTDSDGKTALLLAVELKLKKIAELLCKRGASTDCGDLVMTARRNYDHSLVKVLLSHGAKEDFHPPAEDWKPQSSHWGAALKDLHRIYRPMIGKLKFFIDEKYKIADTSEGGIYLGFYEKQEVAVKTFCEGSPRAQREVSCLQSSRENSHLVTFYGSESHRGHLFVCVTLCEQTLEACLDVHRGEDVENEEDEFARNVLSSIFKAVQELHLSCGYTHQDLQPQNILIDSKKAAHLADFDKSIKWAGDPQEVKRDLEDLGRLVLYVVKKGSISFEDLKAQSNEEVVQLSPDEETKDLIHRLFHPGEHVRDCLSDLLGHPFFWTWESRYRTLRNVGNESDIKTRKSESEILRLLQPGPSEHSKSFDKWTTKINECVMKKMNKFYEKRGNFYQNTVGDLLKFIRNLGEHIDEEKHKKMKLKIGDPSLYFQKTFPDLVIYVYTKLQNTEYRKHFPQTHSPNKPQCDGAGGASGLASPGC

SEQ ID NO: 4922 - protein, 652 aa, Homo sapiens
MESRDHNNPQEGPTSSSGRRAAVEDNHLLIKAVQNEDVDLVQQLLEGGANVNFQEEEGGWTPLHNAVQMSREDIVELLLRHGADPVLRKKNGATPFILAAIAGSVKLLKLFLSKGADVNECDFYGFTAFMEAAVYGKVKALKFLYKRGANVNLRRKTKEDQERLRKGGATALMDAAEKGHVEVLKILLDEMGADVNACDNMGRNALIHALLSSDDSDVEAITHLLLDHGADVNVRGERGKTPLILAVEKKHLGLVQRLLEQEHIEINDTDSDGKTALLLAVELKLKKIAELLCKRGASTDCGDLVMTARRNYDHSLVKVLLSHGAKEDFHPPAEDWKPQSSHWGAALKDLHRIYRPMIGKLKFFIDEKYKIADTSEGGIYLGFYEKQEVAVKTFCEGSPRAQREVSCLQSSRENSHLVTFYGSESHRGHLFVCVTLCEQTLEACLDVHRGEDVENEEDEFARNVLSSIFKAVQELHLSCGYTHQDLQPQNILIDSKKAAHLADFDKSIKWAGDPQEVKRDLEDLGRLVLYVVKKGSISFEDLKAQSNEEVVQLSPDEETKDLIHRLFHPGEHVRDCLSDLLGHPFFWTWESRYRTLRNVGNESDIKTRKSESEILRLLQPGPSEHSKSFDKWTTKMSKLRHRQIIFPTTQNQ

SEQ ID NO: 4923 - protein, 435 aa, Homo sapiens
MPLFLLSLPTPPSASGHERRQRPEAKTSGSEKKYLRAMQANRSQLHSPPGTGSSEDASTPQCVHTRLTGEGSCPHSGDVHIQINSIPKECAENASSRNIRSGVHSCAHGCVHSRLRGHSHSEARLTDDTAAESGDHGSSSFSEFRYLFKWLQKSLPYILILSVKLVMQHITGISLGIGLLTTFMYANKSIVNQVFLRERSSKIQCAWLLVFLAGSSVLLYYTFHSQSLYYSLIFLNPTLDHLSFWEVFWIVGITDFILKFFFMGLKCLILLVPSFIMPFKSKGYWYMLLEELCQYYRTFVPIPVWFRYLISYGEFGNVTRWSLGILLALLYLILKLLEFFGHLRTFRQVLRIFFTQPSYGVAASKRQCSDVDDICSICQAEFQKPILLICQHIFCEECMTLWFNREKTCPLCRTVISDHINKWKDGATSSHLQIY

SEQ ID NO: 4924 - protein, 203 aa, Homo sapiens
MPLFLLSLPTPPSASGHERRQRPEAKTSGSEKKYLRAMQANRSQLHSPPGTGSSEDASTPQCVHTRLTGEGSCPHSGDVHIQINSIPKECAENASSRNIRSGVHSCAHGCVHSRLRGHSHSEARLTDDTAAESGDHGSSSFSEFRYLFKWLQKSLPYILILSVKLVMQHITGISLGIGLLTTFMYANKSIVNQVFLRVSITSN

SEQ ID NO: 4925 - protein, 245 aa, Homo sapiens
MPLFLLSLPTPPSASGHERRQRPEAKTSGSEKKYLRAMQANRSQLHSPPGTGSSEDASTPQCVHTRLTGEGSCPHSGDVHIQINSIPKECAENASSRNIRSGVHSCAHGCVHSRLRGHSHSEARLTDDTAAESGDHGSSSFSEFRYLFKWLQKSLPYILILSVKLVMQHITGISLGIGLLTTFMYANKSIVNQVFLRLNFFKSYFGPFELLGSILDCWNYRLHSEILFHGLKMPYFIGAFFHHAF

SEQ ID NO: 4926 - protein, 338 aa, Homo sapiens [sequence omitted]

SEQ ID NO: 4927 - protein, 353 aa, Homo sapiens
MEALAMGSRALRLWLVAPGGGIKWRFIATSSASQLSPTELTEMRNDLFNKEKARQLSLTPRTEKIEVKHVGKTDPGTVFVMNKNISTPYSCAMHLSEWYCRKSILALVDGQPWDMYKPLTKSCEIKFLTFKDCDPGEVNKAYWRSCAMMMGCVIERAFKDEYMVNLVRAPEVPVISGAFCYDVVLDSKLDEWMPTKENLRSFTKDAHALIYKDLPFETLEVEAKVALEIFQHSKYKVDFIEEKASQNPERIVKLHRIGDFIDVSEGPLIPRTSICFQYEVSAVHNLQPTQPSLIRRFQGVSLPVHLRAHFTIWDKLLERSRKMTPFPILLLFTTQSFFTTSPESYLLHGTVSE

SEQ ID NO: 4928 - protein, 142 aa, Homo sapiens
MAVAAVKWVMSKRTILKHLFPVQNGALYCVCHKSTYSPLPDDYNCNVELALTSDGRTIVCYHPSVDIPYEHTKPIPRPDPVHNNEETHDQVLKTRLEEKVEHLEEGPMIEQLSKMFFTTKHRWYPHGRYHRCRKNLNPPKDR

SEQ ID NO: 4929 - protein, 166 aa, Homo sapiens
MAATMFRATLRGWRTGVQRGCGLRLLSQTQGPPDYPRFVESVDEYQFVERLLPATRIPDPPKHEHYPTPSGWQPPRDPPPNLPYFVRRSRMHNIPVYKDITHGNRQMTVIRKVEGDIWALQKDVEDFLSPLLGKTPVTQVNEVTGTLRIKGYFDQELKAWLLEKGF

SEQ ID NO: 4930 - protein, 664 aa, Homo sapiens
MAAVGPPQQQVRMAHQQVWAALEVALRVPCLYIIDAIFNSYPDSSQSRFCIVLQIFLRLFGVFASSIVLILSQRSLFKFYTYSSAFLLAATSVLVNYYASLHIDFYGAYNTSAFGIELLPRKGPSLWMALIVLQLTFGIGYVTLLQIHSIYSQLIILDLLVPVIGLITELPLHIRETLLFTSSLILTLNTVFVLAVKLKWFYYSTRYVYLLVRHMYRIYGLQLLMEDTWKRIRFPDILRVFWLTRVTAQATVLMYILRMANETDSFFISWDDFWDLICNLIISGCDSTLTVLGMSAVISSVAHYLGLGILAFIGSTEEDDRRLGFVAPVLFFILALQTGLSGLRPEERLIRLSRNMCLLLTAVLHFIHGMTDPVLMSLSASHVSSFRRHFPVLFVSACLFILPVLLSYVLWHHYALNTWLFAVTAFCVELCLKVIVSLTVYTLFMIDGYYNVLWEKLDDYVYYVRSTGSIIEFIFGVVMFGNGAYTMMFESGSKIRAFMMCLHAYFNIYLQAKNGWKTFMNRRTAVKKINSLPEIKGSRLQEINDVCAICYHEFTTSARITPCNHYFHALCLRKWLYIQDTCPMCHQKVYIEDDIKDNSNVSNNNGFIPPNETPEEAVREAAAESDRELNEDDSTDCDDDVQRERNGVIQHTGAAAEEFNDDTD

SEQ ID NO: 4931 - protein, 228 aa, Homo sapiens
MAAQQRDCGGAAQLAGPAAEADPLGRFTCPVCLEVYEKPVQVPCGHVFCSACLQECLKPKKPVCGVCRSALAPGVRAVELERQIESTETSCHGCRKNFFLSKIRSHVATCSKYQNYIMEGVKATIKDASLQPRNVPNRYTFPCPYCPEKNFDQEGLVEHCKLFHSTDTKSVVCPICASMPWGDPNYRSANFREHIQRRHRFSYDTFVDYDVDEEDMMNQVLQRSIIDQ

SEQ ID NO: 4932 - protein, 191 aa, Homo sapiens
MAAQQRDCGGAAQLAGPAAEADPLGRFTCPVCLEVYEKPVQVPCGHVFCSACLQECLKPKKPVCGVCRSALAPGVRAVELERQIESTETSCHGCRKNFFLSKIRSHVATCSKYQNYIMEGVKATIKDASLQPRNVPNRYTFPCPYCPEKNFDQEGLVEHCKLFHSTDTKSVVSEQSPCLLSVSCYRASITY

SEQ ID NO: 4933 - protein, 1314 aa, Homo sapiens
MASKGAGMSFSRKSYRLTSDAEKSRVTGIVQEKLLNDYLNRIFSSSEHAPPAATSRKPLNFQNLPEHLDQLLQVDNEEEESQGQVEGRLGPSTVVLDHTGGFEGLLLVDDDLLGVIGHSNFGTIRSTTCVYKGKWLYEVLISSQGLMQIGWCTISCRFNQEEGVGDTHNSYAYDGNRVRKWNVTTTNYGKAWAAGDIVSCLIDLDDGTLSFCLNGVSLGTAFENLSRGLGMAYFPAISLSFKESVAFNFGSRPLRYPVAGYRPLQDPPSADLVRAQRLLGCFRAVLSVELDPVEGRLLDKESSKWRLRGQPTVLLTLAHIFHHFAPLLRKVYLVEAVLMSFLLGIVEKGTPTQAQSVVHQVLDLLWLFMEDYEVQDCLKQLMMSLLRLYRFSPIVPDLGLQIHYLRLTIAILRHEKSRKFLLSNVLFDVLRSVVFFYIKSPLRVEEAGLQELIPTTWWPHCSSREGKESTEMKEETAEERLRRRAYERGCQRLRKRIEVVEELQVQILKLLLDNKDDNGGEASRYIFLTKFRKFLQENASGRGNMPMLCPPEYMVCFLHRLISALRYYWDEYKASNPHASFSEEAYIPPQVFYNGKVDYFDLQRLGGLLSHLRKTLKDDLASKANIVIDPLELQSTAMDDLDEDEEPAPAMAQRPMQALAVGGPLPLPRPGWLSSPTLGRANRFLSTAAVSLMTPRRPLSTSEKVKVRTLSVEQRTREDIEGSHWNEGLLLGRPPEEPEQPLTENSLLEVLDGAVMMYNLSVHQQLGKMVGVSDDVNEYAMALRDTEDKLRRCPKRRKDILAELTKSQKVFSEKLDHLSRRLAWVHATVYSQEKMLDIYWLLRVCLRTIEHGDRTGSLFAFMPEFYLSVAINSYSALKNYFGPVHSMEELPGYEETLTRLAAILAKHFADARIVGTDIRDSLMQALASYVCYPHSLRAVERIPEEQRIAMVRNLLAPYEQRPWAQTNWILVRLWRGCGFGYRYTRLPHLLKTKLEDANLPSLQKPCPSTLLQQHMADLLQQGPDVAPSFLNSVLNQLNWAFSEFIGMIQEIQQAAERLERNFVDSRQLKVCATCFDLSVSLLRVLEMTITLVPEIFLDWTRPTSEMLLRRLAQLLNQVLNRVTAERNLFDRVVTLRLPGLESVDHYPILVAVTGILVQLLVRGPASEREQATSVLLADPCFQLRSICYLLGQPEPPAPGTALPAPDRKRFSLQSYADYISADELAQVEQMLAHLTSASAQAAAASLPTSEEDLCPICYAHPISAVFQPCGHKSCKACINQHLMNNKDCFFCKTTIVSVEDWEKGANTSTTSSAA

SEQ ID NO: 4934 - protein, 1316 aa, Homo sapiens
MASKGAGMSFSRKSYRLTSDAEKSRVTGIVQEKLLNDYLNRIFSSSEHAPPAATSRKPLNFQNLPEHLDQLLQVDNEEEESQGQVEGRLGPSTVVLDHTGGFEGLLLVDDDLLGVIGHSNFGTIRSTTCVYKGKWLYEVLISSQGLMQIGWCTISCRFNQEEGVGDTHNSYAYDGNRVRKWNVTTTNYGKAWAAGDIVSCLIDLDDGTLSFCLNGVSLGTAFENLSRGLGMAYFPAISLSFKESVAFNFGSRPLRYPVAGYRPLQDPPSADLVRAQRLLGCFRAVLSVELDPVEGRLLDKESSKWRLRGQPTVLLTLAHIFHHFAPLLRKVYLVEAVLMSFLLGIVEKGTPTQAQSVVHQVLDLLWLFMEDYEVQDCLKQLMMSLLRLYRFSPIVPDLGLQIHYLRLTIAILRHEKSRKFLLSNVLFDVLRSVVFFYIKSPLRVEEAGLQELIPTTWWPHCSSREGKESTEMKEETAEERLRRRAYERGCQRLRKRIEVVEELQVQILKLLLDNKDDNGGEASRYIFLTKFRKFLQENASGRGNMPMLCPPEYMVCFLHRLISALRYYWDEYKASNPHASFSEEAYIPPQVFYNGKVDYFDLQRLGGLLSHLRKTLKDDLASKANIVIDPLELQSTAMDDLDEDEEPAPAMAQRPMQALAVGGPLPLPRPGWLSSPTLGRANRFLSTAAVSLMTPRRPLSTSEKVKVRTLSVEQRTREDIEGSHWNEGLLLGRPPEEPEQPLTENSLLEVLDGAVMMYNLSVHQQLGKMVGVSDDVNEYAMALRDTEDKLRRCPKRRKDILAELTKSQKVFSEKLDHLSRRLAWVHATVYSQEKMLDIYWLLRVCLRTIEHGDRTGSLFAFMPEFYLSVAINSYSALKNYFGPVHSMEELPGYEETLTRLAAILAKHFADARIVGTDIRDSLMQALASYVCYPHSLRAVERIPEEQRIAMVRNLLAPYEQRPWAQTNWILVRLWRGCGFGYRYTRLPHLLKTKLEDANLPSLQKPCPSTLLQQHMADLLQQGPDVAPSFLNSVLNQLNWAFSEFIGMIQEIQQAAERLERNFVDSRQLKVCATCFDLSVSLLRVLEMTITLVPEIFLDWTRPTSEMLLRRLAQLLNQVLNRVTAERNLFDRVVTLRLPGLESVDHYPILVAVTGILVQLLVRGPASEREQATSVLLADPCFQLRSICYLLGQPEPPAPGTALPAPDRKRFSLQSYADYISADELAQVEQMLAHLTSASAQAAAASLPTSEEDLCPICYAHPISAVFQPCGHKSCKACINQHLMNNKDCFFCKTTTSNLLACLYPHWWEPSHGPNCA

SEQ ID NO: 4935 - protein, 351 aa, Homo sapiens
MAPVLPLVLPLQPRIRLAQGLWLLSWLLALAGGVILLCSGHLLVQLRHLGTFLAPSCQFPVLPQAALAAGAVALGTGLVGVGASRASLNAALYPPWRGVLGPLLVAGTAGGGGLLVVGLGLALALPGSLDEALEEGLVTALAHYKDTEVPGHCQAKRLVDELQLRYHCCGRHGYKDWFGVQWVSSRYLDPGDRDVADRIQSNVEGLYLTDGVPFSCCNPHSPRPCLQNRLSDSYAHPLFDPRQPNQNLWAQGCHEVLLEHLQDLAGTLGSMLAVTFLLQALVLLGLRYLQTALEGLGGVIDAGGETQGYLFPSGLKDMLKTAWLQGGVACRPAPEEAPPGEAPPKEDLSEA

SEQ ID NO: 4936 - protein, 732 aa, Homo sapiens
MGSEKDSESPRSTSLHAAAPDPKCRSGGRRRRLTLHSVFSASARGRRARAKPQAEPPPPAAQPPPAPAPAAAQGPPPEALPAEPAAEAEAEAAAAAAEPGFDDEEAAEGGGPGAEEVECPLCLVRLPPERAPRLLSCPHRSCRDCLRHYLRLEISESRVPISCPECSERLNPHDIRLLLADPPLMHKYEEFMLRRYLASDPDCRWCPAPDCGYAVIAYGCASCPKLTCEREGCQTEFCYHCKQIWHPNQTCDMARQQRAQTLRVRTKHTSGLSYGQESGPADDIKPCPRCSAYIIKMNDGSCNHMTCAVCGCEFCWLCMKEISDLHYLSPSGCTFWGKKPWSRKKKILWQLGTLIGAPVGISLIAGIAIPAMVIGIPVYVGRKIHSRYEGRKTSKHKRNLAITGGVTLSVIASPVIAAVSVGIGVPIMLAYVYGVVPISLCRGGGCGVSTANGKGVKIEFDEDDGPITVADAWRALKNPSIGESSIEGLTSVLSTSGSPTDGLSVMQGPYSETASFAALSGGTLSGGILSSGKGKYSRLEVQADVQKEIFPKDTASLGAISDNASTRAMAGSIISSYNPQDRECNNMEIQVDIEAKPSHYQLVSGSSTEDSLHVHAQMAENEEEGSGGGGSEEDPPCRHQSCEQKDCLASKPWDISLAQPESIRSDLESSDAQSDDVPDITSDECGSPRSHTAACPSTPRAQGAPSPSAHMNLSALAEGQTVLKPEGGEARV

SEQ ID NO: 4937 - protein, 587 aa, Homo sapiens
MGSEKDSESPRSTSLHAAAPDPKCRSGGRRRRLTLHSVFSASARGRRARAKPQAEPPPPAAQPPPAPAPAAAQGPPPEALPAEPAAEAEAEAAAAAAEPGFDDEEAAEGGGPGAEEVECPLCLVRLPPERAPRLLSCPHRSCRDCLRHYLRLEISESRVPISCPECSERLNPHDIRLLLADPPLMHKYEEFMLRRYLASDPDCRWCPAPDCGYAVIAYGCASCPKLTCEREGCQTEFCYHCKQIWHPNQTCDMARQQRAQTLRVRTKHTSGLSYGQESGPDDIKPCPRCSAYIIKMNDGSCNHMTCAVCGCEFCWLCMKEISDLHYLSPSGCTFWGKKPWSRKKKILWQLGTLIGAPVGISLIAGIAIPAMVIGIPVYVGRKIHSRYEGRKTSKHKRNLAITGGVTLSVIASPVIAAVSVGIGVPIMLAYVYGVVPISLCRGGGCGVSTANGKGVKIEFDEDDGPITVADAWRALKNPSIGESSIEGLTSVLSTSGSPTDGLSVMQGPYSETASFAALSGGTLSGGILSSGKGKYSRLEVQADVQKEIFPKDTASLGAISDNASTRAMAGSIISSYNPQDRFSMIHA

SEQ ID NO: 4938 - protein, 486 aa, Homo sapiens
MGSEKDSESPRSTSLHAAAPDPKCRSGGRRRRLLSCPHRSCRDCLRHYLRLEISESRVPISCPECSERLNPHDIRLLLADPPLMHKYEEFMLRRYLASDPDCRWCPAPDCGYAVIAYGCASCPKLTCEREGCQTEFCYHCKQIWHPNQTCDMARQQRAQTLRVRTKHTSGLSYGQESGPDDIKPCPRCSAYIIKMNDGSCNHMTCAVCGCEFCWLCMKEISDLHYLSPSGCTFWGKKPWSRKKKILWQLGTLIGAPVGISLIAGIAIPAMVIGIPVYVGRKIHSRYEGRKTSKHKRNLAITGGVTLSVIASPVIAAVSVGIGVPIMLAYVYGVVPISLCRGGGCGVSTANGKGVKIEFDEDDGPITVADAWRALKNPSIGESSIEGLTSVLSTSGSPTDGLSVMQGPYSETASFAALSGGTLSGGILSSGKGKYSRLEVQADVQKEIFPKDTASLGAISDNASTRAMAGSIISSYNPQDRFSMIHA

SEQ ID NO: 4939 - protein, 731 aa, Homo sapiens
MGSEKDSESPRSTSLHAAAPDPKCRSGGRRRRLTLHSVFSASARGRRARAKPQAEPPPPAAQPPPAPAPAAAQGPPPEALPAEPAAEAEAEAAAAAAEPGFDDEEAAEGGGPGAEEVECPLCLVRLPPERAPRLLSCPHRSCRDCLRHYLRLEISESRVPISCPECSERLNPHDIRLLLADPPLMHKYEEFMLRRYLASDPDCRWCPAPDCGYAVIAYGCASCPKLTCEREGCQTEFCYHCKQIWHPNQTCDMARQQRAQTLRVRTKHTSGLSYGQESGPDDIKPCPRCSAYIIKMNDGSCNHMTCAVCGCEFCWLCMKEISDLHYLSPSGCTFWGKKPWSRKKKILWQLGTLIGAPVGISLIAGIAIPAMVIGIPVYVGRKIHSRYEGRKTSKHKRNLAITGGVTLSVIASPVIAAVSVGIGVPIMLAYVYGVVPISLCRGGGCGVSTANGKGVKIEFDEDDGPITVADAWRALKNPSIGESSIEGLTSVLSTSGSPTDGLSVMQGPYSETASFAALSGGTLSGGILSSGKGKYSRLEVQADVQKEIFPKDTASLGAISDNASTRAMAGSIISSYNPQDRECNNMEIQVDIEAKPSHYQLVSGSSTEDSLHVHAQMAENEEEGSGGGGSEEDPPCRHQSCEQKDCLASKPWDISLAQPESIRSDLESSDAQSDDVPDITSDECGSPRSHTAACPSTPRAQGAPSPSAHMNLSALAEGQTVLKPEGGEARV

SEQ ID NO: 4940 - protein, 297 aa, Homo sapiens
MANWVFCNRCFQPPHRTSCFSLTNCGHVYCDACLGKGKKNECLICKAPCRTVLLSKHTDADIQAFFMSIDSLCKKYSRETSQILEFQEKHRKRLLAFYREKISRLEESLRKSVLQIEQLQSMRSSQQTAFSTIKSSVSTKPHGCLLPPHSSAPDRLESMEVDLSPSPIRKSEIAAGPARISMISPPQDGRMGPHLTASFCFIPWLTLSKPPVPGECVISRGSPCFCIDVCPHWLLLLAFSSGRHGELTNSKTLPIYAEVQRAVLFPFQQAEGTLDTFRTPAVSVVFPLCQFERKKSF

SEQ ID NO: 4941 - protein, 123 aa, Homo sapiens
MANWVFCNRCFQPPHRTSCFSLTNCGHVYCDACLGKGKKNECLICKAPCRTVLLSKHTDADIQAFFMSIDSLCKKYSRETSQILEFQEKHRKRLLAFYREKISRLEESLRKSVLQIEQLQSLR

SEQ ID NO: 4942 - protein, 192 aa, Homo sapiens
MANWVFCNRCFQPPHRTSCFSLTNCGHVYCDACLGKGKKNECLICKAPCRTVLLSKHTDADIQAFFMSIDSLCKKYSRETSQILEFQEKHRKRLLAFYREKISRLEESLRKSVLQIEQLQSMRSSQQTAFSTIKSSVSTKPHGCLLPPHSSAPDRLESMEVDLSPSPIRKSEIAAGPARISMISPPQDGRMG

SEQ ID NO: 4943 - protein, 280 aa, Homo sapiens
MANWVFCNRCFQPPHRTSCFSLTNCGHVYCDACLGKGKKNECLICKAPCRTVLLSKHTDADIQAFFMSIDSLCKKYSRETSQYLRLSRGCCRLKLCPATSSKEVPRGSTHGSQAAARDPQEHWVSTTRAPRPGCRRSQSQPEAQGNTIQDAPHPLTLLHPSRTLIHTKSPWGQKLLEFIKHVCYHRHQSHRPCAPGWFCQVLQRPGAVSGEKTQQTRPAPPATCLLCLSCLSGFRHGPWRWLAPAWAAQALPSDLVAPLFVSYTVEVSITNAGWSFPAAV

SEQ ID NO: 4944 - protein, 232 aa, Homo sapiens
MANWVFCNRCFQPPHRTSCFSLTNCGHVYCDACLGKGKKNECLICKAPCRTVLLSKHTDADIQAFFMSIDSLCKKYSRETSQILEFQEKHRKRLLAFYREKISRLEESLRKSVLQIEQLQSMRSSQQTAFSTIKSSVSTKPHGCLLPPHSSAPDRLESMEVDLSPSPIRKSEIAAGPARISMISPPQDGRMAPCARRVCHFQRFTMFLHRRLSSLAAPPSVQFWKARGTHQL

SEQ ID NO: 4945 - protein, 273 aa, Homo sapiens
MANWVFCNRCFQPPHRTSCFSLTNCGHVYCDACLGKGKKNECLICKAPCRTVLLSKHTDADIQAFFMSIDSLCKKYSRETSQYLRLSRGCCRLKLCPATSSKEVPRGSTHGSQAAARDPQEHWVSTTRAPRPGCRRSQSQPEAQGNTIQDAPHPLTLLHPSRTLIHTKSPWGQKLLEFIKHVCYHRHQSHRPCAPGWFCQVLQRPGAVSGEKTQQTRPAPPATCLLCLSCLSGFRHGPWRSQALPSDLVAPLFVSYTVEVSITNAGWSFPAAV

SEQ ID NO: 4946 - protein, 1007 aa, Homo sapiens
MGSGGDSLLGGRGSLPLLLLLIMGGMAQDSPPQILVHPQDQLFQGPGPARMSCQASGQPPPTIRWLLNGQPLSMVPPDPHHLLPDGTLLLLQPPARGHAHDGQALSTDLGVYTCEASNRLGTAVSRGARLSVAVLREDFQIQPRDMVAVVGEQFTLECGPPWGHPEPTVSWWKDGKPLALQPGRHTVSGGSLLMARAEKSDEGTYMCVATNSAGHRESRAARVSIQEPQDYTEPVELLAVRIQLENVTLLNPDPAEGPKPRPAVWLSWKVSGPAAPAQSYTALFRTQTAPGGQGAPWAEELLAGWQSAELGGLHWGQDYEFKVRPSSGRARGPDSNVLLLRLPEKVPSAPPQEVTLKPGNGTVFVSWVPPPAENHNGIIRGYQVWSLGNTSLPPANWTVVGEQTQLEIATHMPGSYCVQVAAVTGAGAGEPSRPVCLLLEQAMERATQEPSEHGPWTLEQLRATLKRPEVIATCGVALWLLLLGTAVCIHRRRRARVHLGPGLYRYTSEDAILKHRMDHSDSQWLADTWRSTSGSRDLSSSSSLSSRLGADARDPLDCRRSLLSWDSRSPGVPLLPDTSTFYGSLIAELPSSTPARPSPQVPAVRRLPPQLAQLSSPCSSSDSLCSRRGLSSPRLSLAPAEAWKAKKKQELQHANSSPLLRGSHSLELRACELGNRGSKNLSQSPGAVPQALVAWRALGPKLLSSSNELVTRHLPPAPLFPHETPPTQSQQTQPPVAPQAPSSILLPAAPIPILSPCSPPSPQASSLSGPSPASSRLSSSSLSSLGEDQDSVLTPEEVALCLELSEGEETPRNSVSPMPRAPSPPTTYGYISVPTASEFTDMGRTGGGVGPKGGVLLCPPRPCLTPTPSEGSLANGWGSASEDNAASARASLVSSSDGSFLADAHFARALAVAVDSFGFGLEPREADCVFIDASSPPSPRDEIFLTPNLSLPLWEWRPDWLEDMEVSHTQRLGRGMPPWPPDSQISSQRSQLHCRMPKAGASPVDYS

SEQ ID NO: 4947 - protein, 933 aa, Homo sapiens
MGSGGDSLLGGRGSLPLLLLLIMGGMAQDSPPQILVHPQDQLFQGPGPARMSCQASGQPPPTIRWLLNGQPLSMVPPDPHHLLPDGTLLLLQPPARGHAHDGQALSTDLGVYTCEASNRLGTAVSRGARLSVAVLREDFQIQPRDMVAVVGEQFTLECGPPWGHPEPTVSWWKDGKPLALQPGRHTVSGGSLLMARAEKSDEGTYMCVATNSAGHRESRAARVSIQEPQDYTEPVELLAVRIQLENVTLLNPDPAEGPKPRPAVWLSWKVSGPAAPAQSYTALFRTQTAPGGQGAPWAEELLAGWQSAELGGLHWGQDYEFKVRPSSGRARGPDSNVLLLRLPEKVPSAPPQEVTLKPGNGTVFVSWVPPPAENHNGIIRGYQVWSLGNTSLPPANWTVVGEQTQLEIATHMPGSYCVQVAAVTGAGAGEPSRPVCLLLEQAMERATQEPSEHGPWTLEQLRATLKRPEVIATCGVALWLLLLGTAVCIHRRRRARVHLGPGLYRYTSEDAILKHRMDHSDSQWLADTWRSTSGSRDLSSSSSLSSRLGADARDPLDCRRSLLSWDSRSPGVPLLPDTSTFYGSLIAELPSSTPARPSPQVPAVRRLPPQLAQLSSPCSSSDSLCSRRGLSSPRLSLAPAEAWKAKKKQELQHANSSPLLRGSHSLELRACELGNRGSKNLSQSPGAVPQALVAWRALGPKLLSSSNELVTRHLPPAPLFPHETPPTQSQQTQPPVAPQAPSSILLPAAPIPILSPCSPPSPQASSLSGPSPASSRLSSSSLSSLGEDQDSVLTPEEVALCLELSEGEETPRNSVSPMPRAPSPPTTYGYISVPTASEFTDMGRTGGGVGPKGGVLLCPPRPCLTPTPSEGSLANGWGSASEDNAASARASLVSSSDGSFLADAHFARALAVAVDSFGFGLEPREADCVFIGM

SEQ ID NO: 4948 - protein, 702 aa, Homo sapiens
MGSGGDSLLGGRGSLPLLLLLIMVLREDFQIQPRDMVAVVGEQFTLECGPPWGHPEPTVSWWKDGKPLALQPGRHTVSGGSLLMARAEKSDEGTYMCVATNSAGHRESRAARVSIQEPQDYTEPVELLAVRIQLENVTLLNPDPAEGPKPRPAVWLSWKVSGPAAPAQSYTALFRTQTAPGGQGAPWAEELLAGWQSAELGGLHWGQDYEFKVRPSSGRARGPDSNVLLLRLPEKVPSAPPQEVTLKPGNGTVFVSWVPPPAENHNGIIRGYQVWSLGNTSLPPANWTVVGEQTQLEIATHMPGSYCVQVAAVTGAGAGEPSRPVCLLLEQAMERATQEPSEHGPWTLEQLRATLKRPEVIATCGVALWLLLLGTAVCIHRRRRARVHLGPGLYRYTSEDAILKHRMDHSDSQWLADTWRSTSGSRDLSSSSSLSSRLGADARDPLDCRRSLLSWDSRSPGVPLLPDTSTFYGSLIAELPSSTPARPSPQVPAVRRLPPQLAQLSSPCSSSDSLCSRRGLSSPRLSLAPAEAWKAKKKQELQHANSSPLLRGSHSLELRACELGNRGSKNLSQSPGAVPQALVAWRALGPKLLSSSNELVTRHLPPAPLFPHETPPTQSQQTQPPVAPQAPSSILLPAAPIPILSPCSPPSPQASSLSGPSPASSRLSSSSLSSLGEDQDSVLTPEEVALCLELSEGEETPR

SEQ ID NO: 4949 - protein, 120 aa, Homo sapiens
MNATFLNHSGLEEVDGVGGGAGAALGNRTHGLGTWLGCCPGGAPLAASDGVPAGLAPDERSLWVSRVAQIAVLCVLSLTVVFGVFFLGCNLLIKSESMINFLVQERRPSKDVGAAILGLY

SEQ ID NO: 4950 - protein, 206 aa, Homo sapiens
MAEDADMRNELEEMQRRADQLADESLESTRRMLQLVEESKDAGIRTLVMLDEQGEQLERIEEGMDQINKDMKEAEKNLTDLGKFCGLCVCPCNKLKSSDAYKKAWGNNQDGVVASQPARVVDEREQMAISGGFIRRVTNDARENEMDENLEQVSGIIGNLRHMALDMGNEIDTQNRQIDRIMEKADSNKTRIDEANQRATKMLGSG

SEQ ID NO: 4951 - protein, 206 aa, Homo sapiens
MAEDADMRNELEEMQRRADQLADESLESTRRMLQLVEESKDAGIRTLVMLDEQGEQLDRVEEGMNHINQDMKEAEKNLKDLGKCCGLFICPCNKLKSSDAYKKAWGNNQDGVVASQPARVVDEREQMAISGGFIRRVTNDARENEMDENLEQVSGIIGNLRHMALDMGNEIDTQNRQIDRIMEKADSNKTRIDEANQRATKMLGSG

SEQ ID NO: 4952 - protein, 1230 aa, Homo sapiens
MSALCWGRGAAGLKRALRPCGRPGLPGKEGTAGGVCGPRRSSSASPQEQDQDRRKDWGHVELLEVLQARVRQLQAESVSEVVVNRVDVARLPECGSGDGSLQPPRKVQMGAKDATPVPCGRWAKILEKDKRTQQMRMQRLKAKLQMPFQSGEFKALTRRLQVEPRLLSKQMAGCLEDCTRQAPESPWEEQLARLLQEAPGKLSLDVEQAPSGQHSQAQLSGQQQRLLAFFKCCLLTDQLPLAHHLLVVHHGQRQKRKLLTLDMYNAVMLGWARQGAFKELVYVLFMVKDAGLTPDLLSYAAALQCMGRQDQDAGTIERCLEQMSQEGLKLQALFTAVLLSEEDRATVLKAVHKVKPTFSLPPQLPPPVNTSKLLRDVYAKDGRVSYPKLHLPLKTLQCLFEKQLHMELASRVCVVSVEKPTLPSKEVKHARKTLKTLRDQWEKALCRALRETKNRLEREVYEGRFSLYPFLCLLDEREVVRMLLQVLQALPAQGESFTTLARELSARTFSRHVVQRQRVSGQVQALQNHYRKYLCLLASDAEVPEPCLPRQYWEELGAPEALREQPWPLPVQMELGKLLAEMLVQATQMPCSLDKPHRSSRLVPVLYHVYSFRNVQQIGILKPHPAYVQLLEKAAEPTLTFEAVDVPMLCPPLPWTSPHSGAFLLSPTKLMRTVEGATQHQELLETCPPTALHGALDALTQLGNCAWRVNGRVLDLVLQLFQAKGCPQLGVPAPPSEAPQPPEAHLPHSAAPARKAELRRELAHCQKVAREMHSLRAEALYRLSLAQHLRDRVFWLPHNMDFRGRTYPCPPHFNHLGSDVARALLEFAQGRPLGPHGLDWLKIHLVNLTGLKKREPLRKRLAFAEEVMDDILDSADQPLTGRKWWMGAEEPWQTLACCMEVANAVRASDPAAYVSHLPVHQDGSCNGLQHYAALGRDSVGAASVNLEPSDVPQDVYSGVAAQVEVFRRQDAQRGMRVAQVLEGFITRKVVKQTVMTVVYGVTRYGGRLQIEKRLRELSDFPQEFVWEASHYLVRQVFKSLQEMFSGTRAIQHWLTESARLISHMGSVVEWVTPLGVPVIQPYRLDSKVKQIGGGIQSITYTHNGDISRKPNTRKQKNGFPPNFIHSLDSSHMMLTALHCYRKGLTFVSVHDCYWTHAADVSVMNQVCREQFVRLHSEPILQDLSRFLVKRFCSEPQKILEASQLKETLQAVPKPGAFDLEQVKRSTYFFS

SEQ ID NO: 4953 - protein, 402 aa, Homo sapiens
MDRTETRFRKRGQITGKITTSRQPHPQNEQSPQRSTSGYPLQEVVDDEMLGPSAPGVDPSPPCRSLGWKRKREWSDESEEEPEKELAPEPEETWVVEMLCGLKMKLKQQRVSSILPEHHKDFNSQLAPGVDPSPPHRSFCWKRKMEWWDESEESLEEEPRKVLAPEPEEIWVAEMLCGLKMKLKRRRVSLVLPEHHEAFNRLLEDPVIKRFLAWDKDLRVSDKYLLAMVIAYFSRAGFPSWQYQRIHFFLALYLANDMEEDDEDSKQNIFHFLYRKNRSRIPLLRKPWFQLGHSMNPRARKNRSRIPLLRKRRFQLYRSTNPRARKNRSRIPLLRKRRFQLYRSMNSRARKNRSQIVLFQKRRFHFFCSMSCRAWVSPEELEEIQAYDPEHWVWARDRAHLS

SEQ ID NO: 4954 - protein, 258 aa, Homo sapiens
MEWWDESEESLEEEPRKVLAPEPEEIWVAEMLCGLKMKLKRRRVSLVLPEHHEAFNRLLEDPVIKRFLAWDKDLRVSDKYLLAMVIAYFSRAGFPSWQYQRIHFFLALYLANDMEEDDEDSKQNIFHFLYRKNRSRIPLLRKPWFQLGHSMNPRARKNRSRIPLLRKRRFQLYRSTNPRARKNRSRIPLLRKRRFQLYRSMNSRARKNRSQIVLFQKRRFHFFCSMSCRAWVSPEELEEIQAYDPEHWVWARDRAHLS

SEQ ID NO: 4955 - protein, 183 aa, Homo sapiens
MEQRLAEFRAARKRAGLAAQPPAASQGAQTPGEKAEAAATLKAAPGWLKRFLVWKPRPASARAQPGLVQEAAQPQGSTSETPWNTAIPLPSCWDQSFLTNITFLKVLLWLVLLGLFVELEFGLAYFVLSLFYWMYVGTRGPEEKKEGEKSAYSVFNPGCEAIQGTLTAEQLERELQLRPLAGR

SEQ ID NO: 4956 - protein, 116 aa, Homo sapiens
MLEAAQPQGSTSETPWNTAIPLPSCWDQSFLTNITFLKVLLWLVLLGLFVELEFGLAYFVLSLFYWMYVGTRGPEEKKEGEKSAYSVFNPGCEAIQGTLTAEQLERELQLRPLAGR

SEQ ID NO: 4957 - protein, 314 aa, Homo sapiens
MGIGRSEGGRRGAALGVLLALGAALLAVGSASEYDYVSFQSDIGPYQSGRFYTKPPQCVDIPADLRLCHNVGYKKMVLPNLLEHETMAEVKQQASSWVPLLNKNCHAGTQVFLCSLFAPVCLDRPIYPCRWLCEAVRDSCEPVMQFFGFYWPEMLKCDKFPEGDVCIAMTPPNATEASKPQGTTVCPPCDNELKSEAIIEHLCASEFALRMKIKEVKKENGDKKIVPKKKKPLKLGPIKKKDLKKLVLYLKNGADCPCHQLDNLSHHFLIMGRKVKSQYLLTAIHKWDKKNKEFKNFMKKMKNHECPTFQSVFK

SEQ ID NO: 4958 - protein, 552 aa, Homo sapiens
MDNMSITNTPTSNDACLSIVHSLMCHRQGGESETFAKRAIESLVKKLKEKKDELDSLITAITTNGAHPSKCVTIQRTLDGRLQVAGRKGFPHVIYARLWRWPDLHKNELKHVKYCQYAFDLKCDSVCVNPYHYERVVSPGIDLSGLTLQSNAPSSMMVKDEYVHDFEGQPSLSTEGHSIQTIQHPPSNRASTETYSTPALLAPSESNATSTANFPNIPVASTSQPASILGGSHSEGLLQIASGPQPGQQQNGFTGQPATYHHNSTTTWTGSRTAPYTPNLPHHQNGHLQHHPPMPPHPGHYWPVHNELAFQPPISNHPAPEYWCSIAYFEMDVQVGETFKVPSSCPIVTVDGYVDPSGGDRFCLGQLSNVHRTEAIERARLHIGKGVQLECKGEGDVWVRCLSDHAVFVQSYYLDREAGRAPGDAVHKIYPSAYIKVFDLRQCHRQMQQQAATAQAAAAAQAAAVAGNIPGPGSVGGIAPAISLSAAAGIGVDDLRRLCILRMSFVKGWGPDYPRQSIKETPCWIEIHLHRALQLLDEVLHTMPIADPQPLD

SEQ ID NO: 4959 - protein, 831 aa, Homo sapiens
MERPWGAADGLSRWPHGLGLLLLLQLLPPSTLSQDRLDAPPPPAAPLPRWSGPIGVSWGLRAAAAGGAFPRGGRWRRSAPGEDEECGRVRDFVAKLANNTHQHVFDDLRGSVSLSWVGDSTGVILVLTTFHVPLVIMTFGQSKLYRSEDYGKNFKDITDLINNTFIRTEFGMAIGPENSGKVVLTAEVSGGSRGGRIFRSSDFAKNFVQTDLPFHPLTQMMYSPQNSDYLLALSTENGLWVSKNFGGKWEEIHKAVCLAKWGSDNTIFFTTYANGSCKADLGALELWRTSDLGKSFKTIGVKIYSFGLGGRFLFASVMADKDTTRRIHVSTDQGDTWSMAQLPSVGQEQFYSILAANDDMVFMHVDEPGDTGFGTIFTSDDRGIVYSKSLDRHLYTTTGGETDFTNVTSLRGVYITSVLSEDNSIQTMITFDQGGRWTHLRKPENSECDATAKNKNECSLHIHASYSISQKLNVPMAPLSEPNAVGIVIAHGSVGDAISVMVPDVYISDDGGYSWTKMLEGPHYYTILDSGGIIVAIEHSSRPINVIKFSTDEGQCWQTYTFTRDPIYFTGLASEPGARSMNISIWGFTESFLTSQWVSYTIDFKDILERNCEEKDYTIWLAHSTDPEDYEDGCILGYKEQFLRLRKSSVCQNGRDYVVTKQPSICLCSLEDFLCDFGYYRPENDSKCVEQPELKGHDLEFCLYGREEHLTTNGYRKIPGDKCQGGVNPVREVKDLKKKCTSNFLSPEKQNSKSNSVPIILAIVGLMLVTVVAGVLIVKKYVCGGRFLVHRYSVLQQHAEANGVDGVDALDTASHTNKSGYHDDSDEDLLE

SEQ ID NO: 4960 - protein, 694 aa, Homo sapiens
MTFGQSKLYRSEDYGKNFKDITDLINNTFIRTEFGMAIGPENSGKVVLTAEVSGGSRGGRIFRSSDFAKNFVQTDLPFHPLTQMMYSPQNSDYLLALSTENGLWVSKNFGGKWEEIHKAVCLAKWGSDNTIFFTTYANGSCTDLGALELWRTSDLGKSFKTIGVKIYSFGLGGRFLFASVMADKDTTRRIHVSTDQGDTWSMAQLPSVGQEQFYSILAANDDMVFMHVDEPGDTGFGTIFTSDDRGIVYSKSLDRHLYTTTGGETDFTNVTSLRGVYITSVLSEDNSIQTMITFDQGGRWTHLRKPENSECDATAKNKNECSLHIHASYSISQKLNVPMAPLSEPNAVGIVIAHGSVGDAISVMVPDVYISDDGGYSWTKMLEGPHYYTILDSGGIIVAIEHSSRPINVIKFSTDEGQCWQTYTFTRDPIYFTGLASEPGARSMNISIWGFTESFLTSQWVSYTIDFKDILERNCEEKDYTIWLAHSTDPEDYEDGCILGYKEQFLRLRKSSVCQNGRDYVVTKQPSICLCSLEDFLCDFGYYRPENDSKCVEQPELKGHDLEFCLYGREEHLTTNGYRKIPGDKCQGGVNPVREVKDLKKKCTSNFLSPEKQNSKSNSVPIILAIVGLMLVTVVAGVLIVKKYVCGGRFLVHRYSVLQQHAEANGVDGVDALDTASHTNKSGYHDDSDEDLLE

SEQ ID NO: 4961 - protein, 207 aa, Homo sapiens
MSCTIEKILTDAKTLLERLREHDAAAESLVDQSAALHRRVAAMREAGTALPDQYQEDASDMKDMSKYKPHILLSQENTQIRDLQQENRELWISLEEHQDALELIMSKYRKQMLQLMVAKKAVDAEPVLKAHQSHSAEIESQIDRICEMGEVMRKAVQVDDDQFCKIQEKLAQLELENKELRELLSISSESLQARKENSMDTASQAIK

SEQ ID NO: 4962 - protein, 211 aa, Homo sapiens
MSCTIEKILTDAKTLLERLREHDAAAESLVDQSAALHRRVAAMREAGTALPDQVRQRYQEDASDMKDMSKYKPHILLSQENTQIRDLQQENRELWISLEEHQDALELIMSKYRKQMLQLMVAKKAVDAEPVLKAHQSHSAEIESQIDRICEMGEVMRKAVQVDDDQFCKIQEKLAQLELENKELRELLSISSESLQARKENSMDTASQAIK

SEQ ID NO: 4963 - protein, 276 aa, Homo sapiens
MGNSMKSTPAPAERPLPNPEGLDSDFLAVLSDYPSPDISPPIFRRGEKLRVISDEGGWWKAISLSTGRESYIPGICVARVYHGWLFEGLGRDKAEELLQLPDTKVGSFMIRESETKKGFYSLSVRHRQVKHYRIFRLPNNWYYISPRLTFQCLEDLVNHYSEVADGLCCVLTTPCLTQSTAAPAVRASSSPVTLRQKTVDWRRVSRLQEDPEGTENPLGVDESLFSYGLRESIASYLSLTSEDNTSFDRKKKSISLMYGGSKRKSSFFSSPPYFED

SEQ ID NO: 4964 - protein, 168 aa, Homo sapiens
MIRESETKKGFYSLSVRHRQVKHYRIFRLPNNWYYISPRLTFQCLEDLVNHYSEVADGLCCVLTTPCLTQSTAAPAVRASSSPVTLRQKTVDWRRVSRLQEDPEGTENPLGVDESLFSYGLRESIASYLSLTSEDNTSFDRKKKSISLMYGGSKRKSSFFSSPPYFED

SEQ ID NO: 4965 - protein, 293 aa, Homo sapiens
MLHRLWASPAAPGKKKEMGNSMKSTPAPAERPLPNPEGLDSDFLAVLSDYPSPDISPPIFRRGEKLRVISDEGGWWKAISLSTGRESYIPGICVARVYHGWLFEGLGRDKAEELLQLPDTKVGSFMIRESETKKGFYSLSVRHRQVKHYRIFRLPNNWYYISPRLTFQCLEDLVNHYSEVADGLCCVLTTPCLTQSTAAPAVRASSSPVTLRQKTVDWRRVSRLQEDPEGTENPLGVDESLFSYGLRESIASYLSLTSEDNTSFDRKKKSISLMYGGSKRKSSFFSSPPYFED

SEQ ID NO: 4966 - protein, 249 aa, Homo sapiens
MLHRLWASPAAPGKKKEMGNSMKSTPAPAERPLPNPEGLDSDFLAVLSDYPSPDISPPIFRRGEKLRVISDEGGWWKAISLSTGRESYIPGICVARVYHGWLFEGLGRDKAEELLQLPDTKVGSFMIRESETKKEVADGLCCVLTTPCLTQSTAAPAVRASSSPVTLRQKTVDWRRVSRLQEDPEGTENPLGVDESLFSYGLRESIASYLSLTSEDNTSFDRKKKSISLMYGGSKRKSSFFSSPPYFED

SEQ ID NO: 4967 - protein, 316 aa, Homo sapiens
MLSKLGHSPLGGLRARLTFPVCLLYHRLWASPAAPGKKKEMGNSMKSTPAPAERPLPNPEGLDSDFLAVLSDYPSPDISPPIFRRGEKLRVISDEGGWWKAISLSTGRESYIPGICVARVYHGWLFEGLGRDKAEELLQLPDTKVGSFMIRESETKKGFYSLSVRHRQVKHYRIFRLPNNWYYISPRLTFQCLEDLVNHYSEVADGLCCVLTTPCLTQSTAAPAVRASSSPVTLRQKTVDWRRVSRLQEDPEGTENPLGVDESLFSYGLRESIASYLSLTSEDNTSFDRKKKSISLMYGGSKRKSSFFSSPPYFED

SEQ ID NO: 4968 - protein, 577 aa, Homo sapiens
MLTPAFDLSQDPDFLTIAIRVPYARVSEFDVYFEGSDFKFYAKPYFLRLTLPGRIVENGSEQGSYDADKGIFTIRLPKETPGQHFEGLNMLTALLAPRKSRTAKPLVEEIGASEIPEEVVDDEEFDWEIEQTPCEEVSESALNPQCHYGFGNLRSGVLQRLQDELSDVIDIKDPDFTPAAERRQKRLAAELAKFDPDHYLADFFEDEAIEQILKYNPWWTDKYSKMMAFLEKSQEQENHATLVSFSEEEKYQLRKFVNKSYLLDKRACRQVCYSLIDILLAYCYETRVTEGEKNVESAWNIRKLSPTLCWFETWTNVHDIMVSFGRRVLCYPLYRHFKLVMKAYRDTIKILQLGKSAVLKCLLDIHKIFQENDPAYILNDLYISDYCVWIQKVKSKKLAALAEALKEVSLTKAQLGLELEELEAAALLVQEEETALKAAHSVSGQQTLCSSSEASDSEDSDSSVSSGNEDSGSDSEQDELKDSPSETVSSLQGPFLEESSAFLIVDGGVRRNTAIQESDASQGKPLASSWPLGVSGPLIEELGEQLKTTVQVSEPKGTTAVNRSNIQERDGCQTPNN

SEQ ID NO: 4969 - protein, 549 aa, Homo sapiens
MNKTWSLSLKNGDCSCGGPILTLPGRIVENGSEQGSYDADKGIFTIRLPKETPGQHFEGLNMLTALLAPRKSRTAKPLVEEIGASEIPEEVVDDEEFDWEIEQTPCEEVSESALNPQCHYGFGNLRSGVLQRLQDELSDVIDIKDPDFTPAAERRQKRLAAELAKFDPDHYLADFFEDEAIEQILKYNPWWTDKYSKMMAFLEKSQEQENHATLVSFSEEEKYQLRKFVNKSYLLDKRACRQVCYSLIDILLAYCYETRVTEGEKNVESAWNIRKLSPTLCWFETWTNVHDIMVSFGRRVLCYPLYRHFKLVMKAYRDTIKILQLGKSAVLKCLLDIHKIFQENDPAYILNDLYISDYCVWIQKVKSKKLAALAEALKEVSLTKAQLGLELEELEAAALLVQEEETALKAAHSVSGQQTLCSSSEASDSEDSDSSVSSGNEDSGSDSEQDELKDSPSETVSSLQGPFLEESSAFLIVDGGVRRNTAIQESDASQGKPLASSWPLGVSGPLIEELGEQLKTTVQVSEPKGTTAVNRSNIQERDGCQTPNN

SEQ ID NO: 4970 - protein, 440 aa, Homo sapiens
MQKGKGRTSRIRRRKLCGSSESRGVNESHKSEFIELRKWLKARKFQDSNLAPACFPGTGRGLMSQTSLQEGQMIISLPESCLLTTDTVIRSYLGAYITKWKPPPSPLLALCTFLVSEKHAGHRSLWKPYLEILPKAYTCPVCLEPEVVNLLPKSLKAKAEEQRAHVQEFFASSRDFFSSLQPLFAEAVDSIFSYSALLWAWCTVNTRAVYLRPRQRECLSAEPDTCALAPYLDLLNHSPHVQVKAAFNEETHSYEIRTTSRWRKHEEVFICYGPHDNQRLFLEYGFVSVHNPHACVYVSREILVKYLPSTDKQMDKKISILKDHGYIENLTFGWDGPSWRLLTALKLLCLEAEKFTCWKKVLLGEVISDTNEKTSLDIAQKICYYFIEETNAVLQKVSHMKDEKEALINQLTLVESLWTEELKILRASAETLHSLQTAFT

SEQ ID NO: 4971 - protein, 129 aa, Homo sapiens
MQKGKGRTSRIRRRKLCGSSESRGVNESHKSEFIELRKWLKARKFQDSNLAPACFPGTGRGLMSQTSLQVEASSISSAGAVHLFSFRKACWAPISLEALPGDFTQGVYLPCLFGAGSGEPSSQIFKSKG

SEQ ID NO: 4972 - protein, 416 aa, Homo sapiens
MNESHKSEFIELRKWLKARKFQDSNLAPACFPGTGRGLMSQTSLQEGQMIISLPESCLLTTDTVIRSYLGAYITKWKPPPSPLLALCTFLVSEKHAGHRSLWKPYLEILPKAYTCPVCLEPEVVNLLPKSLKAKAEEQRAHVQEFFASSRDFFSSLQPLFAEAVDSIFSYSALLWAWCTVNTRAVYLRPRQRECLSAEPDTCALAPYLDLLNHSPHVQVKAAFNEETHSYEIRTTSRWRKHEEVFICYGPHDNQRLFLEYGFVSVHNPHACVYVSREILVKYLPSTDKQMDKKISILKDHGYIENLTFGWDGPSWRLLTALKLLCLEAEKFTCWKKVLLGEVISDTNEKTSLDIAQKICYYFIEETNAVLQKVSHMKDEKEALINQLTLVESLWTEELKILRASAETLHSLQTAFT

SEQ ID NO: 4973 - protein, 307 aa, Homo sapiens
MQKGKGRTSRIRRRKLCGSSESRGVNESHKSEFIELRKWLKARKFQDSNLAPACFPGTGRGLMSQTSLQEGQMIISLPESCLLTTDTVIRSYLGAYITKWKPPPSPLLALCTFLVSEKHAGHRSLWKPYLEILPKAYTCPVCLEPEVVNLLPKSLKAKAEEQRAHVQEFFASSRDFFSSLQPLFAEAVDSIFSYSALLWAWCTVNTRAVYLRPRQRECLSAEPDTCALAPYLDLLNHSPHVQVKAAFNEETHSYEIRTTSRWRKHEEVFICYGPHDNQRLFLEYGFVSVHNPHACVYVSRGWNQLCS

SEQ ID NO: 4974 - protein, 261 aa, Homo sapiens
MGSLPSRRKSLPSPSLSSSVQGQGPVTMEAERSKATAVALGSFPAGGPAELSLRLGEPLTIVSEDGDWWTVLSEVSGREYNIPSVHVAKVSHGWLYEGLSREKAEELLLLPGNPGGAFLIRESQTRRGSYSLSVRLSRPASWDRIRHYRIHCLDNGWLYISPRLTFPSLQALVDHYSELADDICCLLKEPCVLQRAGPLPGKDIPLPVTVQRTPLNWKELDSSLLFSEAATGEESLLSEGLRESLSFYISLNDEAVSLDDA

SEQ ID NO: 4975 - protein, 210 aa, Homo sapiens
MGSLPSRRKSLPSPSLSSSVQGQGPVTMEAERSKATAVALGSFPAGGPAELSLRLGEPLTIVSEDGDWWTVLSEVSGREYNIPSVHVAKVSHGWLYEGLSREKAEELLLLPGNPGGAFLIRESQTRRGSYSLSVRLSRPASWDRIRHYRIHCLDNGWLYISPRLTFPSLQALVDHYSEGWPAPWQGYTPTCDCAEDTTQLERAGQLPPVF

SEQ ID NO: 4976 - protein, 234 aa, Homo sapiens
MEAERSKATAVALGSFPAGGPAELSLRLGEPLTIVSEDGDWWTVLSEVSGREYNIPSVHVAKVSHGWLYEGLSREKAEELLLLPGNPGGAFLIRESQTRRGSYSLSVRLSRPASWDRIRHYRIHCLDNGWLYISPRLTFPSLQALVDHYSELADDICCLLKEPCVLQRAGPLPGKDIPLPVTVQRTPLNWKELDSSLLFSEAATGEESLLSEGLRESLSFYISLNDEAVSLDDA

SEQ ID NO: 4977 - protein, 183 aa, Homo sapiens
MEAERSKATAVALGSFPAGGPAELSLRLGEPLTIVSEDGDWWTVLSEVSGREYNIPSVHVAKVSHGWLYEGLSREKAEELLLLPGNPGGAFLIRESQTRRGSYSLSVRLSRPASWDRIRHYRIHCLDNGWLYISPRLTFPSLQALVDHYSEGWPAPWQGYTPTCDCAEDTTQLERAGQLPPVF

SEQ ID NO: 4978 - protein, 1442 aa, Homo sapiens
MSIAIPLGVTTSDTSYSDMAAGSDPESVEASPAVNEKSVYSTHNYGTTQRHGCRGLPYATIIPRSDLNGLPSPVEERCGDSPNSEGETVPTWCPCGLSQDGFLLNCDKCRGMSRGKVIRLHRRKQDNISGGDSSATESWDEELSPSTVLYTATQHTPTSITLTVRRTKPKKRKKSPEKGRAAPKTKKIKNSPSEAQNLDENTTEGWENRIRLWTDQYEEAFTNQYSADVQNALEQHLHSSKEFVGKPTILDTINKTELACNNTVIGSQMQLQLGRVTRVQKHRKILRAARDLALDTLIIEYRGKVMLRQQFEVNGHFFKKPYPFVLFYSKFNGVEMCVDARTFGNDARFIRRSCTPNAEVRHMIADGMIHLCIYAVSAITKDAEVTIAFDYEYSNCNYKVDCACHKGNRNCPIQKRNPNATELPLLPPPPSLPTIGAETRRRKARRKELEMEQQNEASEENNDQQSQEVPEKVTVSSDHEEVDNPEEKPEEEKEEVIDDQENLAHSRRTREDRKVEAIMHAFENLEKRKKRRDQPLEQSNSDVEITTTTSETPVGEETKTEAPESEVSNSVSNVTIPSTPQSVGVNTRRSSQAGDIAAEKLVPKPPPAKPSRPRPKSRISRYRTSSAQRLKRQKQANAQQAELSQAALEEGGSNSLVTPTEAGSLDSSGENRPLTGSDPTVVSITGSHVNRAASKYPKTKKYLVTEWLNDKAEKQECPVECPLRITTDPTVLATTLNMLPGLIHSPLICTTPKHYIRFGSPFIPERRRRPLLPDGTFSSCKKRWIKQALEEGMTQTSSVPQETRTQHLYQSNENSSSSSICKDNADLLSPLKKWKSRYLMEQNVTKLLRPLSPVTPPPPNSGSKSPQLATPGSSHPGEEECRNGYSLMFSPVTSLTTASRCNTPLQFELCHRKDLDLAKVGYLDSNTNSCADRPSLLNSGHSDLAPHPSLGPTSETGFPSRSGDGHQTLVRNSDQAFRTEFNLMYAYSPLNAMPRADGLYRGSPLVGDRKPLHLDGGYCSPAEGFSSRYEHGLMKDLSRGSLSPGGERACEGVPSAPQNPPQRKKVSLLEYRKRKQEAKENSAGGGGDSAQSKSKSAGAGQGSSNSVSDTGAHGVQGSSARTPSSPHKKFSPSHSSMSHLEAVSPSDSRGTSSSHCRPQENISSRWMVPTSVERLREGGSIPKVLRSSVRVAQKGEPSPTWESNITEKDSDPADGEGPETLSSALSKGATVYSPSRYSYQLLQCDSPRTESQSLLQQSSSPFRGHPTQSPGYSYRTTALRPGNPPSHGSSESSLSSTSYSSPAHPVSTDSLAPFTGTPGYFSSQPHSGNSTGSNLPRRSCPSSAASPTLQGPSDSPTSDSVSQSSTGTLSSTSFPQNSRSSLPSDLRTISLPSAGQSAVYQASRVSAVSNSQHYPHRGSGGVHQYRLQPLQGSGVKTQTGLS

SEQ ID NO: 4979 - protein, 1331 aa, Homo sapiens
MSRGKVIRLHRRKQDNISGGDSSATESWDEELSPSTVLYTATQHTPTSITLTVRRTKPKKRKKSPEKGRAAPKTKKIKNSPSEAQNLDENTTEGWENRIRLWTDQYEEAFTNQYSADVQNALEQHLHSSKEFVGKPTILDTINKTELACNNTVIGSQMQLQLGRVTRVQKHRKILRAARDLALDTLIIEYRGKVMLRQQFEVNGHFFKKPYPFVLFYSKFNGVEMCVDARTFGNDARFIRRSCTPNAEVRHMIADGMIHLCIYAVSAITKDAEVTIAFDYEYSNCNYKVDCACHKGNRNCPIQKRNPNATELPLLPPPPSLPTIGAETRRRKARRKELEMEQQNEASEENNDQQSQEVPEKVTVSSDHEEVDNPEEKPEEEKEEVIDDQENLAHSRRTREDRKVEAIMHAFENLEKRKKRRDQPLEQSNSDVEITTTTSETPVGEETKTEAPESEVSNSVSNVTIPSTPQSVGVNTRRSSQAGDIAAEKLVPKPPPAKPSRPRPKSRISRYRTSSAQRLKRQKQANAQQAELSQAALEEGGSNSLVTPTEAGSLDSSGENRPLTGSDPTVVSITGSHVNRAASKYPKTKKYLVTEWLNDKAEKQECPVECPLRITTDPTVLATTLNMLPGLIHSPLICTTPKHYIRFGSPFIPERRRRPLLPDGTFSSCKKRWIKQALEEGMTQTSSVPQETRTQHLYQSNENSSSSSICKDNADLLSPLKKWKSRYLMEQNVTKLLRPLSPVTPPPPNSGSKSPQLATPGSSHPGEEECRNGYSLMFSPVTSLTTASRCNTPLQFELCHRKDLDLAKVGYLDSNTNSCADRPSLLNSGHSDLAPHPSLGPTSETGFPSRSGDGHQTLVRNSDQAFRTEFNLMYAYSPLNAMPRADGLYRGSPLVGDRKPLHLDGGYCSPAEGFSSRYEHGLMKDLSRGSLSPGGERACEGVPSAPQNPPQRKKVSLLEYRKRKQEAKENSAGGGGDSAQSKSKSAGAGQGSSNSVSDTGAHGVQGSSARTPSSPHKKFSPSHSSMSHLEAVSPSDSRGTSSSHCRPQENISSRWMVPTSVERLREGGSIPKVLRSSVRVAQKGEPSPTWESNITEKDSDPADGEGPETLSSALSKGATVYSPSRYSYQLLQCDSPRTESQSLLQQSSSPFRGHPTQSPGYSYRTTALRPGNPPSHGSSESSLSSTSYSSPAHPVSTDSLAPFTGTPGYFSSQPHSGNSTGSNLPRRSCPSSAASPTLQGPSDSPTSDSVSQSSTGTLSSTSFPQNSRSSLPSDLRTISLPSAGQSAVYQASRVSAVSNSQHYPHRGSGGVHQYRLQPLQGSGVKTQTGLS

SEQ ID NO: 4980 - protein, 1344 aa, Homo sapiens
MSRGKVIRLHRRKQDNISGGDSSATESWDEELSPSTVLYTATQHTPTSITLTVRRTKPKKRKKSPEKGRAAPKTKKIKAFREGSRKSLRMKNSPSEAQNLDENTTEGWENRIRLWTDQYEEAFTNQYSADVQNALEQHLHSSKEFVGKPTILDTINKTELACNNTVIGSQMQLQLGRVTRVQKHRKILRAARDLALDTLIIEYRGKVMLRQQFEVNGHFFKKPYPFVLFYSKFNGVEMCVDARTFGNDARFIRRSCTPNAEVRHMIADGMIHLCIYAVSAITKDAEVTIAFDYEYSNCNYKVDCACHKGNRNCPIQKRNPNATELPLLPPPPSLPTIGAETRRRKARRKELEMEQQNEASEENNDQQSQEVPEKVTVSSDHEEVDNPEEKPEEEKEEVIDDQENLAHSRRTREDRKVEAIMHAFENLEKRKKRRDQPLEQSNSDVEITTTTSETPVGEETKTEAPESEVSNSVSNVTIPSTPQSVGVNTRRSSQAGDIAAEKLVPKPPPAKPSRPRPKSRISRYRTSSAQRLKRQKQANAQQAELSQAALEEGGSNSLVTPTEAGSLDSSGENRPLTGSDPTVVSITGSHVNRAASKYPKTKKYLVTEWLNDKAEKQECPVECPLRITTDPTVLATTLNMLPGLIHSPLICTTPKHYIRFGSPFIPERRRRPLLPDGTFSSCKKRWIKQALEEGMTQTSSVPQETRTQHLYQSNENSSSSSICKDNADLLSPLKKWKSRYLMEQNVTKLLRPLSPVTPPPPNSGSKSPQLATPGSSHPGEEECRNGYSLMFSPVTSLTTASRCNTPLQFELCHRKDLDLAKVGYLDSNTNSCADRPSLLNSGHSDLAPHPSLGPTSETGFPSRSGDGHQTLVRNSDQAFRTEFNLMYAYSPLNAMPRADGLYRGSPLVGDRKPLHLDGGYCSPAEGFSSRYEHGLMKDLSRGSLSPGGERACEGVPSAPQNPPQRKKVSLLEYRKRKQEAKENSAGGGGDSAQSKSKSAGAGQGSSNSVSDTGAHGVQGSSARTPSSPHKKFSPSHSSMSHLEAVSPSDSRGTSSSHCRPQENISSRWMVPTSVERLREGGSIPKVLRSSVRVAQKGEPSPTWESNITEKDSDPADGEGPETLSSALSKGATVYSPSRYSYQLLQCDSPRTESQSLLQQSSSPFRGHPTQSPGYSYRTTALRPGNPPSHGSSESSLSSTSYSSPAHPVSTDSLAPFTGTPGYFSSQPHSGNSTGSNLPRRSCPSSAASPTLQGPSDSPTSDSVSQSSTGTLSSTSFPQNSRSSLPSDLRTISLPSAGQSAVYQASRVSAVSNSQHYPHRGSGGVHQYRLQPLQGSGVKTQTGLS

SEQ ID NO: 4981 - protein, 461 aa, Homo sapiens
MAPQSLPSSRMAPLGMLLGLLMAACFTFCLSHQNLKEFALTNPEKSSTKETERKETKAEEELDAEVLEVFHPTHEWQALQPGQAVPAGSHVRLNLQTGEREAKLQYEDKFRNNLKGKRLDINTNTYTSQDLKSALAKFKEGAEMESSKEDKARQAEVKRLFRPIEELKKDFDELNVVIETDMQIMVRLINKFNSSSSSLEEKIAALFDLEYYVHQMDNAQDLLSFGGLQVVINGLNSTEPLVKEYAAFVLGAAFSSNPKVQVEAIEGGALQKLLVILATEQPLTAKKKVLFALCSLLRHFPYAQRQFLKLGGLQVLRTLVQEKGTEVLAVRVVTLLYDLVTEKMFAEEEAELTQEMSPEKLQQYRQVHLLPGLWEQGWCEITAHLLALPEHDAREKVLQTLGVLLTTCRDRYRQDPQLGRTLASLQAEYQVLASLELQDGEDEGYFQELLGSVNSLLKELR

SEQ ID NO: 4982 - protein, 78 aa, Homo sapiens
MAASAALSAAAAAAALSGLAVRLSRSAAARGSYGAFCKGLTRTLLTFFDLAWRLRMNFPYFYIVASVMLNVRLQVRIE

SEQ ID NO: 4983 - protein, 299 aa, Homo sapiens
MPGRLLRGLWQRWRRYKYRFVPWIALNLSHNPRTLRYVPEESKDKVISDEDVLGTLLKVFQALFLNDFNKQSEILSMLPESVKSKYQDLLAVEHQGVKLLENRHQQQSTFKPEEILYKTLGFSVAQATSSLISAGKGVFVTKGLVPKGAVVSMYPGTVYQKYEPIFFQSIGNPFIFRCLDGVLIDGNDKGISKVVYRSCNGRDRLGPLKMSDSTWLTSEIHNPLAVGQYVNNCSNDRAANVCYQEFDVPAVFPIELKQYLPNIAYSYDKQSPLRCVVLVALRDINQGEELFSNYYTIVS

SEQ ID NO: 4984 - protein, 271 aa, Homo sapiens
MPGRLLRGLWQRWRRYKYRFVPWIALNLSHNPRTLRYVPEESKDKVISDEDVLGTLLKVFQALFLNDFNKQSEILSMLPESVKSKYQDLLAVEHQGVKLLENRHQQQSTFKPEEILYKTLGFSVAQATSSLISAGKGVFVTKGLVPKGAVVSMYPGTVYQKYEPIFFQSIGNPFIFRCLDGVLIDGNDKGISKVVYRSCNGRDRLGPLKMSDSTWLTSEIHNPLAVGQYVNNCSNDRAANVCYQEFDVPAVFPIELKQYLPNIAYSYDKQR

SEQ ID NO: 4985 - protein, 387 aa, Homo sapiens
MAPPAGGAAAAASDLGSAAVLLAVHAAVRPLGAGPDAEAQLRRLQLSADPERPGRFRLELLGAGPGAVNLEWPLESVSYTIRGPTQHELQPPPGGPGTLSLHFLNPQEAQRWAVLVRGATVEGQNGSKSNSPPALGPEACPVSLPSPPEASTLKGPPPEADLPRSPGNLTEREELAGSLARAIAGGDEKGAAQVAAVLAQHRVALSVQLQEACFPPGPIRLQVTLEDAASAASAASSAHVALQVHPHCTVAALQEQVFSELGFPPAVQRWVIGRCLCVPERSLASYGVRQDGDPAFLYLLSAPREAPATGPSPQHPQKMDGELGRLFPPSLGLPPGPQPAASSLPSPLQPSWSCPSCTFINAPDRPGCEMCSTQRPCTWDPLAAAST

SEQ ID NO: 4986 - protein, 326 aa, Homo sapiens
MAPPAGGAAAAASDLGSAAVLLAVHAAVRPLGAGPDAEAQLRRLQLSADPERPGRFRLELLGAGPGAVNLEWPLESVSYTIRGPTQHELQPPPGGPGTLSLHFLNPQEAQRWAVLVRGATVEGQNGSKSNSPPALGPEACPVSLPSPPEASTLKGPPPEADLPRSPGNLTEREELAGSLARAIAGGDEKGAAQVAAVLAQHRVALSVQLQEACFPPGPIRLQVTLEDAASAASAASSAHVALQVHPHCTVAALQEQVFSELGFPPAVQRWVIGRCLCVPERSLASYGVRQDGDPAFLYLLSAPREAPAQLVLSFLHLHQCPRPPWL

SEQ ID NO: 4987 - protein, 74 aa, Homo sapiens
MFDIKAWAEYVVEWAAKDPYGFLTTVILALTPLFLASAVLSWKLAKMIEAREKEQKKKQKRQENIAKAKRLKKD

SEQ ID NO: 4988 - protein, 2677 aa, Homo sapiens
MSTCCWCTPGGASTIDFLKRYASNTPSGEFQTADEDLCYCLECVAEYHKARDELPFLHEVLWELETLRLINHFEKSMKAEIGDDDELYIVDNNGEMPLFDITGQDFENKLRVPLLEILKYPYLLLHERVNELCVEALCRMEQANCSFQVFDKHPGIYLFLVHPNEMVRRWAILTARNLGKVDRDDYYDLQEVLLCLFKVIELGLLESPDIYTSSVLEKGKLILLPSHMYDTTNYKSYWLGICMLLTILEEQAMDSLLLGSDKQNDFMQSILHTMEREADDDSVDPFWPALHCFMVILDRLGSKVWGQLMDPIVAFQTIINNASYNREIRHIRNSSVRTKLEPESYLDDMVTCSQIVYNYNPEKTKKDSGWRTAICPDYCPNMYEEMETLASVLQSDIGQDMRVHNSTFLWFIPFVQSLMDLKDLGVAYIAQVVNHLYSEVKEVLNQTDAVCDKVTEFFLLILVSVIELHRNKKCLHLLWVSSQQWVEAVVKCAKLPTTAFTRSSEKSSGNCSKGTAMISSLSLHSMPSNSVQLAYVQLIRSLLKEGYQLGQQSLCKRFWDKLNLFLRGNLSLGWQLTSQETHELQSCLKQIIRNIKFKAPPCNTFVDLTSACKISPASYNKEESEQMGKTSRKDMHCLEASSPTFSKEPMKVQDSVLIKADNTIEGDNNEQNYIKDVKLEDHLLAGSCLKQSSKNIFTERAEDQIKISTRKQKSVKEISSYTPKDCTSRNGPERGCDRGIIVSTRLLTDSSTDALEKVSTSNEDFSLKDDALAKTSKRKTKVQKDEICAKLSHVIKKQHRKSTLVDNTINLDENLTVSNIESFYSRKDTGVQKGDGFIHNLSLDPSGVLDDKNGEQKSQNNVLPKEKQLKNEELVIFSFHENNCKIQEFHVDGKELIPFTEMTNASEKKSSPFKDLMTVPESRDEEMSNSTSVIYSNLTREQAPDISPKSDTLTDSQIDRDLHKLSLLAQASVITFPSDSPQNSSQLQRKVKEDKRCFTANQNNVGDTSRGQVIIISDSDDDDDERILSLEKLTKQDKICLEREHPEQHVSTVNSKEEKNPVKEEKTETLFQFEESDSQCFEFESSSEVFSVWQDHPDDNNSVQDGEKKCLAPIANTTNGQGCTDYVSEVVKKGAEGIEEHTRPRSISVEEFCEIEVKKPKRKRSEKPMAEDPVRPSSSVRNEGQSDTNKRDLVGNDFKSIDRRTSTPNSRIQRATTVSQKKSSKLCTCTEPIRKVPVSKTPKKTHSDAKKGQNRSSNYLSCRTTPAIVPPKKFRQCPEPTSTAEKLGLKKGPRKAYELSQRSLDYVAQLRDHGKTVGVVDTRKKTKLISPQNLSVRNNKKLLTSQELQMQRQIRPKSQKNRRRLSDCESTDVKRAGSHTAQNSDIFVPESDRSDYNCTGGTEVLANSNRKQLIKCMPSEPETIKAKHGSPATDDACPLNQCDSVVLNGTVPTNEVIVSTSEDPLGGGDPTARHIEMAALKEGEPDSSSDAEEDNLFLTQNDPEDMDLCSQMENDNYKLIELIHGKDTVEVEEDSVSRPQLESLSGTKCKYKDCLETTKNQGEYCPKHSEVKAADEDVFRKPGLPPPASKPLRPTTKIFSSKSTSRIAGLSKSLETSSALSPSLKNKSKGIQSILKVPQPVPLIAQKPVGEMKNSCNVLHPQSPNNSNRQGCKVPFGESKYFPSSSPVNILLSSQSVSDTFVKEVLKWKYEMFLNFGQCGPPASLCQSISRPVPVRFHNYGDYFNVFFPLMVLNTFETVAQEWLNSPNRENFYQLQVRKFPADYIKYWEFAVYLEECELAKQLYPKENDLVFLAPERINEEKKDTERNDIQDLHEYHSGYVHKFRRTSVMRNGKTECYLSIQTQENFPANLNELVNCIVISSLVTTQRKLKAMSLLGSRNQLARAVLNPNPMDFCTKDLLTTTSERIIAYLRDFNEDQKKAIETAYAMVKHSPSVAKICLIHGPPGTGKSKTIVGLLYRLLTENQRKGHSDENSNAKIKQNRVLVCAPSNAAVDELMKKIILEFKEKCKDKKNPLGNCGDINLVRLGPEKSINSEVLKFSLDSQVNHRMKKELPSHVQAMHKRKEFLDYQLDELSRQRALCRGGREIQRQELDENISKVSKERQELASKIKEVQGRPQKTQSIIILESHIICCTLSTSGGLLLESAFRGQGGVPFSCVIVDEAGQSCEIETLTPLIHRCNKLILVGDPKQLPPTVISMKAQEYGYDQSMMARFCRLLEENVEHNMISRLPILQLTVQYRMHPDICLFPSNYVYNRNLKTNRQTEAIRCSSDWPFQPYLVFDVGDGSERRDNDSYINVQEIKLVMEIIKLIKDKRKDVSFRNIGIITHYKAQKTMIQKDLDKEFDRKGPAEVDTVDAFQGRQKDCVIVTCVRANSIQGSIGFLASLQRLNVTITRAKYSLFILGHLRTLMENQHWNQLIQDAQKRGAIIKTCDKNYRHDAVKILKLKPVLQRSLTHPPTIAPEGSRPQGGLPSSKLDSGFAKTSVAASLYHTPSDSKEITLTVTSKDPERPPVHDQLQDPRLLKRMGIEVKGGIFLWDPQPSSPQHPGATPPTGEPGFPVVHQDLSHIQQPAAVVAALSSHKPPVRGEPPAASPEASTCQSKCDDPEEELCHRREARAFSEGEQEKCGSETHHTRRNSRWDKRTLEQEDSSSKKRKLL

SEQ ID NO: 4989 - protein, 2644 aa, Homo sapiens
MSTCCWCTPGGASTIDFLKRYASNTPSGEFQTADEDLCYCLECVAEYHKARDELPFLHEVLWELETLRLINHFEKSMKAEIGDDDELYIVDNNGEMPLFDITGQDFENKLRVPLLEILKYPYLLLHERVNELCVEALCRMEQANCSFQVFDKHPGIYLFLVHPNEMVRRWAILTARNLGKVDRDDYYDLQEVLLCLFKVIELGLLESPDIYTSSVLEKGKLILLPSHMYDTTNYKSYWLGICMLLTILEEQAMDSLLLGSDKQNDFMQSILHTMEREADDDSVDPFWPALHCFMVILDRLGSKVWGQLMDPIVAFQTIINNASYNREIRHIRNSSVRTKLEPESYLDDMVTCSQIVYNYNPEKTKKDSGWRTAICPDYCPNMYEEMETLASVLQSDIGQDMRVHNSTFLWFIPFVQSLMDLKDLGVAYIAQVVNHLYSEVKEVLNQTDAVCDKVTEFFLLILVSVIELHRNKKCLHLLWVSSQQWVEAVVKCAKLPTTAFTRSSEKSSGNCSKGTAMISSLSLHSMPSNSVQLAYVQLIRSLLKEGYQLGQQSLCKRFWDKLNLFLRGNLSLGWQLTSQETHELQSCLKQIIRNIKFKAPPCNTFVDLTSACKISPASYNKEESEQMGKTSRKDMHCLEASSPTFSKEPMKVQDSVLIKADNTIEGDNNEQNYIKDVKLEDHLLAGSCLKQSSKNIFTERAEDQIKISTRKQKSVKEISSYTPKDCTSRNGPERGCDRGIIVSTRLLTDSSTDALEKVSTSNEDFSLKDDALAKTSKRKTKVQKDEICAKLSHVIKKQHRKSTLVDNTINLDENLTVSNIESFYSRKDTGVQKGDGFIHNLSLDPSGVLDDKNGEQKSQNNVLPKEKQLKNEELVIFSFHENNCKIQEFHVDGKELIPFTEMTNASEKKSSPFKDLMTVPESRDEEMSNSTSVIYSNLTREQAPDISPKSDTLTDSQIDRDLHKLSLLAQASVITFPSDSPQNSSQLQRKVKEDKRCFTANQNNVGDTSRGQVIIISDSDDDDDERILSLEKLTKQDKICLEREHPEQHVSTVNSKEEKNPVKEEKTETLFQFEESDSQCFEFESSSEVFSVWQDHPDDNNSVQDGEKKCLAPIANTTNGQGCTDYVSEVVKKGAEGIEEHTRPRSISVEEFCEIEVKKPKRKRSEKPMAEDPVRPSSSVRNEGQSDTNKRDLVGNDFKSIDRRTSTPNSRIQRATTVSQKKSSKLCTCTEPIRKVPVSKTPKKTHSDAKKGQNRSSNYLSCRTTPAIVPPKKFRQCPEPTSTAEKLGLKKGPRKAYELSQRSLDYVAQLRDHGKTVGVVDTRKKTKLISPQNLSVRNNKKLLTSQELQMQRQIRPKSQKNRRRLSDCESTDVKRAGSHTAQNSDIFVPESDRSDYNCTGGTEVLANSNRKQLIKCMPSEPETIKAKHGSPATDDACPLNQCDSVVLNGTVPTNEVIVSTSEDPLGGGDPTARHIEMAALKEGEPDSSSDAEEDNLFLTQNDPEDMDLCSQMENDNYKLIELIHGKDTVEVEEDSVSRPQLESLSGTKCKYKDCLETTKNQGEYCPKHSEVKAADEDVFRKPGLPPPASKPLRPTTKIFSSKSTSRIAGLSKSLETSSALSPSLKNKSKGIQSILKVPQPVPLIAQKPVGEMKNSCNVLHPQSPNNSNRQGCKVPFGESKYFPSSSPVNILLSSQSVSDTFVKEVLKWKYEMFLNFGQCGPPASLCQSISRPVPVRFHNYGDYFNVFFPLMVLNTFETVAQEWLNSPNRENFYQLQVRKFPADYIKYWEFAVYLEECELAKQLYPKENDLVFLAPERINEEKKDTERNDIQDLHEYHSGYVHKFRRTSVMRNGKTECYLSIQTQENFPANLNELVNCIVISSLVTTQRKLKAMSLLGSRNQLARAVLNPNPMDFCTKDLLTTTSERIIAYLRDFNEDQKKAIETAYAMVKHSPSVAKICLIHGPPGTGKSKTIVGLLYRLLTENQRKGHSDENSNAKIKQNRVLVCAPSNAAVDELMKKIILEFKEKCKDKKNPLGNCGDINLVRLGPEKSINSEVLKFSLDSQVNHRMKKELPSHVQAMHKRKEFLDYQLDELSRQRALCRGGREIQRQELDENISKVSKERQELASKIKEVQGRPQKTQSIIILESHIICCTLSTSGGLLLESAFRGQGGVPFSCVIVDEAGQSCEIETLTPLIHRCNKLILVGDPKQLPPTVISMKAQEYGYDQSMMARFCRLLEENVEHNMISRLPILQLTVQYRMHPDICLFPSNYVYNRNLKTNRQTEAIRCSSDWPFQPYLVFDVGDGSERRDNDSYINVQEIKLVMEIIKLIKDKRKDVSFRNIGIITHYKAQKTMIQKDLDKEFDRKGFLASLQRLNVTITRAKYSLFILGHLRTLMENQHWNQLIQDAQKRGAIIKTCDKNYRHDAVKILKLKPVLQRSLTHPPTIAPEGSRPQGGLPSSKLDSGFAKTSVAASLYHTPSDSKEITLTVTSKDPERPPVHDQLQDPRLLKRMGIEVKGGIFLWDPQPSSPQHPGATPPTGEPGFPVVHQDLSHIQQPAAVVAALSSHKPPVRGEPPAASPEASTCQSKCDDPEEELCHRREARAFSEGEQEKCGSETHHTRRNSRWDKRTLEQEDSSSKKRKLL

SEQ ID NO: 4990 - protein, 2706 aa, Homo sapiens
MSTCCWCTPGGASTIDFLKRYASNTPSGEFQTADEDLCYCLECVAEYHKARDELPFLHEVLWELETLRLINHFEKSMKAEIGDDDELYIVDNNGEMPLFDITGQDFENKLRVPLLEILKYPYLLLHERVNELCVEALCRMEQANCSFQVFDKHPGIYLFLVHPNEMVRRWAILTARNLGKVDRDDYYDLQEVLLCLFKVIELGLLESPDIYTSSVLEKGKLILLPSHMYDTTNYKSYWLGICMLLTILEEQAMDSLLLGSDKQNDFMQSILHTMEREADDDSVDPFWPALHCFMVILDRLGSKVWGQLMDPIVAFQTIINNASYNREIRHIRNSSVRTKLEPESYLDDMVTCSQIVYNYNPEKTKKDSGWRTAICPDYCPNMYEEMETLASVLQSDIGQDMRVHNSTFLWFIPFVQSLMDLKDLGVAYIAQVVNHLYSEVKEVLNQTDAVCDKVTEFFLLILVSVIELHRNKKCLHLLWVSSQQWVEAVVKCAKLPTTAFTRSSEKSSGNCSKGTAMISSLSLHSMPSNSVQLAYVQLIRSLLKEGYQLGQQSLCKRFWDKLNLFLRGNLSLGWQLTSQETHELQSCLKQIIRNIKFKAPPCNTFVDLTSACKISPASYNKEESEQMGKTSRKDMHCLEASSPTFSKEPMKVQDSVLIKADNTIEGDNNEQNYIKDVKLEDHLLAGSCLKQSSKNIFTERAEDQIKISTRKQKSVKEISSYTPKDCTSRNGPERGCDRGIIVSTRLLTDSSTDALEKVSTSNEDFSLKDDALAKTSKRKTKVQKDEICAKLSHVIKKQHRKSTLVDNTINLDENLTVSNIESFYSRKDTGVQKGDGFIHNLSLDPSGVLDDKNGEQKSQNNVLPKEKQLKNEELVIFSFHENNCKIQEFHVDGKELIPFTEMTNASEKKSSPFKDLMTVPESRDEEMSNSTSVIYSNLTREQAPDISPKSDTLTDSQIDRDLHKLSLLAQASVITFPSDSPQNSSQLQRKVKEDKRCFTANQNNVGDTSRGQVIIISDSDDDDDERILSLEKLTKQDKICLEREHPEQHVSTVNSKEEKNPVKEEKTETLFQFEESDSQCFEFESSSEVFSVWQDHPDDNNSVQDGEKKCLAPIANTTNGQGCTDYVSEVVKKGAEGIEEHTRPRSISVEEFCEIEVKKPKRKRSEKPMAEDPVRPSSSVRNEGQSDTNKRDLVGNDFKSIDRRTSTPNSRIQRATTVSQKKSSKLCTCTEPIRKVPVSKTPKKTHSDAKKGQNRSSNYLSCRTTPAIVPPKKFRQCPEPTSTAEKLGLKKGPRKAYELSQRSLDYVAQLRDHGKTVGVVDTRKKTKLISPQNLSVRNNKKLLTSQELQMQRQIRPKSQKNRRRLSDCESTDVKRAGSHTAQNSDIFVPESDRSDYNCTGGTEVLANSNRKQLIKCMPSEPETIKAKHGSPATDDACPLNQCDSVVLNGTVPTNEVIVSTSEDPLGGGDPTARHIEMAALKEGEPDSSSDAEEDNLFLTQNDPEDMDLCSQMENDNYKLIELIHGKDTVEVEEDSVSRPQLESLSGTKCKYKDCLETTKNQGEYCPKHSEVKAADEDVFRKPGLPPPASKPLRPTTKIFSSKSTSRIAGLSKSLETSSALSPSLKNKSKGIQSILKVPQPVPLIAQKPVGEMKNSCNVLHPQSPNNSNRQGCKVPFGESKYFPSSSPVNILLSSQSVSDTFVKEVLKWKYEMFLNFGQCGPPASLCQSISRPVPVRFHNYGDYFNVFFPLMVLNTFETVAQEWLNSPNRENFYQLQVRKFPADYIKYWEFAVYLEECELAKQLYPKENDLVFLAPERINEEKKDTERNDIQDLHEYHSGYVHKFRRTSVMRNGKTECYLSIQTQENFPANLNELVNCIVISSLVTTQRKLKAMSLLGSRNQLARAVLNPNPMDFCTKDLLTTTSERIIAYLRDFNEDQKKAIETAYAMVKHSPSVAKICLIHGPPGTGKSKTIVGLLYRLLTENQRKGHSDENSNAKIKQNRVLVCAPSNAAVDELMKKIILEFKEKCKDKKNPLGNCGDINLVRLGPEKSINSEVLKFSLDSQVNHRMKKELPSHVQAMHKRKEFLDYQLDELSRQRALCRGGREIQRQELDENISKVSKERQELASKIKEVQGRPQKTQSIIILESHIICCTLSTSGGLLLESAFRGQGGVPFSCVIVDEAGQSCEIETLTPLIHRCNKLILVGDPKQLPPTVISMKAQEYGYDQSMMARFCRLLEENVEHNMISRLPILQLTVQYRMHPDICLFPSNYVYNRNLKTNRQTEAIRCSSDWPFQPYLVFDVGDGSERRDNDSYINVQEIKLVMEIIKLIKDKRKDVSFRNIGIITHYKAQKTMIQKDLDKEFDRKGPAEVDTVDAFQGRQKDCVIVTCVRANSIQGSIGFLASLQRLNVTITRAKYSLFILGHLRTLMQLLPRSFCVHVNHSPFFSPEPKYLHWALKENQHWNQLIQDAQKRGAIIKTCDKNYRHDAVKILKLKPVLQRSLTHPPTIAPEGSRPQGGLPSSKLDSGFAKTSVAASLYHTPSDSKEITLTVTSKDPERPPVHDQLQDPRLLKRMGIEVKGGIFLWDPQPSSPQHPGATPPTGEPGFPVVHQDLSHIQQPAAVVAALSSHKPPVRGEPPAASPEASTCQSKCDDPEEELCHRREARAFSEGEQEKCGSETHHTRRNSRWDKRTLEQEDSSSKKRKLL

SEQ ID NO: 4991 - protein, 91 aa, Homo sapiens
MVCYLYWETFPSISHLLKITLSARDCHVCGLNLFIFMDPVENQALHPVIMALILMPSLHCFGNILILLFLKSPAQLFCRMSVDLALLFPHK

SEQ ID NO: 4992 - protein, 118 aa, Homo sapiens
MQSLRPEQTRGLLEPERTKTLLPRESRAWEKPPHPACTKDWEAVEVGASSHDSDEKDLSSQETGLSQEWSSVEEDDESEGSQGFVEWSKAPQQTTIVLVVCVLFLFLVLTGMPMMFHI

SEQ ID NO: 4993 - protein, 95 aa, Homo sapiens
MASSHWNETTTSVYQYLGFQVQKIYPFHDNWNTACFVILLLFIFTVVSLVVLAFLYEVLDCCCCVKNKTVKDLKSEPNPLRSMMDNIRKRETEVV

SEQ ID NO: 4994 - protein, 270 aa, Homo sapiens
MACRPRSPPRHQSRCDGDASPPSPARWSLGRKRRADGRRWRPEDAEEAEHRGAERRPESFTTPEGPKPRSRCSDWASAVEEDEMRTRVNKEMARYKRKLLINDFGRERKSSSGSSDSKESMSTVPADFETDESVLMRRQKQINYGKNTIAYDRYIKEVPRHLRQPGIHPKTPNKFKKYSRRSWDQQIKLWKVALHFWDPPAEEGCDLQEIHPVDLESAESSSEPQTSSQDDFDVYSGTPTKVRHMDSQVEDEFDLEACLTEPLRDFSAMS

SEQ ID NO: 4995 - protein, 231 aa, Homo sapiens
MACRPRSPPRHQSRCDGDASFTTPEGPKPRSRCSDWASAVEEDEMRTRVNKEMARYKRKLLINDFGRERKSSSGSSDSKESMSTVPADFETDESVLMRRQKQINYGKNTIAYDRYIKEVPRHLRQPGIHPKTPNKFKKYSRRSWDQQIKLWKVALHFWDPPAEEGCDLQEIHPVDLESAESSSEPQTSSQDDFDVYSGTPTKVRHMDSQVEDEFDLEACLTEPLRDFSAMS

SEQ ID NO: 4996 - protein, 222 aa, Homo sapiens
MLSRAVCGTSRQLAPVLGYLGSRQKHSLPDLPYDYGALEPHINAQIMQLHHSKHHAAYVNNLNVTEEKYQEALAKGDVTAQIALQPALKFNGGGHINHSIFWTNLSPNGGGEPKGELLEAIKRDFGSFDKFKEKLTAASVGVQGSGWGWLGFNKERGHLQIAACPNQDPLQGTTGLIPLLGIDVWEHAYYLQYKNVRPDYLKAIWNVINWENVTERYMACKK

SEQ ID NO: 4997 - protein, 183 aa, Homo sapiens
MLSRAVCGTSRQLAPVLGYLGSRQKHSLPDLPYDYGALEPHINAQIMQLHHSKHHAAYVNNLNVTEEKYQEALAKGELLEAIKRDFGSFDKFKEKLTAASVGVQGSGWGWLGFNKERGHLQIAACPNQDPLQGTTGLIPLLGIDVWEHAYYLQYKNVRPDYLKAIWNVINWENVTERYMACKK

SEQ ID NO: 4998 - protein, 162 aa, Homo sapiens
MLSRAVCGTSRQLAPVLGYLGSRQKHSLPDLPYDYGALEPHINAQIMQLHHSKHHAAYVNNLNVTEEKYQEALAKGDVTAQIALQPALKFNGGGHINHSIFWTNLSPNGGGEPKGLIPLLGIDVWEHAYYLQYKNVRPDYLKAIWNVINWENVTERYMACKK

SEQ ID NO: 4999 - protein, 176 aa, Homo sapiens
MQLHHSKHHAAYVNNLNVTEEKYQEALAKGDVTAQIALQPALKFNGGGHINHSIFWTNLSPNGGGEPKGELLEAIKRDFGSFDKFKEKLTAASVGVQGSGWGWLGFNKERGHLQIAACPNQDPLQGTTGLIPLLGIDVWEHAYYLQYKNVRPDYLKAIWNVINWENVTERYMACKK

SEQ ID NO: 5000 - protein, 766 aa, Homo sapiens
MKEKSKNAARTRREKENSEFYELAKLLPLPSAITSQLDKASIIRLTTSYLKMRVVFPEGLGEAWGHSSRTSPLDNVGRELGSHLLQTLDGFIFVVAPDGKIMYISETASVHLGLSQVELTGNSIYEYIHPADHDEMTAVLTAHQPYHSHFVQEYEIERSFFLRMKCVLAKRNAGLTCGGYKVIHCSGYLKIRQYSLDMSPFDGCYQNVGLVAVGHSLPPSAVTEIKLHSNMFMFRASLDMKLIFLDSRVAELTGYEPQDLIEKTLYHHVHGCDTFHLRCAHHLLLVKGQVTTKYYRFLAKHGGWVWVQSYATIVHNSRSSRPHCIVSVNYVLTDTEYKGLQLSLDQISASKPAFSYTSSSTPTMTDNRKGAKSRLSSSKSKSRTSPYPQYSGFHTERSESDHDSQWGGSPLTDTASPQLLDPADRPGSQHDASCAYRQFSDRSSLCYGFALDHSRLVEERHFHTQACEGGRCEAGRYFLGTPQAGREPWWGSRAALPLTKASPESREAYENSMPHIASVHRIHGRGHWDEDSVVSSPDPGSASESGDRYRTEQYQSSPHEPSKIETLIRATQQMIKEEENRLQLRKAPSDQLASINGAGKKHSLCFANYQQPPPTGEVCHGSALANTSPCDHIQQREGKMLSPHENDYDNSPTALSRISSPNSDRISKSSLILAKDYLHSDISPHQTAGDHPTVSPNCFGSHRQYFDKHAYTLTGYALEHLYDSETIRNYSLGCNGSHFDVTSHLRMQPDPAQGHKGTSVIITNGS

SEQ ID NO: 5001 - protein, 290 aa, Homo sapiens
MAPKRQSPLPPQKKKPRPPPALGPEETSASAGLPKKGEKEQQEAIEHIDEVQNEIDRLNEQASEEILKVEQKYNKLRQPFFQKRSELIAKIPNFWVTTFVNHPQVSALLGEEDEEALHYLTRVEVTEFEDIKSGYRIDFYFDENPYFENKVLSKEFHLNESGDPSSKSTEIKWKSGKDLTKRSSQTQNKASRKRQHEEPESFFTWFTDHSDAGADELGEVIKDDIWPNPLQYYLVPDMDDEEGEGEEDDDDDEEEEGLEDIDEEGDEDEGEEDEDDDEGEEGEEDEGEDD

SEQ ID NO: 5002 - protein, 277 aa, Homo sapiens
MSAPAAKVSKKELNSNHDGADETSEKEQQEAIEHIDEVQNEIDRLNEQASEEILKVEQKYNKLRQPFFQKRSELIAKIPNFWVTTFVNHPQVSALLGEEDEEALHYLTRVEVTEFEDIKSGYRIDFYFDENPYFENKVLSKEFHLNESGDPSSKSTEIKWKSGKDLTKRSSQTQNKASRKRQHEEPESFFTWFTDHSDAGADELGEVIKDDIWPNPLQYYLVPDMDDEEGEGEEDDDDDEEEEGLEDIDEEGDEDEGEEDEDDDEGEEGEEDEGEDD

SEQ ID NO: 5003 - protein, 265 aa, Homo sapiens
MPRSHQPPPPPHEKEQQEAIEHIDEVQNEIDRLNEQASEEILKVEQKYNKLRQPFFQKRSELIAKIPNFWVTTFVNHPQVSALLGEEDEEALHYLTRVEVTEFEDIKSGYRIDFYFDENPYFENKVLSKEFHLNESGDPSSKSTEIKWKSGKDLTKRSSQTQNKASRKRQHEEPESFFTWFTDHSDAGADELGEVIKDDIWPNPLQYYLVPDMDDEEGEGEEDDDDDEEEEGLEDIDEEGDEDEGEEDEDDDEGEEGEEDEGEDD

SEQ ID NO: 5004 - protein, 268 aa, Homo sapiens
MGCRDLLPSLKPTLLEKEQQEAIEHIDEVQNEIDRLNEQASEEILKVEQKYNKLRQPFFQKRSELIAKIPNFWVTTFVNHPQVSALLGEEDEEALHYLTRVEVTEFEDIKSGYRIDFYFDENPYFENKVLSKEFHLNESGDPSSKSTEIKWKSGKDLTKRSSQTQNKASRKRQHEEPESFFTWFTDHSDAGADELGEVIKDDIWPNPLQYYLVPDMDDEEGEGEEDDDDDEEEEGLEDIDEEGDEDEGEEDEDDDEGEEGEEDEGEDD

SEQ ID NO: 5005 - protein, 295 aa, Homo sapiens
MWGARRSSVSSSWNAASLLQLLLAALLAAGARASGEYCHGWLDAQGVWRIGFQCPERFDGGDATICCGSCALRYCCSSAEARLDQGGCDNDRQQGAGEPGRADKDGPDGSAVPIYVPFLIVGSVFVAFIILGSLVAACCCRCLRPKQDPQQSRAPGGNRLMETIPMIPSASTSRGSSSRQSSTAASSSSSANSGARAPPTRSQTNCCLPEGTMNNVYVNMPTNFSVLNCQQATQIVPHQGQYLHPPYVGYTVQHDSVPMTAVPPFMDGLQPGYRQIQSPFPHTNSEQKMYPAVTV

SEQ ID NO: 5006 - protein, 67 aa, Homo sapiens
MSRNLRTALIFGGFISLIGAAFYPIYFRPLMRLEEYKKEQAINRAGIVQEDVQPPGLKVWSDPFGRK

SEQ ID NO: 5007 - protein, 168 aa, Homo sapiens
MVKEVWRVLREEPGRRKESRQNRARGNRVQQNSSNLNPTPAPGPHSTESRGRRRAGSEAPPRPGSESLSTSSERGHGPAVGNLVSESAGRSAGQGSPGPDAMSRNLRTALIFGGFISLIGAAFYPIYFRPLMRLEEYKKEQAINRAGIVQEDVQPPGLKVWSDPFGRK

SEQ ID NO: 5008 - protein, 238 aa, Homo sapiens
MRALLALCLLLGWLRWGPAGAQQSGEYCHGWVDVQGNYHEGFQCPEDFDTLDATICCGSCALRYCCAAADARLEQGGCTNDRRELEHPGITAQPVYVPFLIVGSIFIAFIILGSVVAIYCCTCLRPKEPSQQPIRFSLRSYQTETLPMILTSTSPRAPSRQSSTATSSSSTGGSIRRFSFARAEPGCLVPSPPPPYTTSHSIHLAQPSGFLVSPQYFAYPLQQEPPLPGKSCPDFSSS

SEQ ID NO: 5009 - protein, 586 aa, Homo sapiens
MSATVVDAVNAAPLSGSKEMSLEEPKKMTREDWRKKKELEEQRKLGNAPAEVDEEGKDINPHIPQYISSVPWYIDPSKRPTLKHQRPQPEKQKQFSSSGEWYKRGVKENSIITKYRKGACENCGAMTHKKKDCFERPRRVGAKFTGTNIAPDEHVQPQLMFDYDGKRDRWNGYNPEEHMKIVEEYAKVDLAKRTLKAQKLQEELASGKLVEQANSPKHQWGEEEPNSQMEKDHNSEDEDEDKYADDIDMPGQNFDSKRRITVRNLRIREDIAKYLRNLDPNSAYYDPKTRAMRENPYANAGKNPDEVSYAGDNFVRYTGDTISMAQTQLFAWEAYDKGSEVHLQADPTKLELLYKSFKVKKEDFKEQQKESILEKYGGQEHLDAPPAELLLAQTEDYVEYSRHGTVIKGQERAVACSKYEEDVKIHNHTHIWGSYWKEGRWGYKCCHSFFKYSYCTGEAGKEIVNSEECIINEITGEESVKKPQTLMELHQEKLKEEKKKKKKKKKKHRKSSSDSDDEEKKHEKLKKALNAEEARLLHVKETMQIDERKRPYNSMYETREPTEEEMEAYRMKRQRPDDPMASFLGQ

SEQ ID NO: 5010 - protein, 83 aa, Homo sapiens
MAVSTEELEATVQEVLGRLKSHQFFQSTWDTVAFIVFLTFMGTVLLLLLLVVAHCCCCSSPGPRRESPRKERPKGVDNLALEP

SEQ ID NO: 5011 - protein, 88 aa, Homo sapiens
MAVSTEELEATVQEVLGRLKSHQFFQSTWDTVAFIVFLTFMGTVLLLLLLVVAHCCCCSSPGPRRESPRKVSPWKERPKGVDNLALEP

SEQ ID NO: 5012 - protein, 197 aa, Homo sapiens
MPPAGLRRAAPLTAIALLVLGAPLVLAGEDCLWYLDRNGSWHPGFNCEFFTFCCGTCYHRYCCRDLTLLITERQQKHCLAFSPKTIAGIASAVILFVAVVATTICCFLCSCCYLYRRRQQLQSPFEGQEIPMTGIPVQPVYPYPQDPKAGPAPPQPGFIYPPSGPAPQYPLYPAGPPVYNPAAPPPYMPPQPSYPGA

SEQ ID NO: 5013 - protein, 827 aa, Homo sapiens
MRGCLRLALLCALPWLLLAASPGHPAKSPRQPPAPRRDPFDAARGADFDHVYSGVVNLSTENIYSFNYTSQPDQVTAVRVYVNSSSENLNYPVLVVVRQQKEVLSWQVPLLFQGLYQRSYNYQEVSRTLCPSEATNETGPLQQLIFVDVASMAPLGAQYKLLVTKLKHFQLRTNVAFHFTASPSQPQYFLYKFPKDVDSVIIKVVSEMAYPCSVVSVQNIMCPVYDLDHNVEFNGVYQSMTKKAAITLQKKDFPGEQFFVVFVIKPEDYACGGSFFIQEKENQTWNLQRKKNLEVTIVPSIKESVYVKSSLFSVFIFLSFYLGCLLVGFVHYLRFQRKSIDGSFGSNDGSGNMVASHPIAASTPEGSNYGTIDESSSSPGRQMSSSDGGPPGQSDTDSSVEESDFDTMPDIESDKNIIRTKMFLYLSDLSRKDRRIVSKKYKIYFWNIITIAVFYALPVIQLVITYQTVVNVTGNQDICYYNFLCAHPLGVLSAFNNILSNLGHVLLGFLFLLIVLRRDILHRRALEAKDIFAVEYGIPKHFGLFYAMGIALMMEGVLSACYHVCPNYSNFQFDTSFMYMIAGLCMLKLYQTRHPDINASAYSAYASFAVVIMVTVLGVVFGKNDVWFWVIFSAIHVLASLALSTQIYYMGRFKIDLGIFRRAAMVFYTDCIQQCSRPLYMDRMVLLVVGNLVNWSFALFGLIYRPRDFASYMLGIFICNLLLYLAFYIIMKLRSSEKVLPVPLFCIVATAVMWAAALYFFFQNLSSWEGTPAESREKNRECILLDFFDDHDIWHFLSATALFFSFLVLLTLDDDLDVVRRDQIPVF

SEQ ID NO: 5014 - protein, 832 aa, Homo sapiens
MRGCLRLALLCALPWLLLAASPGHPAKSPRQPPAPRRDPFDAARGADFDHVYSGVVNLSTENIYSFNYTSQPDQVTAVRVYVNSSSENLNYPVLVVVRQQKEVLSWQVPLLFQGLYQRSYNYQEVSRTLCPSEATNETGPLQQLIFVDVASMAPLGAQYKLLVTKLKHFQLRTNVAFHFTASPSQPQYFLYKFPKDVDSVIIKVVSEMAYPCSVVSVQNIMCPVYDLDHNVEFNGVYQSMTKKAAITLQKKDFPGEQFFVVFVIKPEDYACGGSFFIQEKENQTWNLQRKKNLEVTIVPSIKESVYVKSSLFSVFIFLSFYLGCLLVGFVHYLRFQRKSIDGSFGSNDGSGNMVASHPIAASTPEGSNYGTIDESSSSPGRQMSSSDGGPPGQSDTDSSVEESDFDTMPDIESDKNIIRTKMFLYLSDLSRKDRRIVSKKYKIYFWNIITIAVFYALPVIQLVITYQTVVNVTGNQDICYYNFLCAHPLGVLSAFNNILSNLGHVLLGFLFLLIVLRRDILHRRALEAKDIFAVEYGIPKHFGLFYAMGIALMMEGVLSACYHVCPNYSNFQFDTSFMYMIAGLCMLKLYQTRHPDINASAYSAYASFAVVIMVTVLGVVFGKNDVWFWVIFSAIHVLASLALSTQIYYMGRFKIDVSDTDLGIFRRAAMVFYTDCIQQCSRPLYMDRMVLLVVGNLVNWSFALFGLIYRPRDFASYMLGIFICNLLLYLAFYIIMKLRSSEKVLPVPLFCIVATAVMWAAALYFFFQNLSSWEGTPAESREKNRECILLDFFDDHDIWHFLSATALFFSFLVLLTLDDDLDVVRRDQIPVF

SEQ ID NO: 5015 - protein, 172 aa, Homo sapiens
MATQQVDSRRQVAAEQVAAQLLERRRGSHCDDEKQTLLALLILVLYLSTEIWGSSWEVSERIRECNYYQNLAVPQGLEYQTNEPSEEPIKTIRNWLKEKLHVFSEKLEEEVQQLEQLAWDLELWLDALLGEPHQEEHCSTYKSHLWEWAWALGREHKGGEGLLEISLSGAEL

SEQ ID NO: 5016 - protein, 130 aa, Homo sapiens
METLGALLVLEFLLLSPVEAQQATEHRLKPWLVGLAAVVGFLFIVYLVLLANRLWCSKARAEDEEETTFRMESNLYQDQSEDKREKKEAKEKEEKRKKEKKTAKEGESNLGLDLEEKEPGDHERAKSTVM

SEQ ID NO: 5017 - protein, 95 aa, Homo sapiens
MYRNEFTAWYRRMSVVYGIGTWSVLGSLLYYSRTMAKSSVDQKDGSASEVPSELSERPKGFYVETVVTYKEDFVPNTEKILNYWKSWTGGPGTEP

SEQ ID NO: 5018 - protein, 832 aa, Homo sapiens
MFALGLPFLVLLVASVESHLGVLGPKNVSQKDAEFERTYVDEVNSELVNIYTFNHTVTRNRTEGVRVSVNVLNKQKGAPLLFVVRQKEAVVSFQVPLILRGMFQRKYLYQKVERTLCQPPTKNESEIQFFYVDVSTLSPVNTTYQLRVSRMDDFVLRTGEQFSFNTTAAQPQYFKYEFPEGVDSVIVKVTSNKAFPCSVISIQDVLCPVYDLDNNVAFIGMYQTMTKKAAITVQRKDFPSNSFYVVVVVKTEDQACGGSLPFYPFAEDEPVDQGHRQKTLSVLVSQAVTSEAYVSGMLFCLGIFLSFYLLTVLLACWENWRQKKKTLLVAIDRACPESGHPRVLADSFPGSSPYEGYNYGSFENVSGSTDGLVDSAGTGDLSYGYQGRSFEPVGTRPRVDSMSSVEEDDYDTLTDIDSDKNVIRTKQYLYVADLARKDKRVLRKKYQIYFWNIATIAVFYALPVVQLVITYQTVVNVTGNQDICYYNFLCAHPLGNLSAFNNILSNLGYILLGLLFLLIILQREINHNRALLRNDLCALECGIPKHFGLFYAMGTALMMEGLLSACYHVCPNYTNFQFDTSFMYMIAGLCMLKLYQKRHPDINASAYSAYACLAIVIFFSVLGVVFGKGNTAFWIVFSIIHIIATLLLSTQLYYMGRWKLDSGIFRRILHVLYTDCIRQCSGPLYVDRMVLLVMGNVINWSLAAYGLIMRPNDFASYLLAIGICNLLLYFAFYIIMKLRSGERIKLIPLLCIVCTSVVWGFALFFFFQGLSTWQKTPAESREHNRDCILLDFFDDHDIWHFLSSIAMFGSFLVLLTLDDDLDTVQRDKIYVF

SEQ ID NO: 5019 - protein, 845 aa, Homo sapiens
MFALGLPFLVLLVASVESHLGVLGPKNVSQKDAEFERTYVDEVNSELVNIYTFNHTVTRNRTEGVRVSVNVLNKQKGAPLLFVVRQKEAVVSFQVPLILRGMFQRKYLYQKVERTLCQPPTKNESEIQFFYVDVSTLSPVNTTYQLRVSRMDDFVLRTGEQFSFNTTAAQPQYFKYEFPEGVDSVIVKVTSNKAFPCSVISIQDVLCPVYDLDNNVAFIGMYQTMTKKAAITVQRKDFPSNSFYVVVVVKTEDQACGGSLPFYPFAEDEPVDQGHRQKTLSVLVSQAVTSEAYVSGMLFCLGIFLSFYLLTVLLACWENWRQKKKTLLVAIDRACPESGHPRVLADSFPGSSPYEGYNYGSFENVSGSTDGLVDSAGTGDLSYGYQGHDQFKRRLPSGQMRQLCIAMGRSFEPVGTRPRVDSMSSVEEDDYDTLTDIDSDKNVIRTKQYLYVADLARKDKRVLRKKYQIYFWNIATIAVFYALPVVQLVITYQTVVNVTGNQDICYYNFLCAHPLGNLSAFNNILSNLGYILLGLLFLLIILQREINHNRALLRNDLCALECGIPKHFGLFYAMGTALMMEGLLSACYHVCPNYTNFQFDTSFMYMIAGLCMLKLYQKRHPDINASAYSAYACLAIVIFFSVLGVVFGKGNTAFWIVFSIIHIIATLLLSTQLYYMGRWKLDSGIFRRILHVLYTDCIRQCSGPLYVDRMVLLVMGNVINWSLAAYGLIMRPNDFASYLLAIGICNLLLYFAFYIIMKLRSGERIKLIPLLCIVCTSVVWGFALFFFFQGLSTWQKTPAESREHNRDCILLDFFDDHDIWHFLSSIAMFGSFLVSGPPGAALRIT

SEQ ID NO: 5020 - protein, 240 aa, Homo sapiens
MTAPVPAPRILLPLLLLLLLTPPPGARGEVCMASRGLSLFPESCPDFCCGTCDDQYCCSDVLKKFVWSEERCAVPEASVPASVEPVEQLGSALRFRPGYNDPMSGFGATLAVGLTIFVLSVVTIIICFTCSCCCLYKTCRRPRPVVTTTTSTTVVHAPYPQPPSVPPSYPGPSYQGYHTMPPQPGMPAAPYPMQYPPPYPAQPMGPPAYHETLAGGAAAPYPASQPPYNPAYMDAPKAAL

SEQ ID NO: 5021 - protein, 209 aa, Homo sapiens
MASRGLSLFPESCPDFCCGTCDDQYCCSDVLKKFVWSEERCAVPEASVPASVEPVEQLGSALRFRPGYNDPMSGFGATLAVGLTIFVLSVVTIIICFTCSCCCLYKTCRRPRPVVTTTTSTTVVHAPYPQPPSVPPSYPGPSYQGYHTMPPQPGMPAAPYPMQYPPPYPAQPMGPPAYHETLAGGAAAPYPASQPPYNPAYMDAPKAAL

SEQ ID NO: 5022 - protein, 137 aa, Homo sapiens
MGFGATLAVGLTIFVLSVVTIIICFTCSCCCLYKTCRRPRPVVTTTTSTTVVHAPYPQPPSVPPSYPGPSYQGYHTMPPQPGMPAAPYPMQYPPPYPAQPMGPPAYHETLAGGAAAPYPASQPPYNPAYMDAPKAAL

SEQ ID NO: 5023 - protein, 118 aa, Homo sapiens
MGFGATLAVGLTIFVLSVVTIIICFTCSCCCLYKTCRRPRPVVTTTTSTTVVHAPYPQPPSVPPSYPGPSYQGYHTMPPQPGMPAAPYPMQYPPPYPAQPMGPPAYHETLAGECPCQL

SEQ ID NO: 5024 - protein, 233 aa, Homo sapiens
MTAPVPAPRILLPLLLLLLLTPPPGARGEVCMASRGLSLFPESCPDFCCGTCDDQYCCSDVLKKFVWSEESVPASVEPVEQLGSALRFRPGYNDPMSGFGATLAVGLTIFVLSVVTIIICFTCSCCCLYKTCRRPRPVVTTTTSTTVVHAPYPQPPSVPPSYPGPSYQGYHTMPPQPGMPAAPYPMQYPPPYPAQPMGPPAYHETLAGGAAAPYPASQPPYNPAYMDAPKAAL

SEQ ID NO: 5025 - protein, 55 aa, Homo sapiens
MKPVSRRTLDWIYSVLLLAIVLISWGCIIYASMVSARRQLRKKYPDKIFGTNENL

SEQ ID NO: 5026 - protein, 951 aa, Homo sapiens
MYGASGGRAKPERKSGAKEEAGPGGAGGGGSRVELLVFGYACKLFRDDERALAQEQGQHLIPWMGDHKILIDRYDGRGHLHDLSEYDAEYSTWNRDYQLSEEEARIEALCDEERYLALHTDLLEEEARQEEEYKRLSEALAEDGSYNAVGFTYGSDYYDPSEPTEEEEPSKQREKNEAENLEENEEPFVAPLGLSVPSDVELPPTAKMHAIIERTASFVCRQGAQFEIMLKAKQARNSQFDFLRFDHYLNPYYKFIQKAMKEGRYTVLAENKSDEKKKSGVSSDNEDDDDEEDGNYLHPSLFASKKCNRLEELMKPLKVVDPDHPLAALVRKAQADSSTPTPHNADGAPVQPSQVEYTADSTVAAMYYSYYMLPDGTYCLAPPPPGIDVTTYYSTLPAGVTVSNSPGVTTTAPPPPGTTPLPPPTTAETSSGATSTTTTTSALAPVAAIIPPPPDVQPVIDKLAEYVARNGLKFETSVRAKNDQRFEFLQPWHQYNAYYEFKKQFFLQKEGGDSMQAVSAPEEAPTDSAPEKPSDAGEDGAPEDAAEVGARAGSGGKKEASSSKTVPDGKLVKASFAPISFAIKAKENDLLPLEKNRVKLDDDSDDDEESKEGQESSSSAANTNPAVAPPCVVVEEKKPQLTQEELEAKQAKQKLEDRLAAAAREKLAQASKESKEKQLQAERKRKAALFLQTLKNPLPEAEAGKIEESPFSVEESSTTPCPLLTGGRPLPTLEVKPPDRPSSKSKDPPREEEKEKKKKKHKKRSRTRSRSPKYHSSSKSRSRSHSKAKHSLPSAYRTVRRSRSRSRSPRRRAHSPERRREERSVPTAYRVSRSPGASRKRTRSRSPHEKKKKRRSRSRTKSKARSQSVSPSKQAAPRPAAPAAHSAHSASVSPVESRGSSQERSRGVSQEKEAQISSAIVSSVQSKITQDLMAKVRAMLAASKNLQTSAS

SEQ ID NO: 5027 - protein, 1003 aa, Homo sapiens
MYGASGGRAKPERKSGAKEEAGPGGAGGGGSRVELLVFGYACKLFRDDERALAQEQGQHLIPWMGDHKILIDRYDGRGHLHDLSEYDAEYSTWNRDYQLSEEEARIEALCDEERYLALHTDLLEEEARQEEEYKRLSEALAEDGSYNAVGFTYGSDYYDPSEPTEEEEPSKQREKNEAENLEENEEPFVAPLGLSVPSDVELPPTAKMHAIIERTASFVCRQGAQFEIMLKAKQARNSQFDFLRFDHYLNPYYKFIQKAMKEGRYTVLAENKSDEKKKSGVSSDNEDDDDEEDGNYLHPSLFASKKCNRLEELMKPLKVVDPDHPLAALVRKAQADSSTPTPHNADGAPVQPSQVEYTADSTVAAMYYSYYMLPDGTYCLAPPPPGIDVTTYYSTLPAGVTVSNSPGVTTTAPPPPGTTPLPPPTTAETSSGATSTTTTTSALAPVAAIIPPPPDVQPVIDKLAEYVARNGLKFETSVRAKNDQRFEFLQPWHQYNAYYEFKKQFFLQKEGGDSMQAVSAPEEAPTDSAPEKPSDAGEDGAPEDAAEVGARAGSGGKKEASSSKTVPDGKLVKASFAPISFAIKAKENDLLPLEKNRVKLDDDSDDDEESKEGQESSSSAANTNPAVAPPCVVVEEKKPQLTQEELEAKQAKQKLEDRLAAAAREKLAQASKESKEKQLQAERKRKAALFLQTLKNPLPEAEAGKIEESPFSVEESSTTPCPLLTGGRPLPTLEVKPPDRPSSKSKDPPREEEKEKKKKKHKKRSRTRSRSPKYHSSSKSRSRSHSKAKHSLPSAYRTVRRSRVTASPGTLRAEPCQSSASVTAAAEPGSYQAASTTTRFDSASSFEGKPGKTSRSRSRSPRRRAHSPERRREERSVPTAYRVSRSPGASRKRTRSRSPHEKKKKRRSRSRTKSKARSQSVSPSKQAAPRPAAPAAHSAHSASVSPVESRGSSQERSRGVSQEKEAQISSAIVSSVQSKITQDLMAKVRAMLAASKNLQTSAS

SEQ ID NO: 5028 - protein, 152 aa, Homo sapiens
MRGLLGSSWKKFGHAGRGTYEWLTSEPGLPLLETQLQGTQGVSSTQEDVEPFLCILLPATILLFLAFLLLFLYRRCKSPPPQGQVFSIDLPEHPPAGEVTDLLPGLAWSSEDFPYSPLPPEATLPSQCLPPSYEEATRNPPGEEAQGCSPSV

SEQ ID NO: 5029 - protein, 102 aa, Homo sapiens
MSNTTVPNAPQANSDSMVGYVLGPFFLITLVGVVVAVVMYVQKKKRVDRLRHHLLPMYSYDPAEELHEAEQELLSDMGDPKVVHGWQSGYQHKRMPLLDVKT

SEQ ID NO: 5030 - protein, 82 aa, Homo sapiens
MSNTTVPNAPQANSDSMVMYVQKKKRVDRLRHHLLPMYSYDPAEELHEAEQELLSDMGDPKVVHGWQSGYQHKRMPLLDVKT

SEQ ID NO: 5031 - protein, 685 aa, Homo sapiens
MAEDKSKRDSIEMSMKGCQTNNGFVHNEDILEQTPDPGSSTDNLKHSTRGILGSQEPDFKGVQPYAGMPKEVLFQFSGQARYRIPREILFWLTVASVLVLIAATIAIIALSPKCLDWWQEGPMYQIYPRSFKDSNKDGNGDLKGIQDKLDYITALNIKTVWITSFYKSSLKDFRYGVEDFREVDPIFGTMEDFENLVAAIHDKGLKLIIDFIPNHTSDKHIWFQLSRTRTGKYTDYYIWHDCTHENGKTIPPNNWLSVYGNSSWHFDEVRNQCYFHQFMKEQPDLNFRNPDVQEEIKEILRFWLTKGVDGFSLDAVKFLLEAKHLRDEIQVNKTQIPDTVTQYSELYHDFTTTQVGMHDIVRSFRQTMDQYSTEPGRYRFMGTEAYAESIDRTVMYYGLPFIQEADFPFNNYLSMLDTVSGNSVYEVITSWMENMPEGKWPNWMIGGPDSSRLTSRLGNQYVNVMNMLLFTLPGTPITYYGEEIGMGNIVAANLNESYDINTLRSKSPMQWDNSSNAGFSEASNTWLPTNSDYHTVNVDVQKTQPRSALKLYQDLSLLHANELLLNRGWFCHLRNDSHYVVYTRELDGIDRIFIVVLNFGESTLLNLHNMISGLPAKMRIRLSTNSADKGSKVDTSGIFLDKGEGLIFEHNTKNLLHRQTAFRDRCFVSNRACYSSVLNILYTSC

SEQ ID NO: 5032 - protein, 407 aa, Homo sapiens
MKEQPDLNFRNPDVQEEIKEILRFWLTKGVDGFSLDAVKFLLEAKHLRDEIQVNKTQIPDTVTQYSELYHDFTTTQVGMHDIVRSFRQTMDQYSTEPGRYRFMGTEAYAESIDRTVMYYGLPFIQEADFPFNNYLSMLDTVSGNSVYEVITSWMENMPEGKWPNWMIGGPDSSRLTSRLGNQYVNVMNMLLFTLPGTPITYYGEEIGMGNIVAANLNESYDINTLRSKSPMQWDNSSNAGFSEASNTWLPTNSDYHTVNVDVQKTQPRSALKLYQDLSLLHANELLLNRGWFCHLRNDSHYVVYTRELDGIDRIFIVVLNFGESTLLNLHNMISGLPAKMRIRLSTNSADKGSKVDTSGIFLDKGEGLIFEHNTKNLLHRQTAFRDRCFVSNRACYSSVLNILYTSC

SEQ ID NO: 5033 - protein, 391 aa, Homo sapiens
MAEDKSKRDSIEMSMKGCQTNNGFVHNEDILEQTPDPGSSTDNLKHSTRGILGSQEPDFKGVQPYAGMPKEVLFQFSGQARYRIPREILFWLTVASVLVLIAATIAIIALSPKCLDWWQEGPMYQIYPRSFKDSNKDGNGDLKGIQDKLDYITALNIKTVWITSFYKSSLKDFRYGVEDFREVDPIFGTMEDFENLVAAIHDKGLKLIIDFIPNHTSDKHIWFQLSRTRTGKYTDYYIWHDCTHENGKTIPPNNWLSVYGNSSWHFDEVRNQCYFHQFMKEQPDLNFRNPDVQEEIKEILRFWLTKGVDGFSLDAVKFLLEAKHLRDEIQVNKTQIPDTVTQYSELYHDFTTTQVGMHDIVRSFRQTMDQYSTEPGRYRLTTAYALISSQA

SEQ ID NO: 5034 - protein, 316 aa, Homo sapiens
MTLNLVNSYRFMGTEAYAESIDRTVMYYGLPFIQEADFPFNNYLSMLDTVSGNSVYEVITSWMENMPEGKWPNWMIGGPDSSRLTSRLGNQYVNVMNMLLFTLPGTPITYYGEEIGMGNIVAANLNESYDINTLRSKSPMQWDNSSNAGFSEASNTWLPTNSDYHTVNVDVQKTQPRSALKLYQDLSLLHANELLLNRGWFCHLRNDSHYVVYTRELDGIDRIFIVVLNFGESTLLNLHNMISGLPAKMRIRLSTNSADKGSKVDTSGIFLDKGEGLIFEHNTKNLLHRQTAFRDRCFVSNRACYSSVLNILYTSC

SEQ ID NO: 5035 - protein, 502 aa, Homo sapiens
MAEDKSKRDSIEMSMKGCQTNNGFVHNEDILEQTPDPGSSTDNLKHSTRGILGSQEPDFKGVQPYAGMPKEVLFQFSGQARYRIPREILFWLTVASVLVLIAATIAIIALSPKCLDWWQEGPMYQIYPRSFKDSNKDGNGDLKGIQDKLDYITALNIKTVWITSFYKSSLKDFRYGVEDFREVDPIFGTMEDFENLVAAIHDKGLKLIIDFIPNHTSDKHIWFQLSRTRTGKYTDYYIWHDCTHENGKTIPPNNWLSVYGNSSWHFDEVRNQCYFHQFMKEQPDLNFRNPDVQEEIKEILRFWLTKGVDGFSLDAVKFLLEAKHLRDEIQVNKTQIPDTVTQYSELYHDFTTTQVGMHDIVRSFRQTMDQYSTEPGRYRFMGTEAYAESIDRTVMYYGLPFIQEADFPFNNYLSMLDTVSGNSVYEVITSWMENMPEGKWPNWMIGGPDSSRLTSRLGNQYVNVMNMLLFTLPGTPITYYGEEIGMGNIVAANLNESYDIVS

SEQ ID NO: 5036 - protein, 564 aa, Homo sapiens
MAEDKSKRDSIEMSMKGCQTNNGFVHNEDILEQTPDPGSSTDNLKHSTRGILGSQEPDFKGVQPYAGMPKEVLFQFSGQARYRIPREILFWLTVASVLVLIAATIAIIALSPKCLDWWQEGPMYQIYPRSFKDSNKDGNGDLKGIQDKLDYITALNIKTVWITSFYKSSLKDFRYGVEDFREVDPIFGTMEDFENLVAAIHDKGLKLIIDFIPNHTSDKHIWFQLSRTRTGKYTDYYIWHDCTHENGKTIPPNNWLSVYGNSSWHFDEVRNQCYFHQFMKEQPDLNFRNPDVQEEIKEILRFWLTKGVDGFSLDAVKFLLEAKHLRDEIQVNKTQIPDTVTQYSELYHDFTTTQVGMHDIVRSFRQTMDQYSTEPGRYRFMGTEAYAESIDRTVMYYGLPFIQEADFPFNNYLSMLDTVSGNSVYEVITSWMENMPEGKWPNWMIGGPDSSRLTSRLGNQYVNVMNMLLFTLPGTPITYYGEEIGMGNIVAANLNESYDINTLRSKSPMQWDNSSNAGFSEASNTWLPTNSDYHTVNVDVSISENFMLILETKKWVSTESTHSP

SEQ ID NO: 5037 - protein, 551 aa, Homo sapiens
MAEDKSKRDSIEMSMKGCQTNNGFVHNEDILEQTPDPGSSTDNLKHSTRGILGSQEPDFKGVQPYAGMPKEVLFQFSGQARYRIPREILFWLTVASVLVLIAATIAIIALSPKCLDWWQEGPMYQIYPRSFKDSNKDGNGDLKGIQDKLDYITALNIKTVWITSFYKSSLKDFRYGVEDFREVDPIFGTMEDFENLVAAIHDKGLKLIIDFIPNHTSDKHIWFQLSRTRTGKYTDYYIWHDCTHENGKTIPPNNWLSVYGNSSWHFDEVRNQCYFHQFMKEQPDLNFRNPDVQEEIKEILRFWLTKGVDGFSLDAVKFLLEAKHLRDEIQVNKTQIPDTVTQYSELYHDFTTTQVGMHDIVRSFRQTMDQYSTEPGRYRFMGTEAYAESIDRTVMYYGLPFIQEADFPFNNYLSMLDTVSGNSVYEVITSWMENMPEGKWPNWMIGGPDSSRLTSRLGNQYVNVMNMLLFTLPGTPITYYGEEIGMGNIVAANLNESYDINTLRSKSPMQWDNSSNAGFSEASNTWLPTNSDYHTVNVDVLLRHPCSSAVA

SEQ ID NO: 5038 - protein, 500 aa, Homo sapiens
MALRRLLLLLLLSLESLDLLPSVHGARGRAANRTLSAGGAAVGGRRAGGALARGGRELNGTARAPGIPEAGSRRGQPAAAVAAAASAAVTYETCWGYYDVSGQYDKEFECNNSESGYLYCCGTCYYRFCCKKRHEKLDQRQCTNYQSPVWVQTPSTKVVSPGPENKYDPEKDKTNFTVYITCGVIAFVIVAGVFAKVSYDKAHRPPREMNIHRALADILRQQGPIPIAHCERETISAIDTSPKENTPVRSSSKNHYTPVRTAKQTPEKPRMNNILTSATEPYDLSFSRSFQNLAHLPPSYESAVKTNPSKYSSLKRLTDKEADEYYMRRRHLPDLAARGTLPLNVIQMSQQKPLPRERPRRPIRAMSQDRVLSPDRGLPDEFSMPYDRILSDEQLLSTERLHSQDPLLSPERTAFPEQSLSRAISHTDVFVSTPVLDRYRMSKMHSHPSASNNSYATLGQSQTAAKRHAFASRRHNTVEQLHYIPGHHTCYTASKTEVTV

SEQ ID NO: 5039 - protein, 532 aa, Homo sapiens
MALRRLLLLLLLSLESLDLLPSVHGARGRAANRTLSAGGAAVGGRRAGGALARGGRELNGTARAPGIPEAGSRRGQPAAAVAAAASAAVTYETCWGYYDVSGQYDKEFECNNSESGYLYCCGTCYYRFCCKKRHEKLDQRQCTNYQSPVWVQTPSTKVVSPGPENKYDPEKDKTNFTVYITCGVIAFVIVAGVFAKVSYDKAHRPPREMNIHRALADILRQQGPIPIAHCERETISAIDTSPKENTPVRSSSKNHYTPVRTAKQTPGHYGKDAYRSGGPDLHNFISSGFVTLGRGHTKEKPRMNNILTSATEPYDLSFSRSFQNLAHLPPSYESAVKTNPSKYSSLKRLTDKEADEYYMRRRHLPDLAARGTLPLNVIQMSQQKPLPRERPRRPIRAMSQDRVLSPDRGLPDEFSMPYDRILSDEQLLSTERLHSQDPLLSPERTAFPEQSLSRAISHTDVFVSTPVLDRYRMSKMHSHPSASNNSYATLGQSQTAAKRHAFASRRHNTVEQLHYIPGHHTCYTASKTEVTV

SEQ ID NO: 5040 - protein, 551 aa, Homo sapiens
MALRRLLLLLLLSLESLDLLPSVHGARGRAANRTLSAGGAAVGGRRAGGALARGGRELNGTARAPGIPEAGSRRGQPAAAVAAAASAAVTYETCWGYYDVSGQYDKEFECNNSESGYLYCCGTCYYRFCCKKRHEKLDQRQCTNYQSPVWVQTPSTKVVSPGPENKYDPEKDKTNFTVYITCGVIAFVIVAGVFAKVSYDKAHRPPREMNIHRALADILRQQGPIPIAHCERETISAIDTSPKENTPVRSSSKNHYTPVRTAKQTPGHYGKDAYRSGGPDLHNFISSGFVTLGRGHTKGDHQYNHPILSSVTQIPPHEKPRMNNILTSATEPYDLSFSRSFQNLAHLPPSYESAVKTNPSKYSSLKRLTDKEADEYYMRRRHLPDLAARGTLPLNVIQMSQQKPLPRERPRRPIRAMSQDRVLSPDRGLPDEFSMPYDRILSDEQLLSTERLHSQDPLLSPERTAFPEQSLSRAISHTDVFVSTPVLDRYRMSKMHSHPSASNNSYATLGQSQTAAKRHAFASRRHNTVEQLHYIPGHHTCYTASKTEVTV

SEQ ID NO: 5041 - protein, 667 aa, Homo sapiens
MKEKSKNAAKTRREKENGEFYELAKLLPLPSAITSQLDKASIIRLTTSYLKMRAVFPEGLGDAWGQPSRAGPLDGVAKELGSHLLQTLDGFVFVVASDGKIMYISETASVHLGLSQVELTGNSIYEYIHPSDHDEMTAVLTAHQPLHHHLLQEYEIERSFFLRMKCVLAKRNAGLTCSGYKVIHCSGYLKIRQYMLDMSLYDSCYQIVGLVAVGQSLPPSAITEIKLYSNMFMFRASLDLKLIFLDSRVTEVTGYEPQDLIEKTLYHHVHGCDVFHLRYAHHLLLVKGQVTTKYYRLLSKRGGWVWVQSYATVVHNSRSSRPHCIVSVNYVLTEIEYKELQLSLEQVSTAKSQDSWRTALSTSQETRKLVKPKNTKMKTKLRTNPYPPQQYSSFQMDKLECGQLGNWRASPPASAAAPPELQPHSESSDLLYTPSYSLPFSYHYGHFPLDSHVFSSKKPMLPAKFGQPQGSPCEVARFFLSTLPASGECQWHYANPLVPSSSSPAKNPPEPPANTARHSLVPSYEAPAAAVRRFGEDTAPPSFPSCGHYREEPALGPAKAARQAARDGARLALARAAPECCAPPTPEAPGAPAQLPFVLLNYHRVLARRGPLGGAAPAASGLACAPGGPEAATGALRLRHPSPAATSPPGAPLPHYLGASVIITNGR

SEQ ID NO: 5042 - protein, 570 aa, Homo sapiens
MKEKSKNAAKTRREKENGEFYELAKLLPLPSAITSQLDKASIIRLTTSYLKMRAVFPEGLGDAWGQPSRAGPLDGVAKELGSHLLQTLDGFVFVVASDGKIMYISETASVHLGLSQVELTGNSIYEYIHPSDHDEMTAVLTAHQPLHHHLLQEYEIERSFFLRMKCVLAKRNAGLTCSGYKVIHCSGYLKIRQYMLDMSLYDSCYQIVGLVAVGQSLPPSAITEIKLYSNMFMFRASLDLKLIFLDSRVTEVTGYEPQDLIEKTLYHHVHGCDVFHLRYAHHLLLVKGQVTTKYYRLLSKRGGWVWVQSYATVVHNSRSSRPHCIVSVNYVLTEIEYKELQLSLEQVSTAKSQDSWRTALSTSQETRKLVKPKNTKMKTKLRTNPYPPQQYSSFQMDKLECGQLGNWRASPPASAAAPPELQPHSESSDLLYTPSYSLPFSYHYGHFPLDSHVFSSKKPMLPAKFGQPQGSPCEVARFFLSTLPASGECQWHYANPLVPSSSSPAKNPPEPPANTARHSLVPSYEGGSGLLVGKVGGLRTAGSRSSHGGGWQMETEPSRFGQTCPLSASK

SEQ ID NO: 5043 - protein, 159 aa, Homo sapiens
MEKLRRVLSGQDDEEQGLTAQVLDASSLSFNTRLKWFAICFVCGVFFSILGTGLLWLPGGIKLFAVFYTLGNLAALASTCFLMGPVKQLKKMFEATRLLATIVMLLCFIFTLCAALWWHKKGLAVLFCILQFLSMTWYSLSYIPYARDAVIKCCSSLLS

SEQ ID NO: 5044 - protein, 59 aa, Homo sapiens
MTSVSTQLSLVLMSLLLVLPVVEAVEAGDAIALLLGVVLSITGICACLGVYARKRNGQM

SEQ ID NO: 5045 - protein, 538 aa, Homo sapiens
MPALLLLVLLASSAGQARARPSNATSAEPAGPLPALLAHLRRLTGALTGGGGAASPGANGTRTGPAGGAGAAARAPPPAELCHGYYDVMGQYDATFNCSTGSYRFCCGTCHYRFCCEHRHMRLAQASCSNYDTPRWATTPPPLAGGAGGAGGAGGGPGPGQAGWLEGGRTGGAGGRGGEGPGGSTAYVVCGVISFALAVGVGAKVAFSKASRAPRAHRDINVPRALVDILRHQAGPGTRPDRARSSSLTPGIGGPDSMPPRTPKNLYNTVKTPNLDWRALPPPSPSLHYSTLSCSRSFHNLSHLPPSYEAAVKSELNRYSSLKRLAEKDLDEAYLKRRPLELPRGTLPLHALRRPGTGGGYRMEAWGGPEELGLAPAPNPRRVMSQEHLLGDGGRSRYEFTLPRARLVSQEHLLLSSPEALRQSREHLLSPPRSPALPPDPTARASLAASHSNLLLGPGGPPTPLRGLPPPSSLHAHHHHALHGSPQPAWMSDAGGGGGTLARRPPFQRQGTLEQLQFIPGHHLPQHLRTASKNEVTV

SEQ ID NO: 5046 - protein, 71 aa, Homo sapiens
MELPYTNLEMAFILLAFVIFSLFTLASIYTTPDDSNEEEEHEKKGREKKRKKSEKKKNCSEEEHRIEAVEL

SEQ ID NO: 5047 - protein, 103 aa, Homo sapiens
MASRWAVQLLLVAAWSMGCGEALKCYTCKEPMTSASCRTITRCKPEDTACMTTLVTVEAEYPFNQSPVVTRSCSSSCVATDPDSIGAAHLIFCCFRDLCNSEL

SEQ ID NO: 5048 - protein, 103 aa, Homo sapiens
MYGDIFNATGGPEAAVGSALAPGATVKAEGALPLELATARGMRDGAATKPDLPTYLLLFFLLLLSVALVVLFIGCQLRHSAFAALPHDRSLRDARAPWKTRPV

SEQ ID NO: 5049 - protein, 132 aa, Homo sapiens
MHQAGHYSWPSPAVNSSSEQEPQRQLPEVLSGTWEQPRVDGLPVVTVIVAVFVLLAVCIIVAVHFGPRLHQGHATLPTEPPTPKPDGGIYLIHWRVLGPQDSPEEAPPGPLVPGSCPAPDGPRPSIDEVTCL

SEQ ID NO: 5050 - protein, 160 aa, Homo sapiens
MDKLKKVLSGQDTEDRSGLSEVVEASSLSWSTRIKGFIACFAIGILCSLLGTVLLWVPRKGLHLFAVFYTFGNIASIGSTIFLMGPVKQLKRMFEPTRLIATIMVLLCFALTLCSAFWWHNKGLALIFCILQSLALTWYSLSFIPFARDAVKKCFAVCLA

SEQ ID NO: 5051 - protein, 85 aa, Homo sapiens
MTGEDSISTLGLILGVGLLLLLVSILGYSLAKWYQRGYCWEGPNFVFNLYQIRNLKDLEMGPPFTISGHISSTDGGYMKFSNGLV

SEQ ID NO: 5052 - protein, 397 aa, Homo sapiens
MARAGARGLLGGRRPPGLRLALALRLALLLARPPSGRAGAPEAQGPAAPGTTAPEGGDRCRGYYDVMGQWDPPFNCSSGAYSFCCGTCGYRFCCHDGPRRLDQSRCSNYDTPAWVQTGRPPARARDTAAPRDPGRERSHTAVYAVCGVAALLVLAGIGARLGLERAHSPRARRTVTRALTELLKQPGPQEPLPPTLGPPLGGCVQVQMGDGLPRGSPHNSADKKRLNNAPRGSAAPGPPRGPRLQGGGSLTLQPDYAKYATFKAAALKAAEAAPRDFCQRFPALEPSPRQPPARAPRPSPDLPAPLDACPWAPPVYAPPAAPGPYAAWTSSRPARPAPLSHPTARAFQVPRRPGHAARRQFSVKMPETFNPQLPGLYGSAGRGSRYLRTNSKTEVTV

SEQ ID NO: 5053 - protein, 492 aa, Homo sapiens
MARAGARGLLGGRRPPGLRLALALRLALLLARPPSGRAGAPEAQGPAAPGTTAPEGGDRCRGYYDVMGQWDPPFNCSSGAYSFCCGTCGYRFCCHDGPRRLDQSRCSNYDTPAWVQTGRPPARARDTAAPRDPGRERSHTAVYAVCGVAALLVLAGIGARLGLERAHSPRARRTVTRALTELLKQPGPQEPLPPTLGPPLGGCVQVQMGDGLPRGSPHNSAGPRTPRLARASPPGEPFMRVAPPGLAAAAAARDSEPGPVPGAGGCGEDRLGSQPRPENGPPGSHRTASGRGLRRGDSEGGVNRGIGPSRVSLLAPDKKRLNNAPRGSAAPGPPRGPRLQGGGSLTLQPDYAKYATFKAAALKAAEAAPRDFCQRFPALEPSPRQPPARAPRPSPDLPAPLDACPWAPPVYAPPAAPGPYAAWTSSRPARPAPLSHPTARAFQVPRRPGHAARRQFSVKMPETFNPQLPGLYGSAGRGSRYLRTNSKTEVTV

SEQ ID NO: 5054 - protein, 97 aa, Homo sapiens
MQLGTGLLLAAVLSLQLAAAEAIWCHQCTGFGGCSHGSRCLRDSTHCVTTATRVLSNTEDLPLVTKMCHIGCPDIPSLGLGPYVSIACCQTSLCNHD

SEQ ID NO: 5055 - protein, 93 aa, Homo sapiens
MEFYLEIDPVTLNLIILVASYVILLLVFLISCVLYDCRGKDPSKEYAPEATLEAQPSIRLVVMHPSVAGPHWPKGPGLSLGDPAPLGKKSTMV

SEQ ID NO: 5056 - protein, 215 aa, Homo sapiens
MADLHRQLQEYLAQGKAGGPAAAEPLLAAEKAEEPGDRPAEEWLGRAGLRWTWARSPAESAAAGLTCLPSVTRGQRLAAGGGCLLLAALCFGLAALYAPVLLLRARKFALLWSLGSALALAGSALLRGGAACGRLLRCEEAPSRPALLYMAALGATLFAALGLRSTLLTVLGAGAQVAALLAALVGLLPWGGGTALRLALGRLGRGAGLAKVLPV

SEQ ID NO: 5057 - protein, 51 aa, Homo sapiens
MTSWPGGSFGPDPLLALLVVILLARLILWSCLGTYIDYRLAQRRPQKPKQD

SEQ ID NO: 5058 - protein, 56 aa, Homo sapiens
MARAPQPRRGPAAPGNALRALLRCNLPPGAQRVVVSAVLALLVLINVVLIFLLAFR

SEQ ID NO: 5059 - protein, 424 aa, Homo sapiens
MRRVLRLLLGCFLTELCARVCRAQERAGHGQLAQLGGVLLLAGGNRSGAASGEASEGAEASDAPPTRAPTPDFCRGYFDVMGQWDPPFNCSSGDFIFCCGTCGFRFCCTFKKRRLNQSTCTNYDTPLWLNTGKPPARKDDPLHDPTKDKTNLIVYIICGVVAVMVLVGIFTKLGLEKAHRPQREHMSRALADVMRPQGHCNTDHMERDLNIVVHVQHYENMDTRTPINNLHATQMNNAVPTSPLLQQMGHPHSYPNLGQISNPYEQQPPGKELNKYASLKAVGSSDGDWAVSTLKSPKADKVNDDFYTKRRHLAELAAKGNLPLHPVRVEDEPRAFSPEHGPAKQNGQKSRTNKMPPHPLAYTSTTNFKGWDPNEQSLRRQAYSNKGKLGTAETGSSDPLGTRPQHYPPPQPYFITNSKTEVTV

SEQ ID NO: 5060 - protein, 344 aa, Homo sapiens
MGQWDPPFNCSSGDFIFCCGTCGFRFCCTFKKRRLNQSTCTNYDTPLWLNTGKPPARKDDPLHDPTKDKTNLIVYIICGVVAVMVLVGIFTKLGLEKAHRPQREHMSRALADVMRPQGHCNTDHMERDLNIVVHVQHYENMDTRTPINNLHATQMNNAVPTSPLLQQMGHPHSYPNLGQISNPYEQQPPGKELNKYASLKAVGSSDGDWAVSTLKSPKADKVNDDFYTKRRHLAELAAKGNLPLHPVRVEDEPRAFSPEHGPAKQNGQKSRTNKMPPHPLAYTSTTNFKGWDPNEQSLRRQAYSNKGKLGTAETGSSDPLGTRPQHYPPPQPYFITNSKTEVTV

SEQ ID NO: 5061 - protein, 221 aa, Homo sapiens
MRRVLRLLLGCFLTELCARVCRAQERAGHGQLAQLGGVLLLAGGNRSGAASGEASEGAEASDAPPTRAPTPDFCRGYFDVMGQWDPPFNCSSGDFIFCCGTCGFRFCCTFKKRRLNQSTCTNYDTPLWLNTGKPPARKDDPLHDPTKDKTNLIVYIICGVVAVMVLVGIFTKLGLEKAHRPQREHMSRLYDNLLFMEAQISFQEDEPAPGEWSVGLQTWTV

SEQ ID NO: 5062 - protein, 79 aa, Homo sapiens
MAEEGDVDEADVFLAFAQGPSPPRGPVRRALDKAFFIFLALFLTLLMLEAAYKLLWLLLWAKLGDWLLGTPQKEEELEL

SEQ ID NO: 5063 - protein, 93 aa, Homo sapiens
MNGSQAGAAAQAAWLSSCCNQSASPPEPPEGPRAVQAVVLGVLSLLVLCGVLFLGGGLLLRAQGLTALLTREQRASREPEPGSASGEDGDDDS

SEQ ID NO: 5064 - protein, 70 aa, Homo sapiens
MSSPQLPAFLWDKGTLTTAISNPACLVNVLFFFTPLMTLVTLLILVWKVTKDKSNKNRETHPRKEATWLP

SEQ ID NO: 5065 - protein, 63 aa, Homo sapiens
MEWELNLLLYLALFFFLLFLLFLLLFVVIKQLKNSVANTAGALQPGRLSVHREPWGFSREQAV

SEQ ID NO: 5066 - protein, 199 aa, Homo sapiens
MTSCGQQSLNVLAVLFSLLFSAVLSAHFRVCEPYTDHKGRYHFGFHCPRLSDNKTFILCCHHNNTVFKYCCNETEFQAVMQANLTASSEGYMHNNYTALLGVWIYGFFVLMLLVLDLLYYSAMNYDICKVYLARWGIQGRWMKQDPRRWGNPARAPRPGQRAPQPQPPPGPLPQAPQAVHTLRGDAHSPPLMTFQSSSA

SEQ ID NO: 5067 - protein, 248 aa, Homo sapiens
MWLCPLALNLILMAASGAVCEVKDVCVGSPGIPGTPGSHGLPGRDGRDGLKGDPGPPGPMGPPGEMPCPPGNDGLPGAPGIPGECGEKGEPGERGPPGLPAHLDEELQATLHDFRHQILQTRGALSLQGSIMTVGEKVFSSNGQSITFDAIQEACARAGGRIAVPRNPEENEAIASFVKKYNTYAYVGLTEGPSPGDFRYSDGTPVNYTNWYRGEPAGRGKEQCVEMYTDGQWNDRNCLYSRLTICEF

SEQ ID NO: 5068 - protein, 263 aa, Homo sapiens
MRPCQVPGAATGPRAMWLCPLALNLILMAASGAVCEVKDVCVGSPGIPGTPGSHGLPGRDGRDGLKGDPGPPGPMGPPGEMPCPPGNDGLPGAPGIPGECGEKGEPGERGPPGLPAHLDEELQATLHDFRHQILQTRGALSLQGSIMTVGEKVFSSNGQSITFDAIQEACARAGGRIAVPRNPEENEAIASFVKKYNTYAYVGLTEGPSPGDFRYSDGTPVNYTNWYRGEPAGRGKEQCVEMYTDGQWNDRNCLYSRLTICEF

SEQ ID NO: 5069 - protein, 78 aa, Homo sapiens
MGSGLPLVLLLTLLGSSHGTGPGMTLQLKLKESFLTNSSYESSFLELLEKLCLLLHLPSGTSVTLHHARSQHHVVCNT

SEQ ID NO: 5070 - protein, 872 aa, Homo sapiens
MAPASASGEDLRKLPTMAEVNGEQDFIDLTRETRPRTKDRSGLYVIDLTRAEGENRPIATLDLTLEPVTPSQKEPTSLQTCASLSGKAVMEGHVDRSSQPTARRIINSDPVDLDLVEENTFVGPPPATSISGGSVYPTEPNCSSATFTGNLSFLASLQLSSDVSSLSPTSNNSRSSSSSSNQKAPLPCPQQDVSRPPQALPCPLRPLPCPPRASPCPPRASSCPPRALSCPSQTMQCQLPALTHPPQEVPCPRQNIPGPPQDSLGLPQDVPGLPQSILHPQDVAYLQDMPRSPGDVPQSPSDVSPSPDAPQSPGGMPHLPGDVLHSPGDMPHSSGDVTHSPRDIPHLPGDRPDFTQNDVQNRDMPMDISALSSPSCSPSPQSETPLEKVPWLSVMETPARKEISLSEPAKPGSAHVQSRTPQGGLYNRPCLHRLKYFLRPPVHHLFFQTLIPDKDTRENKGQKLEPIPHRRLRMVTNTIEENFPLGTVQFLMDFVSPQHYPPREIVAHIIQKILLSGSETVDVLKEAYMLLMKIQQLHPANAKTVEWDWKLLTYVMEEEGQTLPGRVLFLRYVVQTLEDDFQQTLRRQRQHLQQSIANMVLSCDKQPHNVRDVIKWLVKAVTEDGLTQPPNGNQTSSGTGILKASSSHPSSQPNLTKNTNQLIVCQLQRMLSIAVEVDRTPTCSSNKIAEMMFGFVLDIPERSQREMFFTTMESHLLRCKVLEIIFLHSCETPTRLPLSLAQALYFLNNSTSLLKCQSDKSQWQTWDELVEHLQFLLSSYQHVLREHLRSSVIDRKDLIIKRIKPKPQQGDDITVVDVEKQIEAFRSRLIQMLGEPLVPQLQDKVHLLKLLLFYAADLNPDAEPFQKGWSGS

SEQ ID NO: 5071 - protein, 326 aa, Homo sapiens
MEGHVDRSSQPTARRIINSDPVDLDLVEENTFVGPPPATSISGGSVYPTEPNCSSATFTGNLSFLASLQLSSDVSSLSPTSNNSRSSSSSSNQKAPLPCPQQDVSRPPQALPCPLRPLPCPPRASPCPPRASSCPPRALSCPSQTMQCQLPALTHPPQEVPCPRQNIPGPPQDSLGLPQDVPGLPQSILHPQDVAYLQDMPRSPGDVPQSPSDVSPSPDAPQSPGGMPHLPGDVLHSPGDMPHSSGDVTHSPRDIPHLPGDRPDFTQNDVQNRDMPMDISALSSPSCTPAWGTEQDSVSKKKKKKKRKEIPPNFLLFNLYRTRVKN

SEQ ID NO: 5072 - protein, 457 aa, Homo sapiens
MEDFIVISDDSGSESSGGARPGRSRRPRRALSRTSGALPRRTVNKGQKLEPIPHRRLRMVTNTIEENFPLGTVQFLMDFVSPQHYPPREIVAHIIQKILLSGSETVDVLKEAYMLLMKIQQLHPANAKTVEWDWKLLTYVMEEEGQTLPGRVLFLRYVVQTLEDDFQQTLRRQRQHLQQSIANMVLSCDKQPHNVRDVIKWLVKAVTEDGLTQPPNGNQTSSGTGILKASSSHPSSQPNLTKNTNQLIVCQLQRMLSIAVEVDRTPTCSSNKIAEMMFGFVLDIPERSQREMFFTTMESHLLRCKVLEIIFLHSCETPTRLPLSLAQALYFLNNSTSLLKCQSDKSQWQTWDELVEHLQFLLSSYQHVLREHLRSSVIDRKDLIIKRIKPKPQQGDDITVVDVEKQIEAFRSRLIQMLGEPLVPQLQDKVHLLKLLLFYAADLNPDAEPFQKGWSGS

SEQ ID NO: 5073 - protein, 333 aa, Homo sapiens
MPRSFEQVIILKKWFLKPYKGQTLPGRVLFLRYVVQTLEDDFQQTLRRQRQHLQQSIANMVLSCDKQPHNVRDVIKWLVKAVTEDGLTQPPNGNQTSSGTGILKASSSHPSSQPNLTKNTNQLIVCQLQRMLSIAVEVDRTPTCSSNKIAEMMFGFVLDIPERSQREMFFTTMESHLLRCKVLEIIFLHSCETPTRLPLSLAQALYFLNNSTSLLKCQSDKSQWQTWDELVEHLQFLLSSYQHVLREHLRSSVIDRKDLIIKRIKPKPQQGDDITVVDVEKQIEAFRSRLIQMLGEPLVPQLQDKVHLLKLLLFYAADLNPDAEPFQKGWSGS

SEQ ID NO: 5074 - protein, 891 aa, Homo sapiens
MEDFIVISDDSGSESSGGARPGRSRRPRRALSRTSGALPRRTVDFIDLTRETRPRTKDRSGLYVIDLTRAEGENRPIATLDLTLEPVTPSQKEPTSLQTCASLSGKAVMEGHVDRSSQPTARRIINSDPVDLDLVEENTFVGPPPATSISGGSVYPTEPNCSSATFTGNLSFLASLQLSSDVSSLSPTSNNSRSSSSSSNQKAPLPCPQQDVSRPPQALPCPLRPLPCPPRASPCPPRASSCPPRALSCPSQTMQCQLPALTHPPQEVPCPRQNIPGPPQDSLGLPQDVPGLPQSILHPQDVAYLQDMPRSPGDVPQSPSDVSPSPDAPQSPGGMPHLPGDVLHSPGDMPHSSGDVTHSPRDIPHLPGDRPDFTQNDVQNRDMPMDISALSSPSCSPSPQSETPLEKVPWLSVMETPARKEISLSEPAKPGSAHVQSRTPQGGLYNRPCLHRLKYFLRPPVHHLFFQTLIPDKDTRENKGQKLEPIPHRRLRMVTNTIEENFPLGTVQFLMDFVSPQHYPPREIVAHIIQKILLSGSETVDVLKEAYMLLMKIQQLHPANAKTVEWDWKLLTYVMEEEGQTLPGRVLFLRYVVQTLEDDFQQTLRRQRQHLQQSIANMVLSCDKQPHNVRDVIKWLVKAVTEDGLTQPPNGNQTSSGTGILKASSSHPSSQPNLTKNTNQLIVCQLQRMLSIAVEVDRTPTCSSNKIAEMMFGFVLDIPERSQREMFFTTMESHLLRCKVLEIIFLHSCETPTRLPLSLAQALYFLNNSTSLLKCQSDKSQWQTWDELVEHLQFLLSSYQHVLREHLRSSVIDRKDLIIKRIKPKPQQGDDITVVDVEKQIEAFRSRLIQMLGEPLVPQLQDKVHLLKLLLFYAADLNPDAEPFQKGWSGS

SEQ ID NO: 5075 - protein, 697 aa, Homo sapiens
MLLPLLLSSLLGGSQAMDGRFWIRVQESVMVPEGLCISVPCSFSYPRQDWTGSTPAYGYWFKAVTETTKGAPVATNHQSREVEMSTRGRFQLTGDPAKGNCSLVIRDAQMQDESQYFFRVERGSYVRYNFMNDGFFLKVTALTQKPDVYIPETLEPGQPVTVICVFNWAFEECPPPSFSWTGAALSSQGTKPTTSHFSVLSFTPRPQDHNTDLTCHVDFSRKGVSAQRTVRLRVAYAPRDLVISISRDNTPALEPQPQGNVPYLEAQKGQFLRLLCAADSQPPATLSWVLQNRVLSSSHPWGPRPLGLELPGVKAGDSGRYTCRAENRLGSQQRALDLSVQYPPENLRVMVSQANRTVLENLGNGTSLPVLEGQSLCLVCVTHSSPPARLSWTQRGQVLSPSQPSDPGVLELPRVQVEHEGEFTCHARHPLGSQHVSLSLSVHYSPKLLGPSCSWEAEGLHCSCSSQASPAPSLRWWLGEELLEGNSSQDSFEVTPSSAGPWANSSLSLHGGLSSGLRLRCEAWNVHGAQSGSILQLPDKKGLISTAFSNGAFLGIGITALLFLCLALIIMKILPKRRTQTETPRPRFSRHSTILDYINVVPTAGPLAQKRNQKATPNSPRTPLPPGAPSPESKKNQKKQYQLPSFPEPKSSTQAPESQESQEELHYATLNFPGVRPRPEARMPKGTQADYAEVKFQ

SEQ ID NO: 5076 - protein, 602 aa, Homo sapiens
MLLPLLLSSLLGGSQAMDGRFWIRVQESVMVPEGLCISVPCSFSYPRQDWTGSTPAYGYWFKAVTETTKGAPVATNHQSREVEMSTRGRFQLTGDPAKGNCSLVIRDAQMQDESQYFFRVERGSYVRYNFMNDGFFLKVTALTQKPDVYIPETLEPGQPVTVICVFNWAFEECPPPSFSWTGAALSSQGTKPTTSHFSVLSFTPRPQDHNTDLTCHVDFSRKGVSAQRTVRLRVAYAPRDLVISISRDNTPALEPQPQGNVPYLEAQKGQFLRLLCAADSQPPATLSWVLQNRVLSSSHPWGPRPLGLELPGVKAGDSGRYTCRAENRLGSQQRALDLSVQYPPENLRVMVSQANRTVLENLGNGTSLPVLEGQSLCLVCVTHSSPPARLSWTQRGQVLSPSQPSDPGVLELPRVQVEHEGEFTCHARHPLGSQHVSLSLSVHYKKGLISTAFSNGAFLGIGITALLFLCLALIIMKILPKRRTQTETPRPRFSRHSTILDYINVVPTAGPLAQKRNQKATPNSPRTPLPPGAPSPESKKNQKKQYQLPSFPEPKSSTQAPESQESQEELHYATLNFPGVRPRPEARMPKGTQADYAEVKFQ

SEQ ID NO: 5077 - protein, 639 aa, Homo sapiens
MLLPLLLSSLLGGSQAMDGRFWIRVQESVMVPEGLCISVPCSFSYPRQDWTGSTPAYGYWFKAVTETTKGAPVATNHQSREVEMSTRGRFQLTGDPAKGNCSLVIRDAQMQDESQYFFRVERGSYVRYNFMNDGFFLKVTVLSFTPRPQDHNTDLTCHVDFSRKGVSAQRTVRLRVAYAPRDLVISISRDNTPALEPQPQGNVPYLEAQKGQFLRLLCAADSQPPATLSWVLQNRVLSSSHPWGPRPLGLELPGVKAGDSGRYTCRAENRLGSQQRALDLSVQYPPENLRVMVSQANRTVLENLGNGTSLPVLEGQSLCLVCVTHSSPPARLSWTQRGQVLSPSQPSDPGVLELPRVQVEHEGEFTCHARHPLGSQHVSLSLSVHYSPKLLGPSCSWEAEGLHCSCSSQASPAPSLRWWLGEELLEGNSSQDSFEVTPSSAGPWANSSLSLHGGLSSGLRLRCEAWNVHGAQSGSILQLPDKKGLISTAFSNGAFLGIGITALLFLCLALIIMKILPKRRTQTETPRPRFSRHSTILDYINVVPTAGPLAQKRNQKATPNSPRTPLPPGAPSPESKKNQKKQYQLPSFPEPKSSTQAPESQESQEELHYATLNFPGVRPRPEARMPKGTQADYAEVKFQ

SEQ ID NO: 5078 - protein, 607 aa, Homo sapiens
MLLPLLLSSLLGGSQAMDGRFWIRVQESVMVPEGLCISVPCSFSYPRQDWTGSTPAYGYWFKAVTETTKGAPVATNHQSREVEMSTRGRFQLTGDPAKGNCSLVIRDAQMQDESQYFFRVERGSCHVDFSRKGVSAQRTVRLRVAYAPRDLVISISRDNTPALEPQPQGNVPYLEAQKGQFLRLLCAADSQPPATLSWVLQNRVLSSSHPWGPRPLGLELPGVKAGDSGRYTCRAENRLGSQQRALDLSVQYPPENLRVMVSQANRTVLENLGNGTSLPVLEGQSLCLVCVTHSSPPARLSWTQRGQVLSPSQPSDPGVLELPRVQVEHEGEFTCHARHPLGSQHVSLSLSVHYSPKLLGPSCSWEAEGLHCSCSSQASPAPSLRWWLGEELLEGNSSQDSFEVTPSSAGPWANSSLSLHGGLSSGLRLRCEAWNVHGAQSGSILQLPDKKGLISTAFSNGAFLGIGITALLFLCLALIIMKILPKRRTQTETPRPRFSRHSTILDYINVVPTAGPLAQKRNQKATPNSPRTPLPPGAPSPESKKNQKKQYQLPSFPEPKSSTQAPESQESQEELHYATLNFPGVRPRPEARMPKGTQADYAEVKFQ

SEQ ID NO: 5079 - protein, 185 aa, Homo sapiens
MLLPLLLSSLLGGSQAMDGRFWIRVQESVMVPEGLCISVPCSFSYPRQDWTGSTPAYGYWFKAVTETTKGAPVATNHQSREVEMSTRGRFQLTGDPAKGNCSLVIRDAQMQDESQYFFRVERGSYVRYNFMNDGFFLKVTGMRWGGNPCLSHWGGTLGTAYGLSREGSQGPLQHKNLPPRSLSQP

SEQ ID NO: 5080 - protein, 544 aa, Homo sapiens
MLLPLLLSSLLGGSQAMDGRFWIRVQESVMVPEGLCISVPCSFSYPRQDWTGSTPAYGYWFKAVTETTKGAPVATNHQSREVEMSTRGRFQLTGDPAKGNCSLVIRDAQMQDESQYFFRVERGSYVRYNFMNDGFFLKVTVLSFTPRPQDHNTDLTCHVDFSRKGVSAQRTVRLRVAYAPRDLVISISRDNTPALEPQPQGNVPYLEAQKGQFLRLLCAADSQPPATLSWVLQNRVLSSSHPWGPRPLGLELPGVKAGDSGRYTCRAENRLGSQQRALDLSVQYPPENLRVMVSQANRTVLENLGNGTSLPVLEGQSLCLVCVTHSSPPARLSWTQRGQVLSPSQPSDPGVLELPRVQVEHEGEFTCHARHPLGSQHVSLSLSVHYKKGLISTAFSNGAFLGIGITALLFLCLALIIMKILPKRRTQTETPRPRFSRHSTILDYINVVPTAGPLAQKRNQKATPNSPRTPLPPGAPSPESKKNQKKQYQLPSFPEPKSSTQAPESQESQEELHYATLNFPGVRPRPEARMPKGTQADYAEVKFQ

SEQ ID NO: 5081 - protein, 554 aa, Homo sapiens
MLLPLLLSSLLGGSQAMDGRFWIRVQESVMVPEGLCISVPCSFSYPRQDWTGSTPAYGYWFKAVTETTKGAPVATNHQSREVEMSTRGRFQLTGDPAKGNCSLVIRDAQMQDESQYFFRVERGSYVRYNFMNDGFFLKVTGTKPTTSHFSVLSFTPRPQDHNTDLTCHVDFSRKGVSAQRTVRLRVAYAPRDLVISISRDNTPALEPQPQGNVPYLEAQKGQFLRLLCAADSQPPATLSWVLQNRVLSSSHPWGPRPLGLELPGVKAGDSGRYTCRAENRLGSQQRALDLSVQYPPENLRVMVSQANRTVLENLGNGTSLPVLEGQSLCLVCVTHSSPPARLSWTQRGQVLSPSQPSDPGVLELPRVQVEHEGEFTCHARHPLGSQHVSLSLSVHYKKGLISTAFSNGAFLGIGITALLFLCLALIIMKILPKRRTQTETPRPRFSRHSTILDYINVVPTAGPLAQKRNQKATPNSPRTPLPPGAPSPESKKNQKKQYQLPSFPEPKSSTQAPESQESQEELHYATLNFPGVRPRPEARMPKGTQADYAEVKFQ

SEQ ID NO: 5082 - protein, 454 aa, Homo sapiens
MLLPLLLSSLLGGSQAMDGRFWIRVQESVMVPEGLCISVPCSFSYPRQDWTGSTPAYGYWFKAVTETTKGAPVATNHQSREVEMSTRGRFQLTGDPAKGNCSLVIRDAQMQDESQYFFRVERGSYVRYNFMNDGFFLKVTVLSFTPRPQDHNTDLTCHVDFSRKGVSAQRTVRLRVAYAPRDLVISISRDNTPDPPENLRVMVSQANRTVLENLGNGTSLPVLEGQSLCLVCVTHSSPPARLSWTQRGQVLSPSQPSDPGVLELPRVQVEHEGEFTCHARHPLGSQHVSLSLSVHYKKGLISTAFSNGAFLGIGITALLFLCLALIIMKILPKRRTQTETPRPRFSRHSTILDYINVVPTAGPLAQKRNQKATPNSPRTPLPPGAPSPESKKNQKKQYQLPSFPEPKSSTQAPESQESQEELHYATLNFPGVRPRPEARMPKGTQADYAEVKFQ

SEQ ID NO: 5083 - protein, 519 aa, Homo sapiens
MLLPLLLSSLLGGSQAMDGRFWIRVQESVMVPEGLCISVPCSFSYPRQDWTGSTPAYGYWFKAVTETTKGAPVATNHQSREVEMSTRGRFQLTGDPAKGNCSLVIRDAQMQDESQYFFRVERGSYVRYNFMNDGFFLKVTALTQKTVRLRVAYAPRDLVISISRDNTPALEPQPQGNVPYLEAQKGQFLRLLCAADSQPPATLSWVLQNRVLSSSHPWGPRPLGLELPGVKAGDSGRYTCRAENRLGSQQRALDLSVQYPPENLRVMVSQANRTVLENLGNGTSLPVLEGQSLCLVCVTHSSPPARLSWTQRGQVLSPSQPSDPGVLELPRVQVEHEGEFTCHARHPLGSQHVSLSLSVHYKKGLISTAFSNGAFLGIGITALLFLCLALIIMKILPKRRTQTETPRPRFSRHSTILDYINVVPTAGPLAQKRNQKATPNSPRTPLPPGAPSPESKKNQKKQYQLPSFPEPKSSTQAPESQESQEELHYATLNFPGVRPRPEARMPKGTQADYAEVKFQ

SEQ ID NO: 5084 - protein, 94 aa, Homo sapiens
MRAGFSDFQLIRDQVLFLQDQAQRLTEWLQLSGFENPVSESTTLCLREREKRIPTCVAVCVPSPGTVHTALLHPTTLSQSRSSSEAKMLIIHTA

SEQ ID NO: 5085 - protein, 68 aa, Homo sapiens
MAPAAAPSSLAVRASSPAATPTSYGVFCKGLSRTLLAFFELAWQLRMNFPYFYVAGSVILNIRLQVHI

SEQ ID NO: 5086 - protein, 698 aa, Homo sapiens
MVPGQAQPQSPEMLLLPLLLPVLGAGSLNKDPSYSLQVQRQVPVPEGLCVIVSCNLSYPRDGWDESTAAYGYWFKGRTSPKTGAPVATNNQSREVEMSTRDRFQLTGDPGKGSCSLVIRDAQREDEAWYFFRVERGSRVRHSFLSNAFFLKVTALTKKPDVYIPETLEPGQPVTVICVFNWAFKKCPAPSFSWTGAALSPRRTRPSTSHFSVLSFTPSPQDHDTDLTCHVDFSRKGVSAQRTVRLRVAYAPKDLIISISHDNTSALELQGNVIYLEVQKGQFLRLLCAADSQPPATLSWVLQDRVLSSSHPWGPRTLGLELRGVRAGDSGRYTCRAENRLGSQQQALDLSVQYPPENLRVMVSQANRTVLENLGNGTSLPVLEGQSLRLVCVTHSSPPARLSWTRWGQTVGPSQPSDPGVLELPPIQMEHEGEFTCHAQHPLGSQHVSLSLSVHYPPQLLGPSCSWEAEGLHCSCSSQASPAPSLRWWLGEELLEGNSSQGSFEVTPSSAGPWANSSLSLHGGLSSGLRLRCKAWNVHGAQSGSVFQLLPGKLEHGGGLGLGAALGAGVAALLAFCSCLVVFRVKICRKEARKRAAAEQDVPSTLGPISQGHQHECSAGSSQDHPPPGAATYTPGKGEEQELHYASLSFQGLRLWEPADQEAPSTTEYSEIKIHTGQPLRGPGFGLQLEREMSGMVPK

SEQ ID NO: 5087 - protein, 602 aa, Homo sapiens
MVPGQAQPQSPEMLLLPLLLPVLGAGSLNKDPSYSLQVQRQVPVPEGLCVIVSCNLSYPRDGWDESTAAYGYWFKGRTSPKTGAPVATNNQSREVEMSTRDRFQLTGDPGKGSCSLVIRDAQREDEAWYFFRVERGSRVRHSFLSNAFFLKVTALTKKPDVYIPETLEPGQPVTVICVFNWAFKKCPAPSFSWTGAALSPRRTRPSTSHFSVLSFTPSPQDHDTDLTCHVDFSRKGVSAQRTVRLRVAYAPKDLIISISHDNTSALELQGNVIYLEVQKGQFLRLLCAADSQPPATLSWVLQDRVLSSSHPWGPRTLGLELRGVRAGDSGRYTCRAENRLGSQQQALDLSVQYPPENLRVMVSQANRTVLENLGNGTSLPVLEGQSLRLVCVTHSSPPARLSWTRWGQTVGPSQPSDPGVLELPPIQMEHEGEFTCHAQHPLGSQHVSLSLSVHWKLEHGGGLGLGAALGAGVAALLAFCSCLVVFRVKICRKEARKRAAAEQDVPSTLGPISQGHQHECSAGSSQDHPPPGAATYTPGKGEEQELHYASLSFQGLRLWEPADQEAPSTTEYSEIKIHTGQPLRGPGFGLQLEREMSGMVPK

SEQ ID NO: 5088 - protein, 595 aa, Homo sapiens
MLLLLLLLPPLLCGRVGAKEQKDYLLTMQKSVTVQEGLCVSVLCSFSYPQNGWTASDPVHGYWFRAGDHVSRNIPVATNNPARAVQEETRDRFHLLGDPQNKDCTLSIRDTRESDAGTYVFCVERGNMKWNYKYDQLSVNVTASQDLLSRYRLEVPESVTVQEGLCVSVPCSVLYPHYNWTASSPVYGSWFKEGADIPWDIPVATNTPSGKVQEDTHGRFLLLGDPQTNNCSLSIRDARKGDSGKYYFQVERGSRKWNYIYDKLSVHVTALTHMPTFSIPGTLESGHPRNLTCSVPWACEQGTPPTITWMGASVSSLDPTITRSSMLSLIPQPQDHGTSLTCQVTLPGAGVTMTRAVRLNISYPPQNLTMTVFQGDGTASTTLRNGSALSVLEGQSLHLVCAVDSNPPARLSWTWGSLTLSPSQSSNLGVLELPRVHVKDEGEFTCRAQNPLGSQHISLSLSLQNEYTGKMRPISGVTLGAFGGAGATALVFLYFCIIFVVVRSCRKKSARPAVGVGDTGMEDANAVRGSASQGPLIESPADDSPPHHAPPALATPSPEEGEIQYASLSFHKARPQYPQEQEAIGYEYSEINIPK

SEQ ID NO: 5089 - protein, 477 aa, Homo sapiens
MLLPLLWANEERDSGGWADPRFSTASQDLLSRYRLEVPESVTVQEGLCVSVPCSVLYPHYNWTASSPVYGSWFKEGADIPWDIPVATNTPSGKVQEDTHGRFLLLGDPQTNNCSLSIRDARKGDSGKYYFQVERGSRKWNYIYDKLSVHVTALTHMPTFSIPGTLESGHPRNLTCSVPWACEQGTPPTITWMGASVSSLDPTITRSSMLSLIPQPQDHGTSLTCQVTLPGAGVTMTRAVRLNISYPPQNLTMTVFQGDGTASTTLRNGSALSVLEGQSLHLVCAVDSNPPARLSWTWGSLTLSPSQSSNLGVLELPRVHVKDEGEFTCRAQNPLGSQHISLSLSLQNEYTGKMRPISGVTLGAFGGAGATALVFLYFCIIFVVVRSCRKKSARPAVGVGDTGMEDANAVRGSASQGPLIESPADDSPPHHAPPALATPSPEEGEIQYASLSFHKARPQYPQEQEAIGYEYSEINIPK

SEQ ID NO: 5090 - protein, 396 aa, Homo sapiens
MLPLLLLPLLWGGSLQEKPVYELQVQKSVTVQEGLCVLVPCSFSYPWRSWYSSPPLYVYWFRDGEIPYYAEVVATNNPDRRVKPETQGRFRLLGDVQKKNCSLSIGDARMEDTGSYFFRVERGRDVKYSYQQNKLNLEVTALIEKPDIHFLEPLESGRPTRLSCSLPGSCEAGPPLTFSWTGNALSPLDPETTRSSELTLTPRPEDHGTNLTCQVKRQGAQVTTERTVQLNVSYAPQNLAISIFFRNGTGTALRILSNGMSVPIQEGQSLFLACTVDSNPPASLSWFREGKALNPSQTSMSGTLELPNIGAREGGEFTCRVQHPLGSQHLSFILSVQRSSSSCICVTEKQQGSWPLVLTLIRGALMGAGFLLTYGLTWIYYTRCGGPQQSRAERPG

SEQ ID NO: 5091 - protein, 328 aa, Homo sapiens
MEKSIWLLACLAWVLPTGSFVRTKIDTTENLLNTEVHSSPAQRWSMQVPPEVSAEAGDAAVLPCTFTHPHRHYDGPLTAIWRAGEPYAGPQVFRCAAARGSELCQTALSLHGRFRLLGNPRRNDLSLRVERLALADDRRYFCRVEFAGDVHDRYESRHGVRLHVTAAPRIVNISVLPSPAHAFRALCTAEGEPPPALAWSGPALGNSLAAVRSPREGHGHLVTAELPALTHDGRYTCTAANSLGRSEASVYLFRFHGASGASTVALLLGALGFKALLLLGVLAARAARRRPEHLDTPDTPPRSQAQESNYENLSQMNPRSPPATMCSP

SEQ ID NO: 5092 - protein, 174 aa, Homo sapiens
MTATRAATASGSAPRIVNISVLPSPAHAFRALCTAEGEPPPALAWSGPALGNSLAAVRSPREGHGHLVTAELPALTHDGRYTCTAANSLGRSEASVYLFRFHGASGASTVALLLGALGFKALLLLGVLAARAARRRPEHLDTPDTPPRSQAQESNYENLSQMNPRSPPATMCSP

SEQ ID NO: 5093 - protein, 481 aa, Homo sapiens
MLLLPLLLPVLGAGSLNKDPSYSLQVQRQVPVPEGLCVIVSCNLSYPRDGWDESTAAYGYWFKGRTSPKTGAPVATNNQSREVAMSTRDRFQLTGDPGKGSCSLVIRDAQREDEAWYFFRVERGSRVRHSFLSNAFFLKVTALTQKPDVYIPETLEPGQPVTVICVFNWAFKKCPAPSFSWTGAALSPRRTRPSTSHFSVLSFTPSPQDHDTDLTCHVDFSRKGVSAQRTVRLRVASLELQGNVIYLEVQKGQFLRLLCAADSQPPATLSWVLQDRVLSSSHPWGPRTLGLELPGVKAGDSGRYTCRAENRLGSQQRALDLSVQYPPENLRVMVSQANRTVLENLRNGTSLRVLEGQSLRLVCVTHSSPPARLSWTWGEQTVGPSQPSDPGVLQLPRVQMEHEGEFTCHARHPLGSQRVSLSFSVHCKSGPMTGVVLVAVGEVAMKILLLCLCLILLRVRSCRRKAARAALGMEAADAVTD

SEQ ID NO: 5094 - protein, 1273 aa, Homo sapiens
MKRRLDDQESPVYAAQQRRIPGSTEAFPHQHRVLAPAPPVYEAVSETMQSATGIQYSVTPSYQVSAMPQSSGSHGPAIAAVHSSHHHPTAVQPHGGQVVQSHAHPAPPVAPVQGQQQFQRLKVEDALSYLDQVKLQFGSQPQVYNDFLDIMKEFKSQSIDTPGVISRVSQLFKGHPDLIMGFNTFLPPGYKIEVQTNDMVNVTTPGQVHQIPTHGIQPQPQPPPQHPSQPSAQSAPAPAQPAPQPPPAKVSKPSQLQAHTPASQQTPPLPPYASPRSPPVQPHTPVTISLGTAPSLQNNQPVEFNHAINYVNKIKNRFQGQPDIYKAFLEILHTYQKEQRNAKEAGGNYTPALTEQEVYAQVARLFKNQEDLLSEFGQFLPDANSSVLLSKTTAEKVDSVRNDHGGTVKKPQLNNKPQRPSQNGCQIRRHPTGTTPPVKKKPKLLNLKDSSMADASKHGGGTESLFFDKVRKALRSAEAYENFLRCLVIFNQEVISRAELVQLVSPFLGKFPELFNWFKNFLGYKESVHLETYPKERATEGIAMEIDYASCKRLGSSYRALPKSYQQPKCTGRTPLCKEVLNDTWVSFPSWSEDSTFVSSKKTQYEEHIYRCEDERFELDVVLETNLATIRVLEAIQKKLSRLSAEEQAKFRLDNTLGGTSEVIHRKALQRIYADKAADIIDGLRKNPSIAVPIVLKRLKMKEEEWREAQRGFNKVWREQNEKYYLKSLDHQGINFKQNDTKVLRSKSLLNEIESIYDERQEQATEENAGVPVGPHLSLAYEDKQILEDAAALIIHHVKRQTGIQKEDKYKIKQIMHHFIPDLLFAQRGDLSDVEEEEEEEMDVDEATGAVKKHNGVGGSPPKSKLLFSNTAAQKLRGMDEVYNLFYVNNNWYIFMRLHQILCLRLLRICSQAERQIEEENREREWEREVLGIKRDKSDSPAIQLRLKEPMDVDVEDYYPAFLDMVRSLLDGNIDSSQYEDSLREMFTIHAYIAFTMDKLIQSIVRQLQHIVSDEICVQVTDLYLAENNNGATGGQLNTQNSRSLLESTYQRKAEQLMSDENCFKLMFIQSQGQVQLTIELLDTEEENSDDPVEAERWSDYVERYMNSDTTSPELREHLAQKPVFLPRNLRRIRKCQRGREQQEKEGKEGNSKKTMENVDSLDKLECRFKLNSYKMVYVIKSEDYMYRRTALLRAHQSHERVSKRLHQRFQAWVDKWTKEHVPREMAAETSKWLMGEGLEGLVPCTTTCDTETLHFVSINKYRVKYGTVFKAP

SEQ ID NO: 5095 - protein, 322 aa, Homo sapiens
MSGELPPNINIKEPRWDQSTFIGRANHFFTVTDPRNILLTNEQLESARKIVHDYRQGIVPPGLTENELWRAKYIYDSAFHPDTGEKMILIGRMSAQVPMNMTITGCMMTFYRTTPAVLFWQWINQSFNAVVNYTNRSGDAPLTVNELGTAYVSATTGAVATALGLNALTKHVSPLIGRFVPFAAVAAANCINIPLMRQRELKVGIPVTDENGNRLGESANAAKQAITQVVVSRILMAAPGMAIPPFIMNTLEKKAFLKRFPWMSAPIQVGLVGFCLVFATPLCCALFPQKSSMSVTSLEAELQAKIQESHPELRRVYFNKGL

SEQ ID NO: 5096 - protein, 321 aa, Homo sapiens
MGELPLDINIQEPRWDQSTFLGRARHFFTVTDPRNLLLSGAQLEASRNIVQNYRAGVVTPGITEDQLWRAKYVYDSAFHPDTGEKVVLIGRMSAQVPMNMTITGCMLTFYRKTPTVVFWQWVNQSFNAIVNYSNRSGDTPITVRQLGTAYVSATTGAVATALGLKSLTKHLPPLVGRFVPFAAVAAANCINIPLMRQRELQVGIPVADEAGQRLGYSVTAAKQGIFQVVISRICMAIPAMAIPPLIMDTLEKKDFLKRRPWLGAPLQVGLVGFCLVFATPLCCALFPQKSSIHISNLEPELRAQIHEQNPSVEVVYYNKGL

SEQ ID NO: 5097 - protein, 424 aa, Homo sapiens
MHRKHLQEIPDLSSNVATSFTWGWDSSKTSELLSGMGVSALEKEEPDSENIPQELLSNLGHPESPPRKRLKSKGSDKDFVIVRRPKLNRENFPGVSWDSLPDELLLGIFSCLCLPELLKVSGVCKRWYRLASDESLWQTLDLTGKNLHPDVTGRLLSQGVIAFRCPRSFMDQPLAEHFSPFRVQHMDLSNSVIEVSTLHGILSQCSKLQNLSLEGLRLSDPIVNTLAKNSNLVRLNLSGCSGFSEFALQTLLSSCSRLDELNLSWCFDFTEKHVQVAVAHVSETITQLNLSGYRKNLQKSDLSTLVRRCPNLVHLDLSDSVMLKNDCFQEFFQLNYLQHLSLSRCYDIIPETLLELGEIPTLKTLQVFGIVPDGTLQLLKEALPHLQINCSHFTTIARPTIGNKKNQEIWGIKCRLTLQKPSCL

SEQ ID NO: 5098 - protein, 410 aa, Homo sapiens
MHRKHLQEIPDLSSNVATSFTWGWDSSKTSELLSGMGVSALEKEEPDSENIPQELLSNLGHPESPPRKRLKSKGSDKDFVIVRRPKLNRENFPGVSWDSLPDELLLGIFSCLCLPELLKVSGVCKRWYRLASDESLWQTLDLTGKNLHPDVTGRLLSQGVIAFRCPRSFMDQPLAEHFSPFRVQHMDLSNSVIEVSTLHGILSQCSKLQNLSLEGLRLSDPIVNTLAKNSNLVRLNLSGCSGFSEFALQTLLSSCSRLDELNLSWCFDFTEKHVQVAVAHVSETITQLNLSGYRKNLQKSDLSTLVRRCPNLVHLDLSDSVMLKNDCFQEFFQLNYLQHLSLSRCYDIIPETLLLVTRAGVRIRLDSDIGCPQTYRTSKLKSSHKLFCQHVRVICIFVCDFYFYRLVLKQ

SEQ ID NO: 5099 - protein, 210 aa, Homo sapiens
MDQPLAEHFSTLAKNSNLVRLNLSGCSGFSEFALQTLLSSCSRLDELNLSWCFDFTEKHVQVAVAHVSETITQLNLSGYRKNLQKSDLSTLVRRCPNLVHLDLSDSVMLKNDCFQEFFQLNYLQHLSLSRCYDIIPETLLELGEIPTLKTLQVFGIVPDGTLQLLKEALPHLQINCSHFTTIARPTIGNKKNQEIWGIKCRLTLQKPSCL

SEQ ID NO: 5100 - protein, 356 aa, Homo sapiens
MSPCGRARRQTSRGAMAVLAWKFPRTRLPMGASALCVVVLCWLYIFPVYRLPNEKEIVQGVLQQGTAWRRNQTAARAFRKQMEDCCDPAHLFAMTKMNSPMGKSMWYDGEFLYSFTIDNSTYSLFPQATPFQLPLKKCAVVGNGGILKKSGCGRQIDEANFVMRCNLPPLSSEYTKDVGSKSQLVTANPSIIRQRFQNLLWSRKTFVDNMKIYNHSYIYMPAFSMKTGTEPSLRVYYTLSDVGANQTVLFANPNFLRSIGKFWKSRGIHAKRLSTGLFLVSAALGLCEEVAIYGFWPFSVNMHEQPISHHYYDNVLPFSGFHAMPEEFLQLWYLHKIGALRMQLDPCEDTSLQPTS

SEQ ID NO: 5101 - protein, 135 aa, Homo sapiens
MSPCGRARRQTSRGAMAVLAWKFPRTRLPMGASALCVVVLCWLYIFPVYRLPNEKEIVQGVLQQGTAWRRNQTAARAFRKQMEDCCDPAHLFAMTKMNSPMGKSMWYDGEFLYSFTIDNSTYSLFPQMQSPSFVK

SEQ ID NO: 5102 - protein, 217 aa, Homo sapiens
MATGSRTSLLLAFGLLCLPWLQEGSAFPTIPLSRLFDNAMLRAHRLHQLAFDTYQEFEEAYIPKEQKYSFLQNPQTSLCFSESIPTPSNREETQQKSNLELLRISLLLIQSWLEPVQFLRSVFANSLVYGASDSNVYDLLKDLEEGIQTLMGRLEDGSPRTGQIFKQTYSKFDTNSHNDDALLKNYGLLYCFRKDMDKVETFLRIVQCRSVEGSCGF

SEQ ID NO: 5103 - protein, 202 aa, Homo sapiens
MATGSRTSLLLAFGLLCLPWLQEGSAFPTIPLSRLFDNAMLRAHRLHQLAFDTYQEFNPQTSLCFSESIPTPSNREETQQKSNLELLRISLLLIQSWLEPVQFLRSVFANSLVYGASDSNVYDLLKDLEEGIQTLMGRLEDGSPRTGQIFKQTYSKFDTNSHNDDALLKNYGLLYCFRKDMDKVETFLRIVQCRSVEGSCGF

SEQ ID NO: 5104 - protein, 179 aa, Homo sapiens
MATGSRTSLLLAFGLLCLPWLQEGSAFPTIPLSRLFDNAMLRAHRLHQLAFDTYQEFEEAYIPKEQKYSFLQNPQTSLCFSESIPTPSNREETQQKSNLELLRISLLLIQTLMGRLEDGSPRTGQIFKQTYSKFDTNSHNDDALLKNYGLLYCFRKDMDKVETFLRIVQCRSVEGSCGF

SEQ ID NO: 5105 - protein, 171 aa, Homo sapiens
MATGSRTSLLLAFGLLCLPWLQEGSAFPTIPLSRLFDNAMLRAHRLHQLAFDTYQEFEEAYIPKEQKYSFLQNPQTSLCFSESIPTPSNREETQQKSNLELLRISLLLIQSWLEPVQIFKQTYSKFDTNSHNDDALLKNYGLLYCFRKDMDKVETFLRIVQCRSVEGSCGF

SEQ ID NO: 5106 - protein, 177 aa, Homo sapiens
MATGSRTSLLLAFGLLCLPWLQEGSAFPTIPLSRLFDNAMLRAHRLHQLAFDTYQEFNLELLRISLLLIQSWLEPVQFLRSVFANSLVYGASDSNVYDLLKDLEEGIQTLMGRLEDGSPRTGQIFKQTYSKFDTNSHNDDALLKNYGLLYCFRKDMDKVETFLRIVQCRSVEGSCGF

SEQ ID NO: 5107 - protein, 291 aa, Homo sapiens
MSQEGVELEKSVRRLREKFHGKVSSKKAGALMRKFGSDHTGVGRSIVYGVKQKDGQELSNDLDAQDPPEDMKQDRDIQAVATSLLPLTEANLRMFQRAQDDLIPAVDRQFACSSCDHVWWRRVPQRKEVSRCRKCRKRYEPVPADKMWGLAEFHCPKCRHNFRGWAQMGSPSPCYGCGFPVYPTRILPPRWDRDPDRRSTHTHSCSAADCYNRREPHVPGTSCAHPKSRKQNHLPKVLHPSNPHISSGSTVATCLSQGGLLEDLDNLILEDLKEEEEEEEEVEDEEGGPRE

SEQ ID NO: 5108 - protein, 240 aa, Homo sapiens
MSQHQQACGICRQEDPPEDMKQDRDIQAVATSLLPLTEANLRMFQRAQDDLIPAVDRQFACSSCDHVWWRRVPQRKEVSRCRKCRKRYEPVPADKMWGLAEFHCPKCRHNFRGWAQMGSPSPCYGCGFPVYPTRILPPRWDRDPDRRSTHTHSCSAADCYNRREPHVPGTSCAHPKSRKQNHLPKVLHPSNPHISSGSTVATCLSQGGLLEDLDNLILEDLKEEEEEEEEVEDEEGGPRE

SEQ ID NO: 5109 - protein, 163 aa, Homo sapiens
MSQEGVELEKSVRRLREKFHGKVSSKKAGALMRKFGSDHTGVGRSIVYGVKQKDGQELSNDLDAQDPPEDMKQDRDIQAVATSLLPLTEANLRMFQRAQDDLIPAVDRQFACSSCDHVWWRRVPQRKEVSRCRKCRKRYEPVPADKMWGLAEFHCPKCRHNFR

SEQ ID NO: 5110 - protein, 255 aa, Homo sapiens
MSQEGVELEKSVRRLREKFHGKVSSKKAGALMRKFGSDHTGVGRSIVYGVKQKDGQELSNDLDAQDPPEDMKQDRDIQAVATSLLPLTEANLRMFQRAQDDLIPAVDRQFACSSCDHVWWRRVPQRKEVSRCRKCRKRYEPVPADKMWGLAEFHCPKCRHNFRTHTHSCSAADCYNRREPHVPGTSCAHPKSRKQNHLPKVLHPSNPHISSGSTVATCLSQGGLLEDLDNLILEDLKEEEEEEEEVEDEEGGPRE

SEQ ID NO: 5111 - protein, 696 aa, Homo sapiens
MLLWILLLETSLCFAAGNVTGDVCKEKICSCNEIEGDLHVDCEKKGFTSLQRFTAPTSQFYHLFLHGNSLTRLFPNEFANFYNAVSLHMENNGLHEIVPGAFLGLQLVKRLHINNNKIKSFRKQTFLGLDDLEYLQADFNLLRDIDPGAFQDLNKLEVLILNDNLISTLPANVFQYVPITHLDLRGNRLKTLPYEEVLEQIPGIAEILLEDNPWDCTCDLLSLKEWLENIPKNALIGRVVCEAPTRLQGKDLNETTEQDLCPLKNRVDSSLPAPPAQEETFAPGPLPTPFKTNGQEDHATPGSAPNGGTKIPGNWQIKIRPTAAIATGSSRNKPLANSLPCPGGCSCDHIPGSGLKMNCNNRNVSSLADLKPKLSNVQELFLRDNKIHSIRKSHFVDYKNLILLDLGNNNIATVENNTFKNLLDLRWLYMDSNYLDTLSREKFAGLQNLEYLNVEYNAIQLILPGTFNAMPKLRILILNNNLLRSLPVDVFAGVSLSKLSLHNNYFMYLPVAGVLDQLTSIIQIDLHGNPWECSCTIVPFKQWAERLGSEVLMSDLKCETPVNFFRKDFMLLSNDEICPQLYARISPTLTSHSKNSTGLAETGTHSNSYLDTSRVSISVLVPGLLLVFVTSAFTVVGMLVFILRNRKRSKRRDANSSASEINSLQTVCDSSYWHNGPYNADGAHRVYDCGSHSLSD

SEQ ID NO: 5112 - protein, 305 aa, Homo sapiens
MACILKRKSVIAVSFIAAFLFLLVVRLVNEVNFPLLLNCFGQPGTKWIPFSYTYRRPLRTHYGYINVKTQEPLQLDCDLCAIVSNSGQMVGQKVGNEIDRSSCIWRMNNAPTKGYEEDVGRMTMIRVVSHTSVPLLLKNPDYFFKEANTTIYVIWGPFRNMRKDGNGIVYNMLKKTVGIYPNAQIYVTTEKRMSYCDGVFKKETGKDRVQSGSYLSTGWFTFLLAMDACYGIHVYGMINDTYCKTEGYRKVPYHYYEQGRDECDEYFLHEHAPYGGHRFITEKKVFAKWAKKHRIIFTHPNWTLS

SEQ ID NO: 5113 - protein, 210 aa, Homo sapiens
MACILKRKSVIAVSFIAAFLFLLVVRLVNEVNFPLLLNCFGQPGTKWIPFSYTYRRPLRTHYGYINVKTQEPLQLDCDLCAIVSNSGQMVGQKVGNEIDRSSCIWRMNNAPTKGYEEDVGRMTMIRVVSHTSVPLLLKNPDYFFKEANTTIYVIWGPFRNMRKDGNGIVYNMLKKTVGIYPNAQIYVTTEKRMSYCDGVFKKETGKDSTE

SEQ ID NO: 5114 - protein, 423 aa, Homo sapiens
MQQEGGPVRSAPCRTGTLEGSRQGSPGHRKRASPKGSLSSAQPHSWMLTPSPLNSHCAHREPISSSPQPVANGPKQKKKSNWRSTTRLRIIRLRDRLEPRPLAILEDYADPFDVQETGEGSAGASGAPEKVPENDGYMEPYEAQKMMAEIRGSKETATQPLPLYDTPYEPEEDGATAEGEGAPWPRESRLPEDDERPPEEYDQPWEWKKERISKAFAVDIKVIKDLPWPPPVGQLDSSPSLPDGDRDISGPASPLPEPSLEDSSAQFEGPEKSCLSPGREEKGRLPPRLSAGNPKSAKPLSMEPSSPLGEWTDPALPLENQVWYHGAISRTDAENLLRLCKEASYLVRNSETSKNDFSLSLKSSQGFMHMKLSRTKEHKYVLGQNSPPFSSVPEIVHHYASRKLPIKGAEHMSLLYPVAIRTL

SEQ ID NO: 5115 - protein, 376 aa, Homo sapiens
MQQEGGPVRSAPCRTGTLEGSRQGSPGHRKRASPKGSLSSAQPHSWMLTPSPLNSHCAHREPISSSPQPVANGPKQKKKSNWRSTTRLRIIRLRDRLEPRPLAILEDYADPFDVQETGEGSAGASGAPEKVPENDGYMEPYEAQKMMAEIRGSKETATQPLPLYDTPYEPEEDGATAEGEGAPWPRESRLPEDDERPPEEYDQPWEWKKERISKAFAAQFEGPEKSCLSPGREEKGRLPPRLSAGNPKSAKPLSMEPSSPLGEWTDPALPLENQVWYHGAISRTDAENLLRLCKEASYLVRNSETSKNDFSLSLKSSQGFMHMKLSRTKEHKYVLGQNSPPFSSVPEIVHHYASRKLPIKGAEHMSLLYPVAIRTL

SEQ ID NO: 5116 - protein, 86 aa, Homo sapiens
MTDRYTIHSQLEHLQSKYIGTGHADTTKWEWLVNQHRDSYCSYMGHFDLLNYFAIAENESKARVRFNLMEKMLQPCGPPADKPEEN

SEQ ID NO: 5117 - protein, 845 aa, Homo sapiens
MLSGVWFLSVLTVAGILQTESRKTAKDICKIRCLCEEKENVLNINCENKGFTTVSLLQPPQYRIYQLFLNGNLLTRLYPNEFVNYSNAVTLHLGNNGLQEIRTGAFSGLKTLKRLHLNNNKLEILREDTFLGLESLEYLQADYNYISAIEAGAFSKLNKLKVLILNDNLLLSLPSNVFRFVLLTHLDLRGNRLKVMPFAGVLEHIGGIMEIQLEENPWNCTCDLLPLKAWLDTITVFVGEIVCETPFRLHGKDVTQLTRQDLCPRKSASDSSQRGSHADTHVQRLSPTMNPALNPTRAPKASRPPKMRNRPTPRVTVSKDRQSFGPIMVYQTKSPVPLTCPSSCVCTSQSSDNGLNVNCQERKFTNISDLQPKPTSPKKLYLTGNYLQTVYKNDLLEYSSLDLLHLGNNRIAVIQEGAFTNLTSLRRLYLNGNYLEVLYPSMFDGLQSLQYLYLEYNVIKEIKPLTFDALINLQLLFLNNNLLRSLPDNIFGGTALTRLNLRNNHFSHLPVKGVLDQLPAFIQIDLQENPWDCTCDIMGLKDWTEHANSPVIINEVTCESPAKHAGEILKFLGREAICPDSPNLSDGTVLSMNHNTDTPRSLSVSPSSYPELHTEVPLSVLILGLLVVFILSVCFGAGLFVFVLKRRKGVPSVPRNTNNLDVSSFQLQYGSYNTETHDKTDGHVYNYIPPPVGQMCQNPIYMQKEGDPVAYYRNLQEFSYSNLEEKKEEPATPAYTISATELLEKQATPREPELLYQNIAERVKELPSAGLVHYNFCTLPKRQFAPSYESRRQNQDRINKTVLYGTPRKCFVGQSKPNHPLLQAKPQSEPDYLEVLEKQTAISQL

SEQ ID NO: 5118 - protein, 733 aa, Homo sapiens
MLSGVWFLSVLTVAGILQTESRKTAKDICKIRCLCEEKENVLNINCENKGFTTVSLLQPPQYRIYQLFLNGNLLTRLYPNEFVNYSNAVTLHLGNNGLQEIRTGAFSGLKTLKRLHLNNNKLEILREDTFLGLESLEYLQADYNYISAIEAGAFSKLNKLKVLILNDNLLLSLPSNVFRFVLLTHLDLRGNRLKVMPFAGVLEHIGGIMEIQLEENPWNCTCDLLPLKAWLDTITVFVGEIVCETPFRLHGKDVTQLTRQDLCPRKSASDSSQRGSHADTHVQRLSPTMNPALNPTRAPKASRPPKMRNRPTPRVTVSKDRQSFGPIMVYQTKSPVPLTCPSSCVCTSQSSDNGLNVNCQERKFTNISDLQPKPTSPKKLYLTGNYLQTVYKNDLLEYSSLDLLHLGNNRIAVIQEGAFTNLTSLRRLYLNGNYLEVLYPSMFDGLQSLQYLYLEYNVIKEIKPLTFDALINLQLLFLNNNLLRSLPDNIFGGTALTRLNLRNNHFSHLPVKGVLDQLPAFIQIDLQENPWDCTCDIMGLKDWTEHANSPVIINEVTCESPAKHAGEILKFLGREAICPDSPNLSDGTVLSMNHNTDTPRSLSVSPSSYPELHTEVPLSVLILGLLVVFILSVCFGAGLFVFVLKRRKGVPSVPRNTNNLDVSSFQLQYGSYNTETHDKTDGHVYNYIPPPVGQMCQNPIYMQKEGDPVAYYRNLQEFKTSLENIWRPCLHKK

SEQ ID NO: 5119 - protein, 302 aa, Homo sapiens
MKAPGRLVLIILCSVVFSAVYILLCCWAGLPLCLATCLDHHFPTGSRPTVPGPLHFSGYSSVPDGKPLVREPCRSCAVVSSSGQMLGSGLGAEIDSAECVFRMNQAPTVGFEADVGQRSTLRVVSHTSVPLLLRNYSHYFQKARDTLYMVWGQGRHMDRVLGGRTYRTLLQLTRMYPGLQVYTFTERMMAYCDQIFQDETGKNRRQSGSFLSTGWFTMILALELCEEIVVYGMVSDSYCREKSHPSVPYHYFEKGRLDECQMYLAHEQAPRSAHRFITEKAVFSRWAKKRPIVFAHPSWRTE

SEQ ID NO: 5120 - protein, 977 aa, Homo sapiens
MKPSIAEMLHRGRMLWIILLSTIALGWTTPIPLIEDSEEIDEPCFDPCYCEVKESLFHIHCDSKGFTNISQITEFWSRPFKLYLQRNSMRKLYTNSFLHLNNAVSINLGNNALQDIQTGAFNGLKILKRLYLHENKLDVFRNDTFLGLESLEYLQADYNVIKRIESGAFRNLSKLRVLILNDNLIPMLPTNLFKAVSLTHLDLRGNRLKVLFYRGMLDHIGRSLMELQLEENPWNCTCEIVQLKSWLERIPYTALVGDITCETPFHFHGKDLREIRKTELCPLLSDSEVEASLGIPHSSSSKENAWPTKPSSMLSSVHFTASSVEYKSSNKQPKPTKQPRTPRPPSTSQALYPGPNQPPIAPYQTRPPIPIICPTGCTCNLHINDLGLTVNCKERGFNNISELLPRPLNAKKLYLSSNLIQKIYRSDFWNFSSLDLLHLGNNRISYVQDGAFINLPNLKSLFLNGNDIEKLTPGMFRGLQSLHYLYFEFNVIREIQPAAFSLMPNLKLLFLNNNLLRTLPTDAFAGTSLARLNLRKNYFLYLPVAGVLEHLNAIVQIDLNENPWDCTCDLVPFKQWIETISSVSVVGDVLCRSPENLTHRDVRTIELEVLCPEMLHVAPAGESPAQPGDSHLIGAPTSASPYEFSPPGGPVPLSVLILSLLVLFFSAVFVAAGLFAYVLRRRRKKLPFRSKRQEGVDLTGIQMQCHRLFEDGGGGGGGSGGGGRPTLSSPEKAPPVGHVYEYIPHPVTQMCNNPIYKPREEEEVAVSSAQEAGSAERGGPGTQPPGMGEALLGSEQFAETPKENHSNYRTLLEKEKEWALAVSSSQLNTIVTVNHHHPHHPAVGGVSGVVGGTGGDLAGFRHHEKNGGVVLFPPGGGCGSGSMLLDRERPQPAPCTVGFVDCLYGTVPKLKELHVHPPGMQYPDLQQDARLKETLLFSAGKGFTDHQTQKSDYLELRAKLQTKPDYLEVLEKTTYRF

SEQ ID NO: 5121 - protein, 336 aa, Homo sapiens
MKTLMRHGLAVCLALTTMCTSLLLVYSSLGGQKERPPQQQQQQQQQQQQASATGSSQPAAESSTQQRPGVPAGPRPLDGYLGVADHKPLKMHCRDCALVTSSGHLLHSRQGSQIDQTECVIRMNDAPTRGYGRDVGNRTSLRVIAHSSIQRILRNRHDLLNVSQGTVFIFWGPSSYMRRDGKGQVYNNLHLLSQVLPRLKAFMITRHKMLQFDELFKQETGKDRKISNTWLSTGWFTMTIALELCDRINVYGMVPPDFCRDPNHPSVPYHYYEPFGPDECTMYLSHERGRKGSHHRFITEKRVFKNWARTFNIHFFQPDWKPESLAINHPENKPVF

SEQ ID NO: 5122 - protein, 125 aa, Homo sapiens
MAMQAAKRANIRLPPEVNRILYIRNLPYKITAEEMYDIFGKYGPIRQIRVGNTPETRGTAYVVYEDIFDAKNACDHLSGFNVCNRYLVVLYYNANRAFQKMDTKKKEEQLKLLKEKYGINTDPPK

SEQ ID NO: 5123 - protein, 837 aa, Homo sapiens
MFLWLFLILSALISSTNADSDISVEICNVCSCVSVENVLYVNCEKVSVYRPNQLKPPWSNFYHLNFQNNFLNILYPNTFLNFSHAVSLHLGNNKLQNIEGGAFLGLSALKQLHLNNNELKILRADTFLGIENLEYLQADYNLIKYIERGAFNKLHKLKVLILNDNLISFLPDNIFRFASLTHLDIRGNRIQKLPYIGVLEHIGRVVELQLEDNPWNCSCDLLPLKAWLENMPYNIYIGEAICETPSDLYGRLLKETNKQELCPMGTGSDFDVRILPPSQLENGYTTPNGHTTQTSLHRLVTKPPKTTNPSKISGIVAGKALSNRNLSQIVSYQTRVPPLTPCPAPCFCKTHPSDLGLSVNCQEKNIQSMSELIPKPLNAKKLHVNGNSIKDVDVSDFTDFEGLDLLHLGSNQITVIKGDVFHNLTNLRRLYLNGNQIERLYPEIFSGLHNLQYLYLEYNLIKEISAGTFDSMPNLQLLYLNNNLLKSLPVYIFSGAPLARLNLRNNKFMYLPVSGVLDQLQSLTQIDLEGNPWDCTCDLVALKLWVEKLSDGIVVKELKCETPVQFANIELKSLKNEILCPKLLNKPSAPFTSPAPAITFTTPLGPIRSPPGGPVPLSILILSILVVLILTVFVAFCLLVFVLRRNKKPTVKHEGLGNPDCGSMQLQLRKHDHKTNKKDGLSTEAFIPQTIEQMSKSHTCGLKESETGFMFSDPPGQKVVMRNVADKEKDLLHVDTRKRLSTIDELDELFPSRDSNVFIQNFLESKKEYNSIGVSGFEIRYPEKQPDKKSKKSLIGGNHSKIVVEQRKSEYFELKAKLQSSPDYLQVLEEQTALNKI

SEQ ID NO: 5124 - protein, 333 aa, Homo sapiens
MACSRPPSQCEPTSLPPGPPAGRRHLPLSRRRREMSSNKEQRSAVFVILFALITILILYSSNSANEVFHYGSLRGRSRRPVNLKKWSITDGYVPILGNKTLPSRCHQCVIVSSSSHLLGTKLGPEIERAECTIRMNDAPTTGYSADVGNKTTYRVVAHSSVFRVLRRPQEFVNRTPETVFIFWGPPSKMQKPQGSLVRVIQRAGLVFPNMEAYAVSPGRMRQFDDLFRGETGKDREKSHSWLSTGWFTMVIAVELCDHVHVYGMVPPNYCSQRPRLQRMPYHYYEPKGPDECVTYIQNEHSRKGNHHRFITEKRVFSSWAQLYGITFSHPSWT

SEQ ID NO: 5125 - protein, 299 aa, Homo sapiens
MSSNKEQRSAVFVILFALITILILYSSNSANEVFHYGSLRGRSRRPVNLKKWSITDGYVPILGNKTLPSRCHQCVIVSSSSHLLGTKLGPEIERAECTIRMNDAPTTGYSADVGNKTTYRVVAHSSVFRVLRRPQEFVNRTPETVFIFWGPPSKMQKPQGSLVRVIQRAGLVFPNMEAYAVSPGRMRQFDDLFRGETGKDREKSHSWLSTGWFTMVIAVELCDHVHVYGMVPPNYCSQRPRLQRMPYHYYEPKGPDECVTYIQNEHSRKGNHHRFITEKRVFSSWAQLYGITFSHPSWT

SEQ ID NO: 5126 - protein, 374 aa, Homo sapiens
MACSRPPSQCEPTSLPPGPPAGRRHLPLSRRRREMSSNKEQRSAVFVILFALITILILYSSNSANEVFHYGSLRGRSRRPVNLKKWSITDGYVPILGNKTLPSRCHQCVIVSSSSHLLGTKLGPEIERAECTIRMNDAPTTGYSADVGNKTTYRVVAHSSVFRVLRRPQEFVNRTPETVFIFWGPPSKMQKPQGSLVRVIQRAGLVFPNMEAYAVSPGRMRQFDDLFRGETGKDREKSHSWLSTGWFTMVIAVELCDHVHVYGMVPPNYCSGPASSACPTTTTSPRGRTNVSPTSRMSTVARATTTASSPRKGSSHRGPSCMASPSPTPPGPRPPSLWDLRRVRGEAASAQPLGQGPSSGQSRLAGVSPSQSGP

SEQ ID NO: 5127 - protein, 375 aa, Homo sapiens
MQLQFRSWMLAALTLLVVFLIFADISEIEEEIGNSGGRGTIRSAVNSLHSKSNRAEVVINGSSSPAVVDRSNESIKHNIQPASSKWRHNQTLSLRIRKQILKFLDAEKDISVLKGTLKPGDIIHYIFDRDSTMNVSQNLYELLPRTSPLKNKHFGTCAIVGNSGVLLNSGCGQEIDAHSFVIRCNLAPVQEYARDVGLKTDLVTMNPSVIQRAFEDLVNATWREKLLQRLHSLNGSILWIPAFMARGGKERVEWVNELILKHHVNVRTAYPSLRLLHAVRGYWLTNKVHIKRPTTGLLMYTLATRFCKQIYLYGFWPFPLDQNQNPVKYHYYDSLKYGYTSQASPHTMPLEFKALKSLHEQGALKLTVGQCDGAT

SEQ ID NO: 5128 - protein, 876 aa, Homo sapiens
MGDSDDEYDRRRRDKFRRERSDYDRSRERDERRRGDDWNDREWDRGRERRSRGEYRDYDRNRRERFSPPRHELSPPQKRMRRDWDEHSSDPYHSGYEMPYAGGGGGPTYGPPQPWGHPDVHIMQHHVLPIQARLGSIAEIDLGVPPPVMKTFKEFLLSLDDSVDETEAVKRYNDYKLDFRRQQMQDFFLAHKDEEWFRSKYHPDEVGKRRQEARGALQNRLRVFLSLMETGWFDNLLLDIDKADAIVKMLDAAVIKMEGGTENDLRILEQEEEEEQAGKPGEPSKKEEGRAGAGLGDGERKTNDKDEKKEDGKQAENDSSNDDKTKKSEGDGDKEEKKEDSEKEAKKSSKKRNRKHSGDDSFDEGSVSESESESESGQAEEEKEEAEEALKEKEKPKEEEWEKPKDAAGLECKPRPLHKTCSLFMRNIAPNISRAEIISLCKRYPGFMRVALSEPQPERRFFRRGWVTFDRSVNIKEICWNLQNIRLRECELSPGVNRDLTRRVRNINGITQHKQIVRNDIKLAAKLIHTLDDRTQLWASEPGTPPLPTSLPSQNPILKNITDYLIEEVSAEEEELLGSSGGAPPEEPPKEGNPAEINVERDEKLIKVLDKLLLYLRIVHSLDYYNTCEYPNEDEMPNRCGIIHVRGPMPPNRISHGEVLEWQKTFEEKLTPLLSVRESLSEEEAQKMGRKDPEQEVEKFVTSNTQELGKDKWLCPLSGKKFKGPEFVRKHIFNKHAEKIEEVKKEVAFFNNFLTDAKRPALPEIKPAQPPGPAQILPPGLTPGLPYPHQTPQGLMPYGQPRPPILGYGAGAVRPAVPTGGPPYPHAPYGAGRGNYDAFRGQGGYPGKPRNRMVRGDPRAIVEYRDLDAPDDVDFF

SEQ ID NO: 5129 - protein, 872 aa, Homo sapiens
MGDSDDEYDRRRRDKFRRERSDYDRSRERDERRRGDDWNDREWDRGRERRSRGEYRDYDRNRRERFSPPRHELSPPQKRMRRDWDEHSSDPYHSGYEMPYAGGGGGPTYGPPQPWGHPDVHIMQHHVLPIQARLGSIAEIDLGVPPPVMKTFKEFLLSLDDSVDETEAVKRYNDYKLDFRRQQMQDFFLAHKDEEWFRSKYHPDEVGKRRQEARGALQNRLRVFLSLMETGWFDNLLLDIDKADAIVKMLDAAVIKMEGGTENDLRILEQEEEEEQAGKPGEPSKKEEGRAGAGLGDGERKTNDKDEKKEDGKQAENDSSNDDKTKKSEGDGDKEEKKEDSEKEAKKSSKKRNRKHSGDDSFDEGSVSESESESESGQAEEEKEEAEEALKEKEKPKEEEWEKPKDAAGLECKPRPLHKTCSLFMRNIAPNISRAEIISLCKRYPGFMRVALSEPQPERRFFRRGWVTFDRSVNIKEICWNLQNIRLRECELSPGVNRDLTRRVRNINGITQHKQIVRNDIKLAAKLIHTLDDRTQLWASEPGTPPLPTSLPSQNPILKNITDYLIEEVSAEEEELLGSSGGAPPEEPPKEGNPAEINVERDEKLIKVLDKLLLYLRIVHSLDYYNTCEYPNEDEMPNRCGIIHVRGPMPPNRISHGEVLEWQKTFEEKLTPLLSVRESLSEEEAQKMGRKDPEQEVEKFVTSNTQELGKDKWLCPLSGKKFKGPEFVRKHIFNKHAEKIEEVKKEVAFFNNFLTDAKRPALPEIKPAQPPGPAQSLTPGLPYPHQTPQGLMPYGQPRPPILGYGAGAVRPAVPTGGPPYPHAPYGAGRGNYDAFRGQGGYPGKPRNRMVRGDPRAIVEYRDLDAPDDVDFF

SEQ ID NO: 5130 - protein, 875 aa, Homo sapiens
MGDSDDEYDRRRRDKFRRERSDYDRSRERDERRRGDDWNDREWDRGRERRSRGEYRDYDRNRRERFSPPRHELSPPQKRMRRDWDEHSSDPYHSGYEMPYAGGGGGPTYGPPQPWGHPDVHIMQHHVLPIQARLGSIAEIDLGVPPPVMKTFKEFLLSLDDSVDETEAVKRYNDYKLDFRRQQMQDFFLAHKDEEWFRSKYHPDEVGKRRQEARGALQNRLRVFLSLMETGWFDNLLLDIDKADAIVKMLDAAVIKMEGGTENDLRILEQEEEEEQAGKPGEPSKKEEGRAGAGLGDGERKTNDKDEKKEDGKQAENDSSNDDKTKKSEGDGDKEEKKEDSEKEAKKSSKKRNRKHSGDDSFDEGSVSESESESESGQAEEEKEEAEALKEKEKPKEEEWEKPKDAAGLECKPRPLHKTCSLFMRNIAPNISRAEIISLCKRYPGFMRVALSEPQPERRFFRRGWVTFDRSVNIKEICWNLQNIRLRECELSPGVNRDLTRRVRNINGITQHKQIVRNDIKLAAKLIHTLDDRTQLWASEPGTPPLPTSLPSQNPILKNITDYLIEEVSAEEEELLGSSGGAPPEEPPKEGNPAEINVERDEKLIKVLDKLLLYLRIVHSLDYYNTCEYPNEDEMPNRCGIIHVRGPMPPNRISHGEVLEWQKTFEEKLTPLLSVRESLSEEEAQKMGRKDPEQEVEKFVTSNTQELGKDKWLCPLSGKKFKGPEFVRKHIFNKHAEKIEEVKKEVAFFNNFLTDAKRPALPEIKPAQPPGPAQILPPGLTPGLPYPHQTPQGLMPYGQPRPPILGYGAGAVRPAVPTGGPPYPHAPYGAGRGNYDAFRGQGGYPGKPRNRMVRGDPRAIVEYRDLDAPDDVDFF

SEQ ID NO: 5131 - protein, 871 aa, Homo sapiens
MGDSDDEYDRRRRDKFRRERSDYDRSRERDERRRGDDWNDREWDRGRERRSRGEYRDYDRNRRERFSPPRHELSPPQKRMRRDWDEHSSDPYHSGYEMPYAGGGGGPTYGPPQPWGHPDVHIMQHHVLPIQARLGSIAEIDLGVPPPVMKTFKEFLLSLDDSVDETEAVKRYNDYKLDFRRQQMQDFFLAHKDEEWFRSKYHPDEVGKRRQEARGALQNRLRVFLSLMETGWFDNLLLDIDKADAIVKMLDAAVIKMEGGTENDLRILEQEEEEEQAGKPGEPSKKEEGRAGAGLGDGERKTNDKDEKKEDGKQAENDSSNDDKTKKSEGDGDKEEKKEDSEKEAKKSSKKRNRKHSGDDSFDEGSVSESESESESGQAEEEKEEAEALKEKEKPKEEEWEKPKDAAGLECKPRPLHKTCSLFMRNIAPNISRAEIISLCKRYPGFMRVALSEPQPERRFFRRGWVTFDRSVNIKEICWNLQNIRLRECELSPGVNRDLTRRVRNINGITQHKQIVRNDIKLAAKLIHTLDDRTQLWASEPGTPPLPTSLPSQNPILKNITDYLIEEVSAEEEELLGSSGGAPPEEPPKEGNPAEINVERDEKLIKVLDKLLLYLRIVHSLDYYNTCEYPNEDEMPNRCGIIHVRGPMPPNRISHGEVLEWQKTFEEKLTPLLSVRESLSEEEAQKMGRKDPEQEVEKFVTSNTQELGKDKWLCPLSGKKFKGPEFVRKHIFNKHAEKIEEVKKEVAFFNNFLTDAKRPALPEIKPAQPPGPAQSLTPGLPYPHQTPQGLMPYGQPRPPILGYGAGAVRPAVPTGGPPYPHAPYGAGRGNYDAFRGQGGYPGKPRNRMVRGDPRAIVEYRDLDAPDDVDFF

SEQ ID NO: 5132 - protein, 839 aa, Homo sapiens
MGDSDDEYDRRRRDKFRRERSDYDRSRERDERRRGDDWNDREWDRGRERRSRGEYRDYDRNRRERFSPPRHELSPPQKRMRRDWDEHSSDPYHSGYEMPYAGGGGGPTYGPPQPWGHPDVHIMQHHVLPIQARLGSIAEIDLGVPPPVMKTFKEFLLSLDDSVDETEAVKRYNDYKLDFRRQQMQDFFLAHKDEEWFDNLLLDIDKADAIVKMLDAAVIKMEGGTENDLRILEQEEEEEQAGKPGEPSKKEEGRAGAGLGDGERKTNDKDEKKEDGKQAENDSSNDDKTKKSEGDGDKEEKKEDSEKEAKKSSKKRNRKHSGDDSFDEGSVSESESESESGQAEEEKEEAEALKEKEKPKEEEWEKPKDAAGLECKPRPLHKTCSLFMRNIAPNISRAEIISLCKRYPGFMRVALSEPQPERRFFRRGWVTFDRSVNIKEICWNLQNIRLRECELSPGVNRDLTRRVRNINGITQHKQIVRNDIKLAAKLIHTLDDRTQLWASEPGTPPLPTSLPSQNPILKNITDYLIEEVSAEEEELLGSSGGAPPEEPPKEGNPAEINVERDEKLIKVLDKLLLYLRIVHSLDYYNTCEYPNEDEMPNRCGIIHVRGPMPPNRISHGEVLEWQKTFEEKLTPLLSVRESLSEEEAQKMGRKDPEQEVEKFVTSNTQELGKDKWLCPLSGKKFKGPEFVRKHIFNKHAEKIEEVKKEVAFFNNFLTDAKRPALPEIKPAQPPGPAQILPPGLTPGLPYPHQTPQGLMPYGQPRPPILGYGAGAVRPAVPTGGPPYPHAPYGAGRGNYDAFRGQGGYPGKPRNRMVRGDPRAIVEYRDLDAPDDVDFF

SEQ ID NO: 5133 - protein, 459 aa, Homo sapiens
MEKTCIDALPLTMNSSEKQETVCIFGTGDFGRSLGLKMLQCGYSVVFGSRNPQKTTLLPSGAEVLSYSEAAKKSGIIIIAIHREHYDFLTELTEVLNGKILVDISNNLKINQYPESNAEYLAHLVPGAHVVKAFNTISAWALQSGALDASRQVFVCGNDSKAKQRVMDIVRNLGLTPMDQGSLMAAKEIEKYPLQLFPMWRFPFYLSAVLCVFLFFYCVIRDVIYPYVYEKKDNTFRMAISIPNRIFPITALTLLALVYLPGVIAAILQLYRGTKYRRFPDWLDHWMLCRKQLGLVALGFAFLHVLYTLVIPIRYYVRWRLGNLTVTQAILKKENPFSTSSAWLSDSYVALGILGFFLFVLLGITSLPSVSNAVNWREFRFVQSKLGYLTLILCTAHTLVYGGKRFLSPSNLRWYLPAAYVLGLIIPCTVLVIKFVLIMPCVDNTLTRIRQGWERNSKH

SEQ ID NO: 5134 - protein, 283 aa, Homo sapiens
MEKTCIDALPLTMNSSEKQETVCIFGTGDFGRSLGLKMLQCGYSVVFGSRNPQKTTLLPSGAEVLSYSEAAKKSGIIIIAIHREHYDFLTELTEVLNGKILVDISNNLKINQYPESNAEYLAHLVPGAHVVKAFNTISAWALQSGALDASRQAILKKENPFSTSSAWLSDSYVALGILGFFLFVLLGITSLPSVSNAVNWREFRFVQSKLGYLTLILCTAHTLVYGGKRFLSPSNLRWYLPAAYVLGLIIPCTVLVIKFVLIMPCVDNTLTRIRQGWERNSKH

SEQ ID NO: 5135 - protein, 654 aa, Homo sapiens
MNGHLEAEEQQDQRPDQELTGSWGHGPRSTLVRAKAMAPPPPPLAASTPLLHGEFGSYPARGPRFALTLTSQALHIQRLRPKPEARPRGGLVPLAEVSGCCTLRSRSPSDSAAYFCIYTYPRGRRGARRRATRTFRADGAATYEENRAEAQRWATALTCLLRGLPLPGDGEITPDLLPRPPRLLLLVNPFGGRGLAWQWCKNHVLPMISEAGLSFNLIQTERQNHARELVQGLSLSEWDGIVTVSGDGLLHEVLNGLLDRPDWEEAVKMPVGILPCGSGNALAGAVNQHGGFEPALGLDLLLNCSLLLCRGGGHPLDLLSVTLASGSRCFSFLSVAWGFVSDVDIQSERFRALGSARFTLGTVLGLATLHTYRGRLSYLPATVEPASPTPAHSLPRAKSELTLTPDPAPPMAHSPLHRSVSDLPLPLPQPALASPGSPEPLPILSLNGGGPELAGDWGGAGDAPLSPDPLLSSPPGSPKAALHSPVSEGAPVIPPSSGLPLPTPDARVGASTCGPPDHLLPPLGTPLPPDWVTLEGDFVLMLAISPSHLGADLVAAPHARFDDGLVHLCWVRSGISRAALLRLFLAMERGSHFSLGCPQLGYAAARAFRLEPLTPRGVLTVDGEQVEYGPLQAQMHPGIGTLLTGPPGCPGREP

SEQ ID NO: 5136 - protein, 618 aa, Homo sapiens
MAPPPPPLAASTPLLHGEFGSYPARGPRFALTLTSQALHIQRLRPKPEARPRGGLVPLAEVSGCCTLRSRSPSDSAAYFCIYTYPRGRRGARRRATRTFRADGAATYEENRAEAQRWATALTCLLRGLPLPGDGEITPDLLPRPPRLLLLVNPFGGRGLAWQWCKNHVLPMISEAGLSFNLIQTERQNHARELVQGLSLSEWDGIVTVSGDGLLHEVLNGLLDRPDWEEAVKMPVGILPCGSGNALAGAVNQHGGFEPALGLDLLLNCSLLLCRGGGHPLDLLSVTLASGSRCFSFLSVAWGFVSDVDIQSERFRALGSARFTLGTVLGLATLHTYRGRLSYLPATVEPASPTPAHSLPRAKSELTLTPDPAPPMAHSPLHRSVSDLPLPLPQPALASPGSPEPLPILSLNGGGPELAGDWGGAGDAPLSPDPLLSSPPGSPKAALHSPVSEGAPVIPPSSGLPLPTPDARVGASTCGPPDHLLPPLGTPLPPDWVTLEGDFVLMLAISPSHLGADLVAAPHARFDDGLVHLCWVRSGISRAALLRLFLAMERGSHFSLGCPQLGYAAARAFRLEPLTPRGVLTVDGEQVEYGPLQAQMHPGIGTLLTGPPGCPGREP

SEQ ID NO: 5137 - protein, 618 aa, Homo sapiens
MAPPPPPLAASTPLLHGEFGSYPARGPRFALTLTSQALHIQRLRPKPEARPRGGLVPLAEVSGCCTLRSRSPSDSAAYFCIYTYPRGRRGARRRATRTFRADGAATYEENRAEAQRWATALTCLLRGLPLPGDGEITPDLLPRPPRLLLLVNPFGGRGLAWQWCKNHVLPMISEAGLSFNLIQTERQNHARELVQGLSLSEWDGIVTVSGDGLLHEVLNGLLDRPDWEEAVKMPVGILPCGSGNALAGAVNQHGGPREDSDSSTSSSACPLWTTARSCPRAAASMPGSCPLLPQQLALGFSRFIQDRVNGGGGRIGSLTCRGHTQRTLPAPAREGGGSLFLKNINVFICKKKKKAHSLPRAKSELTLTPDPAPPMAHSPLHRSVSDLPLPLPQPALASPGSPEPLPILSLNGGGPELAGDWGGAGDAPLSPDPLLSSPPGSPKAALHSPVSEGAPVIPPSSGLPLPTPDARVGASTCGPPDHLLPPLGTPLPPDWVTLEGDFVLMLAISPSHLGADLVAAPHARFDDGLVHLCWVRSGISRAALLRLFLAMERGSHFSLGCPQLGYAAARAFRLEPLTPRGVLTVDGEQVEYGPLQAQMHPGIGTLLTGPPGCPGREP

SEQ ID NO: 5138 - protein, 595 aa, Homo sapiens
MNGHLEAEEQQDQALHIQRLRPKPEARPRGGLVPLAEVSGCCTLRSRSPSDSAAYFCIYTYPRGRRGARRRATRTFRADGAATYEENRAEAQRWATALTCLLRGLPLPGDGEITPDLLPRPPRLLLLVNPFGGRGLAWQWCKNHVLPMISEAGLSFNLIQTERQNHARELVQGLSLSEWDGIVTVSGDGLLHEVLNGLLDRPDWEEAVKMPVGILPCGSGNALAGAVNQHGGFEPALGLDLLLNCSLLLCRGGGHPLDLLSVTLASGSRCFSFLSVAWGFVSDVDIQSERFRALGSARFTLGTVLGLATLHTYRGRLSYLPATVEPASPTPAHSLPRAKSELTLTPDPAPPMAHSPLHRSVSDLPLPLPQPALASPGSPEPLPILSLNGGGPELAGDWGGAGDAPLSPDPLLSSPPGSPKAALHSPVSEGAPVIPPSSGLPLPTPDARVGASTCGPPDHLLPPLGTPLPPDWVTLEGDFVLMLAISPSHLGADLVAAPHARFDDGLVHLCWVRSGISRAALLRLFLAMERGSHFSLGCPQLGYAAARAFRLEPLTPRGVLTVDGEQVEYGPLQAQMHPGIGTLLTGPPGCPGREP

SEQ ID NO: 5139 - protein, 761 aa, Homo sapiens
MIGCLHARVSGPLWDAGLCPASSRSAHTCLSLSVSDAPVSPATAPHCLLLSTAPAPPCPCHGVLNSHPFSPPFPQRPDQELTGSWGHGPRSTLVRAKAMAPPPPPLAASTPLLHGEFGSYPARGPRFALTLTSQALHIQRLRPKPEARPRGGLVPLAEVSGCCTLRSRSPSDSAAYFCIYTYPRGRRGARRRATRTFRADGAATYEENRAEAQRWATALTCLLRGLPLPGDGEITPDLLPRPPRLLLLVNPFGGRGLAWQWCKNHVLPMISEAGLSFNLIQTERQNHARELVQGLSLSEWDGIVTVSGDGLLHEVLNGLLDRPDWEEAVKMPVGILPCGSGNALAGAVNQHGGFEPALGLDLLLNCSLLLCRGGGHPLDLLSVTLASGSRCFSFLSVAWGFVSDVDIQSERFRALGSARFTLGTVLGLATLHTYRGRLSYLPATVEPASPTPAHSLPRAKSELTLTPDPAPPMAHSPLHRSVSDLPLPLPQPALASPGSPEPLPILSLNGGGPELAGDWGGAGDAPLSPDPLLSSPPGSPKAALHSPVSEGAPVIPPSSGLPLPTPDARVGASTCGPPDHLLPPLGTPLPPDWVTLEGDFVLMLAISPSHLGADLVAAPHARFDDGLVHLCWVRSGISRAALLRLFLAMERGSHFSLGCPQLGYAAARAFRLEPLTPRGVLTVDGEQVEYGPLQAQMHPGIARGRTQTPALPAAPALYGRQPGAAHGLQPVCQGAALFFHNSWLWGSQDLFRIVLTEAVGG

SEQ ID NO: 5140 - protein, 871 aa, Homo sapiens
MEGAGPRGAGPARRRGAGGPPSPLLPSLLLLLLLWMLPDTVAPQELNPRGRNVCRAPGSQVPTCCAGWRQQGDECGIAVCEGNSTCSENEVCVRPGECRCRHGYFGANCDTKCPRQFWGPDCKELCSCHPHGQCEDVTGQCTCHARRWGARCEHACQCQHGTCHPRSGACRCEPGWWGAQCASACYCSATSRCDPQTGACLCHAGWWGRSCNNQCACNSSPCEQQSGRCQCRERTFGARCDRYCQCFRGRCHPVDGTCACEPGYRGKYCREPCPAGFYGLGCRRRCGQCKGQQPCTVAEGRCLTCEPGWNGTKCDQPCATGFYGEGCSHRCPPCRDGHACNHVTGKCTRCNAGWIGDRCETKCSNGTYGEDCAFVCADCGSGHCDFQSGRCLCSPGVHGPHCNVTCPPGLHGADCAQACSCHEDTCDPVTGACHLETNQRKGVMGAGALLVLLVCLLLSLLGCCCACRGKDPTRRPRPRRELSLGRKKAPHRLCGRFSRISMKLPRIPLRRQKLPKVVVAHHDLDNTLNCSFLEPPSGLEQPSPSWSSRASFSSFDTTDEGPVYCVPHEEAPAESRDPEVPTVPAEAPAPSPVPLTTPASAEEAIPLPASSDSERSASSVEGPGGALYARVARREARPARARGEIGGLSLSPSPERRKPPPPDPATKPKVSWIHGKHSAAAAGRAPSPPPPGSEAAPSPSKRKRTPSDKSAHTVEHGSPRTRDPTPRPPGLPEEATALAAPSPPRARARGRGPGLLEPTDAGGPPRSAPEAASMLAAELRGKTRSLGRAEVALGAQGPREKPAPPQKAKRSVPPASPARAPPATETPGPEKAATDLPAPETPRKKTPIQKPPRKKSREAAGELGRAGAPTL

SEQ ID NO: 5141 - protein, 866 aa, Homo sapiens
MEGAGPRGAGPARRRGAGGPPSPLLPSLLLLLLLWMLPDTVAPQELNPRGRNVCRAPGSQVPTCCAGWRQQGDECGIAVCEGNSTCSENEVCVRPGECRCRHGYFGANCDTKCPRQFWGPDCKELCSCHPHGQCEDVTGQCTCHARRWGARCEHACQCQHGTCHPRSGACRCEPGWWGAQCASACYCSATSRCDPQTGACLCHAGWWGRSCNNQCACNSSPCEQQSGRCQCRERTFGARCDRYCQCFRGRCHPVDGTCACEPGYRGKYCREPCPAGFYGLGCRRRCGQCKGQQPCTVAEGRCLTCEPGWNGTKCDQPCATGFYGEGCSHRCPPCRDGHACNHVTGKCTRCNAGWIGDRCETKCSNGTYGEDCAFVCADCGSGHCDFQSGRCLCSPGVHGPHCNVTCPPGLHGADCAQACSCHEDTCDPVTGACHLETNQRKGVMGAGALLVLLVCLLLSLLGCCCACRGKDPTRRELSLGRKKAPHRLCGRFSRISMKLPRIPLRRQKLPKVVVAHHDLDNTLNCSFLEPPSGLEQPSPSWSSRASFSSFDTTDEGPVYCVPHEEAPAESRDPEVPTVPAEAPAPSPVPLTTPASAEEAIPLPASSDSERSASSVEGPGGALYARVARREARPARARGEIGGLSLSPSPERRKPPPPDPATKPKVSWIHGKHSAAAAGRAPSPPPPGSEAAPSPSKRKRTPSDKSAHTVEHGSPRTRDPTPRPPGLPEEATALAAPSPPRARARGRGPGLLEPTDAGGPPRSAPEAASMLAAELRGKTRSLGRAEVALGAQGPREKPAPPQKAKRSVPPASPARAPPATETPGPEKAATDLPAPETPRKKTPIQKPPRKKSREAAGELGRAGAPTL

SEQ ID NO: 5142 - protein, 286 aa, Homo sapiens
MRLLPRLLLLLLLVFPATVLFRGGPRGLLAVAQDLTEDEETVEDSIIEDEDDEAEVEEDEPTDLVEDKEEEDVSGEPEASPSADTTILFVKGEDFPANNIVKFLVGFTNKGTEDFIVESLDASFRYPQDYQFYIQNFTALPLNTVVPPQRQATFEYSFIPAEPMGGRPFGLVINLNYKDLNGNVFQDAVFNQTVTVIEREDGLDGETIFMYMFLAGLGLLVIVGLHQLLESRKRKRPIQKVEMGTSSQNDVDMSWIPQETLNQINKASPRRLPRKRAQKRSVGSDE

SEQ ID NO: 5143 - protein, 259 aa, Homo sapiens
MRLLPRLLLLLLLVFPATVLFRGGPRGLLAVAQDLTEDEETVEDSIIEDEDDEAEVEEDEPTDLVEDFPANNIVKFLVGFTNKGTEDFIVESLDASFRYPQDYQFYIQNFTALPLNTVVPPQRQATFEYSFIPAEPMGGRPFGLVINLNYKDLNGNVFQDAVFNQTVTVIEREDGLDGETIFMYMFLAGLGLLVIVGLHQLLESRKRKRPIQKVEMGTSSQNDVDMSWIPQETLNQINKASPRRLPRKRAQKRSVGSDE

SEQ ID NO: 5144 - protein, 119 aa, Homo sapiens
MTQQGAALQNYNNELVKCIEELCQKREELCRQIQEEEDEKQRLQNEVRQLTEKLARVNENLARKIASRNEFDRTIAETEAAYLKILESSQTLLSVLKREAGNLTKATAPDQKSSGGRDS

SEQ ID NO: 5145 - protein, 123 aa, Homo sapiens
MARYEEVSVSGFEEFHRAVEQHNGKTIFAYFTGSKDAGGKSWCPDCVQAEPVVREGLKHISEGCVFIYCQVGEKPYWKDPNNDFRKNLKVTAVPTLLKYGTPQKLVESECLQANLVEMLFSED

SEQ ID NO: 5146 - protein, 72 aa, Homo sapiens
MSYQQQQCKQPCQPPPVCPTPKCPEPCPPPKCPEPCPSPKCPQPCPPQQCQQKYPPVTPSPPCQPKCPPKSK

SEQ ID NO: 5147 - protein, 855 aa, Homo sapiens
MVVMARLSRPERPDLVFEEEDLPYEEEIMRNQFSVKCWLRYIEFKQGAPKPRLNQLYERALKLLPCSYKLWYRYLKARRAQVKHRCVTDPAYEDVNNCHERAFVFMHKMPRLWLDYCQFLMDQGRVTHTRRTFDRALRALPITQHSRIWPLYLRFLRSHPLPETAVRGYRRFLKLSPESAEEYIEYLKSSDRLDEAAQRLATVVNDERFVSKAGKSNYQLWHELCDLISQNPDKVQSLNVDAIIRGGLTRFTDQLGKLWCSLADYYIRSGHFEKARDVYEEAIRTVMTVRDFTQVFDSYAQFEESMIAAKMETASELGREEEDDVDLELRLARFEQLISRRPLLLNSVLLRQNPHHVHEWHKRVALHQGRPREIINTYTEAVQTVDPFKATGKPHTLWVAFAKFYEDNGQLDDARVILEKATKVNFKQVDDLASVWCQCGELELRHENYDEALRLLRKATALPARRAEYFDGSEPVQNRVYKSLKVWSMLADLEESLGTFQSTKAVYDRILDLRIATPQIVINYAMFLEEHKYFEESFKAYERGISLFKWPNVSDIWSTYLTKFIARYGGRKLERARDLFEQALDGCPPKYAKTLYLLYAQLEEEWGLARHAMAVYERATRAVEPAQQYDMFNIYIKRAAEIYGVTHTRGIYQKAIEVLSDEHAREMCLRFADMECKLGEIDRARAIYSFCSQICDPRTTGAFWQTWKDFEVRHGNEDTIKEMLRIRRSVQATYNTQVNFMASQMLKVSGSATGTVSDLAPGQSGMDDMKLLEQRAEQLAAEAERDQPLRAQSKILFVRSDASREELAELAQQVNPEEIQLGEDEDEDEMDLEPNEVRLEQQSVPAAVFGSLKED

SEQ ID NO: 5148 - protein, 1077 aa, Homo sapiens
MTAELQQDDAAGAADGHGSSCQMLLNQLREITGIQDPSFLHEALKASNGDITQAVSLLTDERVKEPSQDTVATEPSEVEGSAANKEVLAKVIDLTHDNKDDLQAAIALSLLESPKIQADGRDLNRMHEATSAETKRSKRKRCEVWGENPNPNDWRRVDGWPVGLKNVGNTCWFSAVIQSLFQLPEFRRLVLSYSLPQNVLENCRSHTEKRNIMFMQELQYLFALMMGSNRKFVDPSAALDLLKGAFRSSEEQQQDVSEFTHKLLDWLEDAFQLAVNVNSPRNKSENPMVQLFYGTFLTEGVREGKPFCNNETFGQYPLQVNGYRNLDECLEGAMVEGDVELLPSDHSVKYGQERWFTKLPPVLTFELSRFEFNQSLGQPEKIHNKLEFPQIIYMDRYMYRSKELIRNKRECIRKLKEEIKILQQKLERYVKYGSGPARFPLPDMLKYVIEFASTKPASESCPPESDTHMTLPLSSVHCSVSDQTSKESTSTESSSQDVESTFSSPEDSLPKSKPLTSSRSSMEMPSQPAPRTVTDEEINFVKTCLQRWRSEIEQDIQDLKTCIASTTQTIEQMYCDPLLRQVPYRLHAVLVHEGQANAGHYWAYIYNQPRQSWLKYNDISVTESSWEEVERDSYGGLRNVSAYCLMYINDKLPYFNAEAAPTESDQMSEVEALSVELKHYIQEDNWRFEQEVEEWEEEQSCKIPQMESSTNSSSQDYSTSQEPSVASSHGVRCLSSEHAVIVKEQTAQAIANTARAYEKSGVEAALSEVMLSPAMQGVILAIAKARQTFDRDGSEAGLIKAFHEEYSRLYQLAKETPTSHSDPRLQHVLVYFFQNEAPKRVVERTLLEQFADKNLSYDERSISIMKVAQAKLKEIGPDDMNMEEYKKWHEDYSLFRKVSVYLLTGLELYQKGKYQEALSYLVYAYQSNAALLMKGPRRGVKESVIALYRRKCLLELNAKAASLFETNDDHSVTEGINVMNELIIPCIHLIINNDISKDDLDAIEVMRNHWCSYLGQDIAENLQLCLGEFLPRLLDPSAEIIVLKEPPTIRPNSPYDLCSRFAAVMESIQGVSTVTVK

SEQ ID NO: 5149 - protein, 1045 aa, Homo sapiens
MTAELQQDDAAGAADGHGSSCQMLLNQLREITGIQDPSFLHEALKASNGDITQAVSLLTDERVKEPSQDTVATEPSEVEGSAANKEVLAKVIDLTHDNKDDLQAAIALSLLESPKIQADGRDLNRMHEATSAETKRSKRKRCEVWGENPNPNDWRRVDGWPVGLKNVGNTCWFSAVIQSLFQLPEFRRLVLSYSLPQNVLENCRSHTEKRNIMFMQELQYLFALMMGSNRKFVDPSAALDLLKGAFRSSEEQQQDVSEFTHKLLDWLEDAFQLAVNVNSPRNKSENPMVQLFYGTFLTEGVREGKPFCNNETFGQYPLQVNGYRNLDECLEGAMVEGDVELLPSDHSVKYGQERWFTKLPPVLTFELSRFEFNQSLGQPEKIHNKLEFPQIIYMDRYMYRSKELIRNKRECIRKLKEEIKILQQKLERYVKYGSGPARFPLPDMLKYVIEFASTKPASESCPPESDTHMTLPLSSVHCSVSDQTSKESTSTESSSQDVESTFSSPEDSLPKSKPLTSSRSSMEMPSQPAPRTVTDEEINFVKTCLQRWRSEIEQDIQDLKTCIASTTQTIEQMYCDPLLRQVPYRLHAVLVHEGQANAGHYWAYIYNQPRQSWLKYNDISVTESSWEEVERDSYGGLRNVSAYCLMYINDKLPYFNAEAAPTESDQMSEVEALSVELKHYIQEDNWRFEQEVEEWEEEQSCKIPQMESSTNSSSQDYSTSQEPSVASSHGVRCLSSEHAVIVKEQTAQAIANTARAYEKSGVEAALSEAFHEEYSRLYQLAKETPTSHSDPRLQHVLVYFFQNEAPKRVVERTLLEQFADKNLSYDERSISIMKVAQAKLKEIGPDDMNMEEYKKWHEDYSLFRKVSVYLLTGLELYQKGKYQEALSYLVYAYQSNAALLMKGPRRGVKESVIALYRRKCLLELNAKAASLFETNDDHSVTEGINVMNELIIPCIHLIINNDISKDDLDAIEVMRNHWCSYLGQDIAENLQLCLGEFLPRLLDPSAEIIVLKEPPTIRPNSPYDLCSRFAAVMESIQGVSTVTVK

SEQ ID NO: 5150 - protein, 583 aa, Homo sapiens
MTAELQQDDAAGAADGHGSSCQMLLNQLREITGIQDPSFLHEALKASNGDITQAVSLLTDERVKEPSQDTVATEPSEVEGSAANKEVLAKVIDLTHDNKDDLQAAIALSLLESPKIQADGRDLNRMHEATSAETKRSKRKRCEVWGENPNPNDWRRVDGWPVGLKNVGNTCWFSAVIQSLFQLPEFRRLVLSYSLPQNVLENCRSHTEKRNIMFMQELQYLFALMMGSNRKFVDPSAALDLLKGAFRSSEEQQQDVSEFTHKLLDWLEDAFQLAVNVNSPRNKSENPMVQLFYGTFLTEGVREGKPFCNNETFGQYPLQVNGYRNLDECLEGAMVEGDVELLPSDHSVKYGQERWFTKLPPVLTFELSRFEFNQSLGQPEKIHNKLEFPQIIYMDRYMYRSKELIRNKRECIRKLKEEIKILQQKLERYVKYGSGPARFPLPDMLKYVIEFASTKPASESCPPESDTHMTLPLSSVHCSVSDQTSKESTSTESSSQDVESTFSSPEDSLPKSKPLTSSRSSMEMPSQPAPRTVTDEEINFVKTCLQRWRSEIEQDIQDLKTCIASTTQTIEQMYCDPLLRQVE

SEQ ID NO: 5151 - protein, 530 aa, Homo sapiens
MEDDSLYLRGEWQFNHFSKLTSSRPDAAFAEIQRTSLPEKSPLSCETRVDLCDDLAPVARQLAPREKLPLSSRRPAAVGAGLQNMGNTCYVNASLQCLTYTPPLANYMLSREHSQTCHRHKGCMLCTMQAHITRALHNPGHVIQPSQALAAGFHRGKQEDAHEFLMFTVDAMKKACLPGHKQVDHHSKDTTLIHQIFGGYWRSQIKCLHCHGISDTFDPYLDIALDIQAAQSVQQALEQLVKPEELNGENAYHCGVCLQRAPASKTLTLHTSAKVLILVLKRFSDVTGNKIAKNVQYPECLDMQPYMSQPNTGPLVYVLYAVLVHAGWSCHNGHYFSYVKAQEGQWYKMDDAEVTASSITSVLSQQAYVLFYIQKSEWERHSESVSRGREPRALGAEDTDRRATQGELKRDHPCLQAPELDEHLVERATQESTLDHWKFLQEQNKTKPEFNVRKVEGTLPPDVLVIHQSKYKCGMKNHHPEQQSSLLNLSSSTPTHQESMNTGTLASLRGRARRSKGKNKHSKRALLVCQ

SEQ ID NO: 5152 - protein, 236 aa, Homo sapiens
MVSSGKKYSRKSGKPSVEDQFTRAYDFETEDKKDLSGSEEDVIEGKTAVIEKRRKKRSSAGVVEDMGGEVQNMLEGVGVDINKALLAKRKRLEMYTKASLKTSNQKIEHVWKTQQDQRQKLNQEYSQQFLTLFQQWDLDMQKAEEQEEKILNMFRQQQKILQQSRIVQSQRLKTIKQLYEQFIKSMEELEKNHDNLLTGAQNEFKKEMAMLQKKIMMETQQQEIASVRKSLQSMLF

SEQ ID NO: 5153 - protein, 482 aa, Homo sapiens
MAALMTPGTGAPPAPGDFSGEGSQGLPDPSPEPKQLPELIRMKRDGGRLSEADIRGFVAAVVNGSAQGAQIGAMLMAIRLRGMDLEETSVLTQALAQSGQQLEWPEAWRQQLVDKHSTGGVGDKVSLVLAPALAACGCKVPMISGRGLGHTGGTLDKLESIPGFNVIQSPEQMQVLLDQAGCCIVGQSEQLVPADGILYAARDVTATVDSLPLITASILSKKLVEGLSALVVDVKFGGAAVFPNQEQARELAKTLVGVGASLGLRVAAALTAMDKPLGRCVGHALEVEEALLCMDGAGPPDLRDLVTTLGGALLWLSGHAGTQAQGAARVAAALDDGSALGRFERMLAAQGVDPGLARALCSGSPAERRQLLPRAREQEELLAPADGTVELVRALPLALVLHELGAGRSRAGEPLRLGVGAELLVDVGQRLRRGTPWLRVHRDGPALSGPQSRALQEALVLSDRAPFAAPSPFAELVLPPQQ

SEQ ID NO: 5154 - protein, 487 aa, Homo sapiens
MAALMTPGTGAPPAPGDFSGEGSQGLPDPSPEPKQLPELIRMKRDGGRLSEADIRGFVAAVVNGSAQGAQIGAMLMAIRLRGMDLEETSVLTQALAQSGQQLEWPEAWRQQLVDKHSTGGVGDKVSLVLAPALAACGCKVPMISGRGLGHTGGTLDKLESIPGFNVIQSPEQMQVLLDQAGCCIVGQSEQLVPADGILYAARDVTATVDSLPLITASILSKKLVEGLSALVVDVKFGGAAVFPNQEQARELAKTLVGVGASLGLRVAAALTAMDKPLGRCVGHALEVEEALLCMDGAGPPDLRDLVTTLGGALLWLSGHAGTQAQGAARVAAALDDGSALGRFERMLAAQGVDPGLARALCSGSPAERRQLLPRAREQEELLAPADAPLPAGTVELVRALPLALVLHELGAGRSRAGEPLRLGVGAELLVDVGQRLRRGTPWLRVHRDGPALSGPQSRALQEALVLSDRAPFAAPSPFAELVLPPQQ

SEQ ID NO: 5155 - protein, 280 aa, Homo sapiens
MATEAPVNIAPPECSTVVSTAVDSLIWQPNSLNMHMIRPKSAKGRTRPSLQKSQGVEVCAHHIPSPPPAIPYELPSSQKPGACAPKSPNQGASDEIPELQQQVPTGASSSLNKYPVLPSINRKNLEEEAVETVAKKASSLQLSSIRALYQDETGTMKTSEEDSRARACAVERKFIVRTKKQGSSRAGNLEEPSDQEPRLLLAVRSPTGQRFVRHFRPTDDLQTIVAVAEQKNKTSYRHCSIETMEVPRRRFSDLTKSLQECRIPHKSVLGISLEDGEGWP

SEQ ID NO: 5156 - protein, 131 aa, Homo sapiens
MGPAVLGQGQEGQPEARACSGLLQPPKRPIVFKEKLTMKTDSLMEEKLECSLWCCLSDPSIPGRCCVLERRIVPWMQQESYSSSSPIWSVDSDEPNLTSVLERLEDTKENSSVRKETKLFSLFLMNIIFRN

SEQ ID NO: 5157 - protein, 331 aa, Homo sapiens
MAEGGGPEPGEQERRSSGPRPPSARDLQLALAELYEDEVKCKSSKSNRPKATVFKSPRTPPQRFYSSEHEYSGLNIVRPSTGKIVNELFKEAREHGAVPLNEATRASGDDKSKSFTGGGYRLGSSFCKRSEYIYGENQLQDVQILLKLWSNGFSLDDGELRPYNEPTNAQFLESVKRGEIPLELQRLVHGGQVNLDMEDHQDQEYIKPRLRFKAFSGEGQKLGSLTPEIVSTPSSPEEEDKSILNAVVLIDDSVPTTKIQIRLADGSRLIQRFNSTHRILDVRNFIVQSRPEFAALDFILVTSFPNKELTDESLTLLEADILNTVLLQQLK

SEQ ID NO: 5158 - protein, 338 aa, Homo sapiens
MAASQVLGEKINILSGETVKAGDRDPLGNDCPEQDRLPQRSWRQKCASYVLALRPWSFSASLTPVALGSALAYRSHGVLDPRLLVGCAVAVLAVHGAGNLVNTYYDFSKGIDHKKSDDRTLVDRILEPQDVVRFGVFLYTLGCVCAACLYYLSPLKLEHLALIYFGGLSGSFLYTGGIGFKYVALGDLIILITFGPLAVMFAYAIQVGSLAIFPLVYAIPLALSTEAILHSNNTRDMESDREAGIVTLAILIGPTFSYILYNTLLFLPYLVFSILATHCTISLALPLLTIPMAFSLERQFRSQAFNKLPQRTAKLNLLLGLFYVFGIILAPAGSLPKI

SEQ ID NO: 5159 - protein, 179 aa, Homo sapiens
MAASQVLGEKINILSGETVKAGDRDPLGNDCPEQDRLPQRSWRQKCASYVLALRPWSFSASLTPVALGSALAYRSHGVLDPRLLVGCAVAVLAVHGAGNLVNTYYDFSKGIDHKKSDDRTLVDRILEPQDVVRFGVFLYTLGCVCAACLYYLSPLKLEHLALIYFGGLSGSFLYTGVLI

SEQ ID NO: 5160 - protein, 1179 aa, Homo sapiens
MVWCLGLAVLSLVISQGADGRGKPEVVSVVGRAGESVVLGCDLLPPAGRPPLHVIEWLRFGFLLPIFIQFGLYSPRIDPDYVGRVRLQKGASLQIEGLRVEDQGWYECRVFFLDQHIPEDDFANGSWVHLTVNSPPQFQETPPAVLEVQELEPVTLRCVARGSPLPHVTWKLRGKDLGQGQGQVQVQNGTLRIRRVERGSSGVYTCQASSTEGSATHATQLLVLGPPVIVVPPKNSTVNASQDVSLACHAEAYPANLTYSWFQDNINVFHISRLQPRVRILVDGSLRLLATQPDDAGCYTCVPSNGLLHPPSASAYLTVLYPAQVTAMPPETPLPIGMPGVIRCPVRANPPLLFVSWTKDGKALQLDKFPGWSQGTEGSLIIALGNEDALGEYSCTPYNSLGTAGPSPVTRVLLKAPPAFIERPKEEYFQEVGRELLIPCSAQGDPPPVVSWTKVGRGLQGQAQVDSNSSLILRPLTKEAHGHWECSASNAVARVATSTNVYVLGTSPHVVTNVSVVALPKGANVSWEPGFDGGYLQRFSVWYTPLAKRPDRMHHDWVSLAVPVGAAHLLVPGLQPHTQYQFSVLAQNKLGSGPFSEIVLSAPEGLPTTPAAPGLPPTEIPPPLSPPRGLVAVRTPRGVLLHWDPPELVPKRLDGYVLEGRQGSQGWEVLDPAVAGTETELLVPGLIKDVLYEFRLVAFAGSFVSDPSNTANVSTSGLEVYPSRTQLPGLLPQPVLAGVVGGVCFLGVAVLVSILAGCLLNRRRAARRRRKRLRQDPPLIFSPTGKSAAPSALGSGSPDSVAKLKLQGSPVPSLRQSLLWGDPAGTPSPHPDPPSSRGPLPLEPICRGPDGRFVMGPTVAAPQERSGREQAEPRTPAQRLARSFDCSSSSPSGAPQPLCIEDISPVAPPPAAPPSPLPGPGPLLQYLSLPFFREMNVDGDWPPLEEPSPAAPPDYMDTRRCPTSSFLRSPETPPVSPRESLPGAVVGAGATAEPPYTALADWTLRERLLPGLLPAAPRGSLTSQSSGRGSASFLRPPSTAPSAGGSYLSPAPGDTSSWASGPERWPRREHVVTVSKRRNTSVDENYEWDSEFPGDMELLETLHLGLASSRLRPEAEPELGVKTPEEGCLLNTAHVTGPEARCAALREEFLAFRRRRDATRARLPAYRQPVPHPEQATLL

SEQ ID NO: 5161 - protein, 1163 aa, Homo sapiens
MVWCLGLAVLSLVISQGADGRGKPEVVSVVGRAGESVVLGCDLLPPAGRPPLHVIEWLRFGFLLPIFIQFGLYSPRIDPDYVGRVRLQKGASLQIEGLRVEDQGWYECRVFFLDQHIPEDDFANGSWVHLTVNSPPQFQETPPAVLEVQELEPVTLRCVARGSPLPHVTWKLRGKDLGQGQGQVQVQNGTLRIRRVERGSSGVYTCQASSTEGSATHATQLLVLGPPVIVVPPKNSTVNASQDVSLACHAEAYPANLTYSWFQDNINVFHISRLQPRVRILVDGSLRLLATQPDDAGCYTCVPSNGLLHPPSASAYLTVLCMPGVIRCPVRANPPLLFVSWTKDGKALQLDKFPGWSQGTEGSLIIALGNEDALGEYSCTPYNSLGTAGPSPVTRVLLKAPPAFIERPKEEYFQEVGRELLIPCSAQGDPPPVVSWTKVGRGLQGQAQVDSNSSLILRPLTKEAHGHWECSASNAVARVATSTNVYVLGTSPHVVTNVSVVALPKGANVSWEPGFDGGYLQRFSVWYTPLAKRPDRMHHDWVSLAVPVGAAHLLVPGLQPHTQYQFSVLAQNKLGSGPFSEIVLSAPEGLPTTPAAPGLPPTEIPPPLSPPRGLVAVRTPRGVLLHWDPPELVPKRLDGYVLEGRQGSQGWEVLDPAVAGTETELLVPGLIKDVLYEFRLVAFAGSFVSDPSNTANVSTSGLEVYPSRTQLPGLLPQPVLAGVVGGVCFLGVAVLVSILAGCLLNRRRAARRRRKRLRQDPPLIFSPTGKSAAPSALGSGSPDSVAKLKLQGSPVPSLRQSLLWGDPAGTPSPHPDPPSSRGPLPLEPICRGPDGRFVMGPTVAAPQERSGREQAEPRTPAQRLARSFDCSSSSPSGAPQPLCIEDISPVAPPPAAPPSPLPGPGPLLQYLSLPFFREMNVDGDWPPLEEPSPAAPPDYMDTRRCPTSSFLRSPETPPVSPRESLPGAVVGAGATAEPPYTALADWTLRERLLPGLLPAAPRGSLTSQSSGRGSASFLRPPSTAPSAGGSYLSPAPGDTSSWASGPERWPRREHVVTVSKRRNTSVDENYEWDSEFPGDMELLETLHLGLASSRLRPEAEPELGVKTPEEGCLLNTAHVTGPEARCAALREEFLAFRRRRDATRARLPAYRQPVPHPEQATLL

SEQ ID NO: 5162 - protein, 229 aa, Homo sapiens
MPAAGPPLLLLGTPGSGKTALLFAAALEAAGEGQGPVLFLTRRPLQSMPRGTGTTLDPMRLQKIRFQYPPSTRELFRLLCSAHEAPGPAPSLLLLDGLEEYLAEDPEPQEAAYLIALLLDTAAHFSHRLGPGRDCGLMVALQTQEEAGSGDVLHLALLQRYFPAQCWLQPDAPGPGEHGLRACLEPGGLGPRTEWWVTFRSDGEMMIAPWPTQAGDPSSGKGSSSGGQP

SEQ ID NO: 5163 - protein, 235 aa, Homo sapiens
MQRRGQRDLWRHNKSCARNRCPRPPRERGGAGFPWVRAQLSVRQFTLRVRVPGPVHLRGRSPTPALDPLAPLNPLIRGPRTPGLRRWIQSLALLLPNCSSSRIPTVPRPHSGLWVQSDFPLGFLSRTEPRLTRSCRGAFRSPRPLPKSGQADGTSEESLHLDIQKLKEKRDMLDKEISQFVSEGYSVDELEDHITQLHEYNDIKDVGQMLMGKLAVIRGVTTKELYPEFGLDMND

SEQ ID NO: 5164 - protein, 274 aa, Homo sapiens
MRAAGVGLVDCHCHLSAPDFDRDLDDVLEKAKKANVVALVAVAEHSGEFEKIMQLSERYNGFVLPCLGVHPVQGLPPEDQRSVTLKDLDVALPIIENYKDRLLAIGEVGLDFSPRFAGTGEQKEEQRQVLIRQIQLAKRLNLPVNVHSRSAGRPTINLLQEQGAEKVLLHAFDGRPSVAMEGVRAGYFFSIPPSIIRSGQKQKLVKQLPLTSICLETDSPALGPEKQVRNEPWNISISAEYIAQVKGISVEEVIEVTTQNALKLFPKLRHLLQK

SEQ ID NO: 5165 - protein, 273 aa, Homo sapiens
MRAAGVGLVDCHCHLSAPDFDRDLDDVLEKAKKANVVALVAVAEHSGEFEKIMQLSERYNGFVLPCLGVHPVQGLPPEDQRSVTLKDLDVALPIIENYKDRLLAIGEVGLDFSPRFAGTGEQKEEQRQVLIRQIQLAKRLNLPVNVHSRSAGRPTINLLQEQGAEKVLLHAFDGRPSVAMEGVRAGYFFSIPPSIIRSGQQKLVKQLPLTSICLETDSPALGPEKQVRNEPWNISISAEYIAQVKGISVEEVIEVTTQNALKLFPKLRHLLQK

SEQ ID NO: 5166 - protein, 281 aa, Homo sapiens
MRAAGVGLVDCHCHLSAPDFDRDLDDVLEKAKKANVVALVAVAEHSGEFEKIMQLSERYNGFVLPCLGVHPVQGLPPEDQRSVTLKDLDVALPIIENYKDRLLAIGEVGLDFSPRFAGTGEQKEEQRQVLIRQIQLAKRLNLPVNVHSRSAGRPTINLLQEQGAEKVLLHAFDGRPSVAMEGVRAGYFFSIPPSIIRSGQLLSLFSKKQKLVKQLPLTSICLETDSPALGPEKQVRNEPWNISISAEYIAQVKGISVEEVIEVTTQNALKLFPKLRHLLQK

SEQ ID NO: 5167 - protein, 253 aa, Homo sapiens
MRAAGVGLVDCHCHLSAPDFDRDLDDVLEKAKKANVVALVAVAEHSGEFEKIMQLSERYNGFVLPCLGVHPVQGLPPEDQRSVTLKVGLDFSPRFAGTGEQKEEQRQVLIRQIQLAKRLNLPVNVHSRSAGRPTINLLQEQGAEKVLLHAFDGRPSVAMEGVRAGYFFSIPPSIIRSGQKQKLVKQLPLTSICLETDSPALGPEKQVRNEPWNISISAEYIAQVKGISVEEVIEVTTQNALKLFPKLRHLLQK

SEQ ID NO: 5168 - protein, 240 aa, Homo sapiens
MRAAGVGLVDCHCHLSAPDFDRDLDDVLEKAKKANVVALVAVAEHSGEFEKIMQLSERYNGFVLPCLGVHPVQGLPPEDQRSVTLKDLDVALPIIENYKDRLLAIGEVGLDFSPRFAGTGEQKEEQRQVLIRQIQLAKRLNLPVNVHSRSAGRPTINLLQEQGAEKVLLHAFDGRPSVAMEGVRAGYFFSIPPSIIRSGQLLSLFSKKQKLVKQLPLTSICLETDSPALGPEKQQNILPR

SEQ ID NO: 5169 - protein, 977 aa, Homo sapiens
MGAEEEVLVTLSGGAPWGFRLHGGAEQRKPLQVSKIRRRSQAGRAGLRERDQLLAINGVSCTNLSHASAMSLIDASGNQLVLTVQRLADEGPVQSPSPHELQVLSPLSPLSPEPPGAPVPQPLQPGSLRSPPDSEAYYGETDSDADGPATQEKPRRPRRRGPTRPTPPGAPPDEVYLSDSPAEPAPTIPGPPSQGDSRVSSPSWEDGAALQPPPAEALLLPHGPLRPGPHLIPMVGPVPHPVAEDLTTTYTQKAKQAKLQRAESLQEKSIKEAKTKCRTIASLLTAAPNPHSKGVLMFKKRRQRAKKYTLVSFGAAAGTGAEEEDGVPPTSESELDEEAFSDARSLTNQSDWDSPYLDMELARAGSRASEGQGSGLGGQLSEVSGRGVQLFEQQRQRADSSTQELARVEPAAMLNGEGLQSPPRAQSAPPEAAVLPPSPLPAPVASPRPFQPGGGAPTPAPSIFNRSARPFTPGLQGQRPTTTSVIFRPLAPKRANDSLGGLSPAPPPFLSSQGPTPLPSFTSGVPSHAPVSGSPSTPRSSGPVTATSSLYIPAPSRPVTPGGAPEPPAPPSAAAMTSTASIFLSAPLRPSARPEAPAPGPGAPEPPSAREQRISVPAARTGILQEARRRGTRKQMFRPGKEETKNSPNPELLSLVQNLDEKPRAGGAESGPEEDALSLGAEACNFMQPVGARSYKTLPHVTPKTPPPMAPKTPPPMTPKTPPPVAPKPPSRGLLDGLVNGAASSAGIPEPPRLQGRGGELFAKRQSRADRYVVEGTPGPGLGPRPRSPSPTPSLPPSWKYSPNIRAPPPIAYNPLLSPFFPQAARTLPKAQSQGPRATPKQGIKALDFMRHQPYQLKTAMFCFDEVPPTPGPIASGSPKTARVQEIRRFSTPAPQPTAEPLAPTVLAPRAATTLDEPIWRTELASAPVPSPAPPPEAPRGLGASPSSCGFQVARPRFSATRTGLQAHVWRPGAGHQ

SEQ ID NO: 5170 - protein, 753 aa, Homo sapiens
METFEPISQEPLSQASYDKAPDPVPELQDSFYAELQRAESLQEKSIKEAKTKCRTIASLLTAAPNPHSKGVLMFKKRRQRAKKYTLVSFGAAAGTGAEEEDGVPPTSESELDEEAFSDARSLTNQSDWDSPYLDMELARAGSRASEGQGSGLGGQLSEVSGRGVQLFEQQRQRADSSTQELARVEPAAMLNGEGLQSPPRAQSAPPEAAVLPPSPLPAPVASPRPFQPGGGAPTPAPSIFNRSARPFTPGLQGQRPTTTSVIFRPLAPKRANDSLGGLSPAPPPFLSSQGPTPLPSFTSGVPSHAPVSGSPSTPRSSGPVTATSSLYIPAPSRPVTPGGAPEPPAPPSAAAMTSTASIFLSAPLRPSARPEAPAPGPGAPEPPSAREQRISVPAARTGILQEARRRGTRKQMFRPGKEETKNSPNPELLSLVQNLDEKPRAGGAESGPEEDALSLGAEACNFMQPVGARSYKTLPHVTPKTPPPMAPKTPPPMTPKTPPPVAPKPPSRGLLDGLVNGAASSAGIPEPPRLQGRGGELFAKRQSRADRYVVEGTPGPGLGPRPRSPSPTPSLPPSWKYSPNIRAPPPIAYNPLLSPFFPQAARTLPKAQSQGPRATPKQGIKALDFMRHQPYQLKTAMFCFDEVPPTPGPIASGSPKTARVQEIRRFSTPAPQPTAEPLAPTVLAPRAATTLDEPIWRTELASAPVPSPAPPPEAPRGLGASPSSCGFQVARPRFSATRTGLQAHVWRPGAGHQ

SEQ ID NO: 5171 - protein, 425 aa, Homo sapiens
MDKNIGEQLNKAYEAFRQACMDRDSAVKELQQKTENYEQRIREQQEQLSLQQTIIDKLKSQLLLVNSTQDNNYGCVPLLEDSETRKNNLTLDQPQDKVISGIAREKLPKVRRQEVSSPRKETSARSLGSPLLHERGNIEKTFWDLKEEFHKICMLAKAQKDHLSKLNIPDTATETQCSVPIQCTDKTDKQEALFKPQAKDDINRGAPSITSVTPRGLCRDEEDTSFESLSKFNVKFPPMDNDSTFLHSTPERPGILSPATSEAVCQEKFNMEFRDNPGNFVKTEETLFEIQGIDPIASAIQNLKTTDKTKPSNLVNTCIRTTLDRAACLPPGDHNALYVNSFPLLDPSDAPFPSLDSPGKAIRGPQQPIWKPFPNQDSDSVVLSGTDSELHIPRVCEFCQAVFPPSITSRGDFLRHLNSHFNGET

SEQ ID NO: 5172 - protein, 117 aa, Homo sapiens
MDKNIGEQLNKAYEAFRQACMDRDSAVKELQQKTENYEQRIREQQEQLSLQQTIIDKLKSQLLLVNSTQDNNYGCVPLLEDSETRKNNLTLDQPQDKVISGIAREKLPKVDIASAES

SEQ ID NO: 5173 - protein, 119 aa, Homo sapiens
MDKNIGEQLNKAYEAFRQACMDRDSAVKELQQKTENYEQRIREQQEQLSLQQTIIDKLKSQLLLVNSTQDNNYGCVPLLEDSETRKNNLTLDQPQDKVISGIAREKLPKVDIASAESSI

SEQ ID NO: 5174 - protein, 309 aa, Homo sapiens
MITFLPIIFSSLVVVTFVIGNFANGFIALVNSIEWFKRQKISFADQILTALAVSRVGLLWVLLLNWYSTVLNPAFNSVEVRTTAYNIWAVINHFSNWLATTLSIFYLLKIANFSNFIFLHLKRRVKSVILVMLLGPLLFLACHLFVINMNEIVRTKEFEGNMTWKIKLKSAMYFSNMTVTMVANLVPFTLTLLSFMLLICSLCKHLKKMQLHGKGSQDPSTKVHIKALQTVISFLLLCAIYFLSIMISVWSFGSLENKPVFMFCKAIRFSYPSIHPFILIWGNKKLKQTFLSVFWQMRYWVKGEKTSSP

SEQ ID NO: 5175 - protein, 294 aa, Homo sapiens
MQPRRQRLPAPWSGPRGPRPTAPLLALLLLLAPVAAPAGSGDPDDPGQPQDAGVPRRLLQQAARAALHFFNFRSGSPSALRVLAEVQEGRAWINPKEGCKVHVVFSTERYNPESLLQEGEGRLGKCSARVFFKNQKPRPTINVTCTRLIEKKKRQQEDYLLYKQMKQLKNPLEIVSIPDNHGHIDPSLRLIWDLAFLGSSYVMWEMTTQVSHYYLAQLTSVRQWKTNDDTIDFDYTVLLHELSTQEIIPCRIHLVWYPGKPLKVKYHCQELQTPEEASGTEEGSAVVPTELSNF

SEQ ID NO: 5176 - protein, 228 aa, Homo sapiens
MQPRRQRLPAPWSGPRGPRPTAPLLALLLLLAPVAAPAGSGDPDDPGQPQDAGVPRRLLQQAARAALHFFNFRSGSPSALRVLAEVQEGRAWINPKEGCKVHVVFSTERYNPESLLQEGEGRLGKCSARVFFKNQKPRPTINVTCTRLIEKKKRQQEDYLLYKQMKQLKNPLEIVSIPDNHGHIDPSLRLIWDLAFLGSSYVMWEMTTQVSHYYLAQLTSVRQWVRKT

SEQ ID NO: 5177 - protein, 929 aa, Homo sapiens
MTKKRKRQHDFQKVKLKVGKKKPKLQNATPTNFKTKTIHLPEQLKEDGTLPTNNRKLNIKDLLSQMHHYNAGVKQSALLGLKDLLSQYPFIIDAHLSNILSEVTAVFTDKDANVRLAAVQLLQFLAPKIRAEQISPFFPLVSAHLSSAMTHITEGIQEDSLKVLDILLEQYPALITGRSSILLKNFVELISHQQLSKGLINRDRSQSWILSVNPNRRLTSQQWRLKVLVRLSKFLQALADGSSRLRESEGLQEQKENPHATSNSIFINWKEHANDQQHIQVYENGGSQPNVSSQFRLRYLVGGLSGVDEGLSSTENLKGFIEIIIPLLIECWVEAVPPQLATPVGNGIEREPLQVMQQVLNIISLLWKLSKQQDETHKLESWLRKNYLIDFKHHFMSRFPYVLKEITKHKRKEPNKSIKHCTVLSNNIDHLLLNLTLSDIMVSLANASTLQKDCSWIEMIRKFVTETLEDGSRLNSKQLNRLLGVSWRLMQIQPNREDTETLIKAVYTLYQQRGLILPVRTLLLKFFSKIYQTEELRSCRFRYRSKVLSRWLAGLPLQLAHLGSRNPELSTQLIDIIHTAAARANKELLKSLQATALRIYDPQEGAVVVLPADSQQRLVQLVYFLPSLPADLLSRLSRCCIMGRLSSSLAAMLIGILHMRSSFSGWKYSAKDWLMSDVDYFSFLFSTLTGFSKEELTWLQSLRGVPHVIQTQLSPVLLYLTDLDQFLHHWDVTEAVFHSLLVIPARSQNFDILQSAISKHLVGLTVIPDSTAGCVFGVICKLLDHTCVVSETLLPFLASCCYSLLYFLLTIEKGEAEHLRKRDKLWGVCVSILALLPRVLRLMLQSLRVNRVGPEELPVVGQLLRLLLQHAPLRTHMLTNAILVQQIIKNITTLKSGSVQEQWLTDLHYCFNVYITGHPQGPSALATVY

SEQ ID NO: 5178 - protein, 913 aa, Homo sapiens
MSRMTKKRKRQHDFQKVKLKVGKKKPKLQNATPTNFKTKTIHLPEQLKEDGTLPTNNRKLNIKDLLSQMHHYNAGVKQSALLGLKDLLSQYPFIIDAHLSNILSEVTAVFTDKDANVRLAAVQLLQFLAPKIRAEQISPFFPLVSAHLSSAMTHITEGIQEDSLKVLDILLEQYPALITGRSSILLKNFVELISHQQLSKGLINRDRSQSWILSVNPNRRLTSQQWRLKVLVRLSKFLQALADGSSRLRESEGLQEQKENPHATSNSIFINWKEHANDQQHIQVYENGGSQPNVSSQFRLRYLVGGLSGVDEGLSSTENLKGFIEIIIPLLIECWVEAVPPQLATPVGNGIEREPLQVMQQVLNIISLLWKLSKQQDETHKLESWLRKNYLIDFKHHFMSRFPYVLKEITKHKRKEPNKSIKHCTVLSNNIDHLLLNLTLSDIMVSLANASTLQKDCSWIEMIRKFVTETLEDGSRLNSKQLNRLLGVSWRLMQIQPNREDTETLIKAVYTLYQQRGLILPVRTLLLKFFSKIYQTEELRSCRFRYRSKVLSRWLAGLPLQLAHLGSRNPELSTQLIDIIHTAAARANKELLKSLQATALRIYDPQEGAVVVLPADSQQRLVQLVYFLPSLPADLLSRLSRCCIMGRLSSSLAAMLIGILHMRSSFSGWKYSAKDWLMSDVDYFSFLFSTLTGFSKEELTWLQSLRGVPHVIQTQLSPVLLYLTDLDQFLHHWDVTEAVFHSLLVIPARSQNFDILQSAISKHLVGLTVIPDSTAGCVFGVICKLLDHTCVVSETLLPFLASCCYSLLYFLLTIEKGEAEHLRKRLMLQSLRVNRVGPEELPVVGQLLRLLLQHAPLRTHMLTNAILVQQIIKNITTLKSGSVQEQWLTDLHYCFNVYITGHPQGPSALATVY

SEQ ID NO: 5179 - protein, 1497 aa, Homo sapiens
MSRAVRLPVPCPVQLGTLRNDSLEAQLHEYVKQGNYVKVKKILKKGIYVDAVNSLGQTALFVAALLGLRKFVDVLVDYGSDPNHRCFDGSTPVHAAAFSGNQWILSKLLDAGGDLRLHDERGQNPKTWALTAGKERSTQIVEFMQRCASHMQAIIQGFSYDLLKKIDSPQRLVYSPSWCGGLVQGNPNGSPNRLLKAGVISAQNIYSFGFGKAMPWFQFYLTGATQMAYLGSLPVIGEKEVIQADDEPTFSFFSGPYMVMTNLVWNGSRVTVKELNLPTHPHCSRLRLADLLIAEQEHSSKLRHPYLLQLMAVCLSQDLEKTRLVYERITIGTLFSVLHERRSQFPVLHMEVIVHLLLQISDALRYLHFQGFIHRSLSSYAVHIISPGEARLTNLEYMLESEDRGVQRDLTRVPLPTQLYNWAAPEVILQKAATVKSDIYSFSMIMQEILTDDIPWKGLDGSVVKKAVVSGNYLEADVRLPKPYYDIVKSGIHVKQKDRTMNLQDIRYILKNDLKDFTGAQRTQPTESPRVQRYGLHPDVNVYLGLTSEHPRETPDMEIIELKEMGSQPHSPRVHSLFTEGTLDPQAPDPCLMARETQNQDAPCPAPFMAEEASSPSTGQPSLCSFEINEIYSGCLILEDDIEEPPGAASSLEADGPNQVDELKSMEEELDKMEREACCFGSEDESSSKAETEYSFDDWDWQNGSLSSLSLPESTREAKSNLNNMSTTEEYLISKCVLDLKIMQTIMHENDDRLRNIEQILDEVEMKQKEQEERMSLWATSREFTNAYKLPLAVGPPSLNYIPPVLQLSGGQKPDTSGNYPTLPRFPRMLPTLCDPGKQNTDEQFQCTQGAKDSLETSRIQNTSSQGRPRESTAQAKATQFNSALFTLSSHRQGPSASPSCHWDSTRMSVEPVSSEIYNAESRNKDDGKVHLKWKMEVKEMAKKAATGQLTVPPWHPQSSLTLESEAENEPDALLQPPIRSPENTDWQRVIEYHRENDEPRGNGKFDKTGNNDCDSDQHGRQPRLGSFTSIRHPSPRQKEQPEHSEAFQASSDTLVAVEKSYSHQSMQSTCSPESSEDITDEFLTPDGEYFYSSTAQENLALETSSPIEEDFEGIQGAFAQPQVSGEEKFQMRKILGKNAEILPRSQFQPVRSTEDEQEETSKESPKELKEKDISLTDIQDLSSISYEPDSSFKEASCKTPKINHAPTSVSTPLSPGSVSSAASQYKDCLESITFQVKTEFASCWNSQEFIQTLSDDFISVRERAKKLDSLLTSSETPPSRLTGLKRLSSFIGAGSPSLVKACDSSPPHATQRRSLPKVEAFSQHHIDELPPPSQELLDDIELLKQQQGSSTVLHENTASDGGGTANDQRHLEEQETDSKKEDSSMLLSKETEDLGEDTERAHSTLDEDLERWLQPPEESVELQDLPKGSERETNIKDQKVGEEKRKREDSITPERRKSEGVLGTSEEDELKSCFWKRLGWSESSRIIVLDQSDLSD

SEQ ID NO: 5180 - protein, 1491 aa, Homo sapiens
MSRAVRLPVPCPVQLGTLRNDSLEAQLHEYVKQGNYVKVKKILKKGIYVDAVNSLGQTALFVAALLGLRKFVDVLVDYGSDPNHRCFDGSTPVHAAAFSGNQWILSKLLDAGGDLRLHDERGQNPKTWALTAGKERSTQIVEFMQRCASHMQAIIQGFSYDLLKKIDSPQRLVYSPSWCGGLVQGNPNGSPNRLLKAGVISAQNIYSFGFGKFYLTGATQMAYLGSLPVIGEKEVIQADDEPTFSFFSGPYMVMTNLVWNGSRVTVKELNLPTHPHCSRLRLADLLIAEQEHSSKLRHPYLLQLMAVCLSQDLEKTRLVYERITIGTLFSVLHERRSQFPVLHMEVIVHLLLQISDALRYLHFQGFIHRSLSSYAVHIISPGEARLTNLEYMLESEDRGVQRDLTRVPLPTQLYNWAAPEVILQKAATVKSDIYSFSMIMQEILTDDIPWKGLDGSVVKKAVVSGNYLEADVRLPKPYYDIVKSGIHVKQKDRTMNLQDIRYILKNDLKDFTGAQRTQPTESPRVQRYGLHPDVNVYLGLTSEHPRETPDMEIIELKEMGSQPHSPRVHSLFTEGTLDPQAPDPCLMARETQNQDAPCPAPFMAEEASSPSTGQPSLCSFEINEIYSGCLILEDDIEEPPGAASSLEADGPNQVDELKSMEEELDKMEREACCFGSEDESSSKAETEYSFDDWDWQNGSLSSLSLPESTREAKSNLNNMSTTEEYLISKCVLDLKIMQTIMHENDDRLRNIEQILDEVEMKQKEQEERMSLWATSREFTNAYKLPLAVGPPSLNYIPPVLQLSGGQKPDTSGNYPTLPRFPRMLPTLCDPGKQNTDEQFQCTQGAKDSLETSRIQNTSSQGRPRESTAQAKATQFNSALFTLSSHRQGPSASPSCHWDSTRMSVEPVSSEIYNAESRNKDDGKVHLKWKMEVKEMAKKAATGQLTVPPWHPQSSLTLESEAENEPDALLQPPIRSPENTDWQRVIEYHRENDEPRGNGKFDKTGNNDCDSDQHGRQPRLGSFTSIRHPSPRQKEQPEHSEAFQASSDTLVAVEKSYSHQSMQSTCSPESSEDITDEFLTPDGEYFYSSTAQENLALETSSPIEEDFEGIQGAFAQPQVSGEEKFQMRKILGKNAEILPRSQFQPVRSTEDEQEETSKESPKELKEKDISLTDIQDLSSISYEPDSSFKEASCKTPKINHAPTSVSTPLSPGSVSSAASQYKDCLESITFQVKTEFASCWNSQEFIQTLSDDFISVRERAKKLDSLLTSSETPPSRLTGLKRLSSFIGAGSPSLVKACDSSPPHATQRRSLPKVEAFSQHHIDELPPPSQELLDDIELLKQQQGSSTVLHENTASDGGGTANDQRHLEEQETDSKKEDSSMLLSKETEDLGEDTERAHSTLDEDLERWLQPPEESVELQDLPKGSERETNIKDQKVGEEKRKREDSITPERRKSEGVLGTSEEDELKSCFWKRLGWSESSRIIVLDQSDLSD

SEQ ID NO: 5181 - protein, 1451 aa, Homo sapiens
MSRAVRLPVPCPVQLGTLRNDSLEAQLHEYVKQGNYVKVKKILKKGIYVDAVNSLGQTALFVAALLGLRKFVDVLVDYGSDPNHRCFDGSTPVHAAAFSGNQWILSKLLDAGGDLRLHDERGQNPKTWALTAGKERSTQIVEFMQRCASHMQAIIQGFSYDLLKKIDSPQRLVYSPSWCGGLVQGNPNGSPNRLLKAGVISAQNIYSFGFGKFYLTGATQMAYLGSLPVIGEKEVIQADDEPTFSFFSGPYMVMTNLVWNGSRVTVKELNLPTHPHCSRLRLADLLIAEQEHSSKLRHPYLLQLMAVCLSQDLEKTRLVYERITIGTLFSVLHERRSQFPVLHMEVIVHLLLQISDALRYLHFQGFIHRSLSSYAVHIISPGEARLTNLEYMLESEDRGVQRDLTRVPLPTQLYNWAAPEVILQKAATVKSDIYSFSMIMQEILTDDIPWKGLDGSVVKKAVVSGNYLEADVRLPKPYYDIVKSGIHVKQKDRTMNLQDIRYILKNDLKDFTGAQRTQPTESPRVQRYGLHPDVNVYLGLTSEHPRETPDMEIIELKEMGSQPHSPRVHSLFTEGTLDPQAPDPCLMARETQNQDAPCPAPFMAEEASSPSTGQPSLCSFEINEIYSGCLILEDDIEEPPGAASSLEADGPNQVDELKSMEEELDKMEREACCFGSEDESSSKAETEYSFDDWDWQNGSLSSLSLPESTREAKSNLNNMSTTEEYLISKCVLDLKIMQTIMHENDDRLRNIEQILDEVEMKQKEQEERMSLWATSREFTNAYKLPLAVGPPSLNYIPPVLQLSGGQKPDTSGNYPTLPRFPRMLPTLCDPGKQNTDEQFQCTQGAKDSLETSRIQNTSSQGRPRESTAQAKATQFNSALFTLSSHRQGPSASPSCHWDSTRMSVEPVSSEIYNAESRNKDDGKVHLKWKMEVKEMAKKAATGQLTVPPWHPQSSLTLESEAENEPDALLQPPIRSPENTDWQRVIEYHRENDEPRGNGKFDKTGNNDCDSDQHGRQPRLGSFTSIRHPSPRQKEQPEHSEAFQASSDTLVAVEKSYSTSSPIEEDFEGIQGAFAQPQVSGEEKFQMRKILGKNAEILPRSQFQPVRSTEDEQEETSKESPKELKEKDISLTDIQDLSSISYEPDSSFKEASCKTPKINHAPTSVSTPLSPGSVSSAASQYKDCLESITFQVKTEFASCWNSQEFIQTLSDDFISVRERAKKLDSLLTSSETPPSRLTGLKRLSSFIGAGSPSLVKACDSSPPHATQRRSLPKVEAFSQHHIDELPPPSQELLDDIELLKQQQGSSTVLHENTASDGGGTANDQRHLEEQETDSKKEDSSMLLSKETEDLGEDTERAHSTLDEDLERWLQPPEESVELQDLPKGSERETNIKDQKVGEEKRKREDSITPERRKSEGVLGTSEEDELKSCFWKRLGWSESSRIIVLDQSDLSD

SEQ ID NO: 5182 - protein, 478 aa, Homo sapiens
MAPLRPLLILALLAWVALADQESCKGRCTEGFNVDKKCQCDELCSYYQSCCTDYTAECKPQVTRGDVFTMPEDEYTVYDDGEEKNNATVHEQVGGPSLTSDLQAQSKGNPEQTPVLKPEEEAPAPEVGASKPEGIDSRPETLHPGRPQPPAEEELCSGKPFDAFTDLKNGSLFAFRGQYCYELDEKAVRPGYPKLIRDVWGIEGPIDAAFTRINCQGKTYLFKGSQYWRFEDGVLDPDYPRNISDGFDGIPDNVDAALALPAHSYSGRERVYFFKGKQYWEYQFQHQPSQEECEGSSLSAVFEHFAMMQRDSWEDIFELLFWGRTSAGTRQPQFISRDWHGVPGQVDAAMAGRIYISGMAPRPSLAKKQRFRHRNRKGYRSQRGHSRGRNQNSRRPSRATWLSLFSSEESNLGANNYDDYRMDWLVPATCEPIQSVFFFSGDKYYRVNLRTRRVDTVDPPYPRSIAQYWLGCPAPGHL

SEQ ID NO: 5183 - protein, 233 aa, Homo sapiens
MSAKRAELKKTHLSKNYKAVCLELKPEPTKTFDYKAVKQEGRFTKAGVTQDLKNELREVREELKEKMEEIKQIKDLMDKDFDKLHEFVEIMKEMQKDMDEKMDILINTQKNYKLPLRRAPKEQQELRLMGKTHREPQLRPKKMDGASGVNGAPCALHKKTMAPQKTKQGSLDPLHHCGTCCEKCLLCALKNNYNRGNIPSEASGLYKGGEEPVTTQPSVGHAVPAPKSQTEGR

SEQ ID NO: 5184 - protein, 215 aa, Homo sapiens
MSAKRAELKKTHLVKERHCWTSKNYKAVCLELKPEPTKTFDYKAVKQEGRFTKAGVTQDLKNELREVREELKEKMEEIKQIKDLMDKDFDKLHEFVEIMKEMQKDMDEKMDILINTQKNYKLPLRRAPKEQQELRLMGKTHREPQLRPKKMDGASGVNGAPCALHKKTMAPQKTKQGSLDPLHHCGTCCEKCLLCALKNNYNRGIYAAVGLLDLW

SEQ ID NO: 5185 - protein, 201 aa, Homo sapiens
MSAKRAELKKTHLSKNYKAVCLELKPEPTKTFDYKAVKQEGRFTKAGVTQDLKNELREVREELKEKMEEIKQIKDLMDKDFDKLHEFVEIMKEMQKDMDEKMDILINTQKNYKLPLRRAPKEQQELRLMGKTHREPQLRPKKMDGASGVNGAPCALHKKTMAPQKTKQGSLDPLHHCGTCCVSETLPEPSTGARPLAPAPW

SEQ ID NO: 5186 - protein, 179 aa, Homo sapiens
MDKDFDKLHEFVEIMKEMQKDMDEKMDILINTQKNYKLPLRRAPKEQQELRLMGKTHREPQLRPKKMDGASGVNGAPCALHKKTMAPQKTKQGSLDPLHHCGTCCEKCLLCALKNNYNRAAPLKEARHLLTANSIDPSAALVLLIEFLLLTLVTGAAAPGLDACGHQRNMRDEINSERR

SEQ ID NO: 5187 - protein, 212 aa, Homo sapiens
MSAKRAELKKTHLSKNYKAVCLELKPEPTKTFDYKAVKQEGRFTKAGVTQDLKNELREVREELKEKMEEIKQIKDLMDKDFDKLHEFVEIMKEMQKDMDEKMDILINTQKNYKLPLRRAPKEQQELRLMGKTHREPQLRPKKMDGASGVNGAPCALHKKTMAPQKTKQGSLDPLHHCGTCCEKCLLCALKNNYNRAQLQNLPAVPIHHLQAP

SEQ ID NO: 5188 - protein, 873 aa, Homo sapiens
MGTSALWALWLLLALCWAPRESGATGTGRKAKCEPSQFQCTNGRCITLLWKCDGDEDCVDGSDEKNCVKKTCAESDFVCNNGQCVPSRWKCDGDPDCEDGSDESPEQCHMRTCRIHEISCGAHSTQCIPVSWRCDGENDCDSGEDEENCGNITCSPDEFTCSSGRCISRNFVCNGQDDCSDGSDELDCAPPTCGAHEFQCSTSSCIPISWVCDDDADCSDQSDESLEQCGRQPVIHTKCPASEIQCGSGECIHKKWRCDGDPDCKDGSDEVNCPSRTCRPDQFECEDGSCIHGSRQCNGIRDCVDGSDEVNCKNVNQCLGPGKFKCRSGECIDISKVCNQEQDCRDWSDEPLKECHINECLVNNGGCSHICKDLVIGYECDCAAGFELIDRKTCGDIDECQNPGICSQICINLKGGYKCECSRGYQMDLATGVCKAVGKEPSLIFTNRRDIRKIGLERKEYIQLVEQLRNTVALDADIAAQKLFWADLSQKAIFSASIDDKVGRHVKMIDNVYNPAAIAVDWVYKTIYWTDAASKTISVATLDGTKRKFLFNSDLREPASIAVDPLSGFVYWSDWGEPAKIEKAGMNGFDRRPLVTADIQWPNGITLDLIKSRLYWLDSKLHMLSSVDLNGQDRRIVLKSLEFLAHPLALTIFEDRVYWIDGENEAVYGANKFTGSELATLVNNLNDAQDIIVYHELVQPSGKNWCEEDMENGGCEYLCLPAPQINDHSPKYTCSCPSGYNVEENGRDCQSTATTVTYSETKDTNTTEISATSGLVPGGINVTTAVSEVSVPPKGTSAAWAILPLLLLVMAAVGGYLMWRNWQHKNMKSMNFDNPVYLKTTEEDLSIDIGRHSASVGHTYPAISVVSTDDDLA

SEQ ID NO: 5189 - protein, 845 aa, Homo sapiens
MGTSALWALWLLLALCWAPRESGATGTGRKAKCEPSQFQCTNGRCITLLWKCDGDEDCVDGSDEKNCVKKTCAESDFVCNNGQCVPSRWKCDGDPDCEDGSDESPEQCHMRTCRIHEISCGAHSTQCIPVSWRCDGENDCDSGEDEENCGNITCSPDEFTCSSGRCISRNFVCNGQDDCSDGSDELDCAPPTCGAHEFQCSTSSCIPISWVCDDDADCSDQSDESLEQCGRQPVIHTKCPASEIQCGSGECIHKKWRCDGDPDCKDGSDEVNCPSRTCRPDQFECEDGSCIHGSRQCNGIRDCVDGSDEVNCKNVNQCLGPGKFKCRSGECIDISKVCNQEQDCRDWSDEPLKECHINECLVNNGGCSHICKDLVIGYECDCAAGFELIDRKTCGDIDECQNPGICSQICINLKGGYKCECSRGYQMDLATGVCKAVGKEPSLIFTNRRDIRKIGLERKEYIQLVEQLRNTVALDADIAAQKLFWADLSQKAIFSASIDDKVGRHVKMIDNVYNPAAIAVDWVYKTIYWTDAASKTISVATLDGTKRKFLFNSDLREPASIAVDPLSGFVYWSDWGEPAKIEKAGMNGFDRRPLVTADIQWPNGITLDLIKSRLYWLDSKLHMLSSVDLNGQDRRIVLKSLEFLAHPLALTIFEDRVYWIDGENEAVYGANKFTGSELATLVNNLNDAQDIIVYHELVQPSGKNWCEEDMENGGCEYLCLPAPQINDHSPKYTCSCPSGYNVEENGRDCQRINVTTAVSEVSVPPKGTSAAWAILPLLLLVMAAVGGYLMWRNWQHKNMKSMNFDNPVYLKTTEEDLSIDIGRHSASVGHTYPAISVVSTDDDLA

SEQ ID NO: 5190 - protein, 215 aa, Homo sapiens
MEKLYSENEGMASNQGKMENEEQPQDERKPEVTCTLEDKKLENEGKTENKGKTGDEEMLKDKGKPESEGEAKEGKSEREGESEMEGGSEREGKPEIEGKPESEGEPGSETRAAGKRPAEDDVPRKAKRKTNKGLAHYLKEYKEAIHDMNFSNEDMIREFDNMAKVQDEKRKSKQKLGAFLWMQRNLQDPFYPRGPREFRGGCRAPRRDIEDIPYV

SEQ ID NO: 5191 - protein, 358 aa, Homo sapiens
MPAGGQAPQLTPVIPAFWEARGLPNSKGRDKVHICQCEEWKGHISYVERDITTSEIKSLPQVSVRAFHAASGTLEWRKGNGYGRGKGWGWGRVESREAGPSVDRDGGLRVCCSQRSAKPEKEEQPVQNPRRSVKDRKRRGNLDMEKLYSENEGMASNQGKMENEEQPQDERKPEVTCTLEDKKLENEGKTENKGKTGDEEMLKDKGKPESEGEAKEGKSEREGESEMEGGSEREGKPEIEGKPESEGEPGSETRAAGKRPAEDDVPRKAKRKTNKGLAHYLKEYKEAIHDMNFSNEDMIREFDNMAKVQDEKRKSKQKLGAFLWMQRNLQDPFYPRGPREFRGGCRAPRRDIEDIPYV

SEQ ID NO: 5192 - protein, 712 aa, Homo sapiens
MACTGPSLPSAFDILGAAGQDKLLYLKHKLKTPRPGCQGQDLLHAMVLLKLGQETEARISLEALKADAVARLVARQWAGVDSTEDPEEPPDVSWAVARLYHLLAEEKLCPASLRDVAYQEAVRTLSSRDDHRLGELQDEARNRCGWDIAGDPGSIRTLQSNLGCLPPSSALPSGTRSLPRPIDGVSDWSQGCSLRSTGSPASLASNLEISQSPTMPFLSLHRSPHGPSKLCDDPQASLVPEPVPGGCQEPEEMSWPPSGEIASPPELPSSPPPGLPEVAPDATSTGLPDTPAAPETSTNYPVECTEGSAGPQSLPLPILEPVKNPCSVKDQTPLQLSVEDTTSPNTKPCPPTPTTPETSPPPPPPPPSSTPCSAHLTPSSLFPSSLESSSEQKFYNFVILHARADEHIALRVREKLEALGVPDGATFCEDFQVPGRGELSCLQDAIDHSAFIILLLTSNFDCRLSLHQVNQAMMSNLTRQGSPDCVIPFLPLESSPAQLSSDTASLLSGLVRLDEHSQIFARKVANTFKPHRLQARKAMWRKEQDTRALREQSQHLDGERMQAAALNAAYSAYLQSYLSYQAQMEQLQVAFGSHMSFGTGAPYGARMPFGGQVPLGAPPPFPTWPGCPQPPPLHAWQAGTPPPPSPQPAAFPQSLPFPQSPAFPTASPAPPQSPGLQPLIIHHAQMVQLGLNNHMWNQRGSQAPEDKTQEAE

SEQ ID NO: 5193 - protein, 1953 aa, Homo sapiens
MGVKKKKEMQVAALTICHQDLETLKSFADVEGKNLASLLLHCVQLTDGVSQIHYIKQIVPLLEKADKNGMCDPTIQSCLDILAGIYLSLSLKNPLKKVLASSLNSLPDFFLPEAMHRFTSRLQEELNTTDLYSYRKVTDNISSCMENFNLGRASVNNLLKNVLHFLQKSLIEILEENRKCAGNHIIQTQLMNDLLVGIRVSMMLVQKVQDFQGNLWKTSDSPIWQNMCGLLSIFTKVLSDDDLLQTVQSTSGLAIILFIKTMFHPSEKIPHLISSVLLRSVDCTSVPEWFMSSCRSLCCGDISQSAVLFLCQGTLAMLDWQNGSMGRSGEALLLDTAHVLFTLSSQIKEPTLEMFLSRILASWTNSAIQVLESSSPSLTDSLNGNSSIVGRLLEYVYTHWEHPLDALRHQTKIMFKNLLQMHRLTVEGADFVPDPFFVELTESLLRLEWHIKGKYTCLGCLVECIGVEHILAIDKTIPSQILEVMGDQSLVPYASDLLETMFRNHKSHLKSQTAESSWIDQWHETWVSPLLFILCEGNLDQKSYVIDYYLPKLLSYSPESLQYMVKILQTSIDAKTGQEQSFPSLGSCNSRGALGALMACLRIARAHGHLQSATDTWENLVSDARIKQGLIHQHCQVRIDTLGLLCESNRSTEIVSMEEMQWIQFFITYNLNSQSPGVRQQICSLLKKLFCRIQESSQVLYKLEQSKSKREPENELTKQHPSVSLQQYKNFMSSICNSLFEALFPGSSYSTRFSALTILGSIAEVFHVPEGRIYTVYQLSHDIDVGRFQTLMECFTSTFEDVKILAFDLLMKLSKTAVHFQDSGKLQGLFQAALELSTSTKPYDCVTASYLLNFLIWQDALPSSLSAYLTQQVACDNGDRPAAVVERNTLMVIKCLMENLEEEVSQAENSLLQAAAAFPMYGRVHCITGALQKLSLNSLQLVSEWRPVVEKLLLMSYRLSTVVSPVIQSSSPEGLIPMDTDSESASRLQMILNEIQPRDTNDYFNQAKILKEHDSFDMKDLNASVVNIDTSTEIKGKEVKTCDVTAQMVLVCCWRSMKEVALLLGMLCQLLPMQPVPESSDGLLTVEQVKEIGDYFKQHLLQSRHRGAFELAYTGFVKLTEVLNRCPNVSLQKLPEQWLWSVLEEIKCSDPSSKLCATRRSAGIPFYIQALLASEPKKGRMDLLKITMKELISLAGPTDDIQSTVPQVHALNILRALFRDTRLGENIIPYVADGAKAAILGFTSPVWAVRNSSTLLFSALITRIFGVKRAKDEHSKTNRMTGREFFSRFPELYPFLLKQLETVANTVDSDMGEPNRHPSMFLLLLVLERLYASPMDGTSSALSMGPFVPFIMRCGHSPVYHSREMAARALVPFVMIDHIPNTIRTLLSTLPSCTDQCFRQNHIHGTLLQVFHLLQAYSDSKHGTNSDFQHELTDITVCTKAKLWLAKRQNPCLVTRAVYIDILFLLTCCLNRSAKDNQPVLESLGFWEEVRGIISGSELITGFPWAFKVPGLPQYLQSLTRLAIAAVWAAAAKSGERETNVPISFSQLLESAFPEVRSLTLEALLEKFLAAASGLGEKGVPPLLCNMGEKFLLLAMKENHPECFCKILKILHCMDPGEWLPQTEHCVHLTPKEFLIWTMDIASNERSEIQSVALRLASKVISHHMQTCVENRELIAAELKQWVQLVILSCEDHLPTESRLAVVEVLTSTTPLFLTNPHPILELQDTLALWKCVLTLLQSEEQAVRDAATETVTTAMSQENTCQSTEFAFCQVDASIALALALAVLCDLLQQWDQLAPGLPILLGWLLGESDDLVACVESMHQVEEDYLFEKAEVNFWAETLIFVKYLCKHLFCLLSKSGWRPPSPEMLCHLQRMVSEQCHLLSQFFRELPPAAEFVKTVEFTRLRIQEERTLACLRLLAFLEGKEGEDTLVLSVWDSYAESRQLTLPRTEAAC

SEQ ID NO: 5194 - protein, 1632 aa, Homo sapiens
MSSCRSLCCGDISQSAVLFLCQGTLAMLDWQNGSMGRSGEALLLDTAHVLFTLSSQIKEPTLEMFLSRILASWTNSAIQVLESSSPSLTDSLNGNSSIVGRLLEYVYTHWEHPLDALRHQTKIMFKNLLQMHRLTVEGADFVPDPFFVELTESLLRLEWHIKGKYTCLGCLVECIGVEHILAIDKTIPSQILEVMGDQSLVPYASDLLETMFRNHKSHLKSQTAESSWIDQWHETWVSPLLFILCEGNLDQKSYVIDYYLPKLLSYSPESLQYMVKILQTSIDAKTGQEQSFPSLGSCNSRGALGALMACLRIARAHGHLQSATDTWENLVSDARIKQGLIHQHCQVRIDTLGLLCESNRSTEIVSMEEMQWIQFFITYNLNSQSPGVRQQICSLLKKLFCRIQESSQVLYKLEQSKSKREPENELTKQHPSVSLQQYKNFMSSICNSLFEALFPGSSYSTRFSALTILGSIAEVFHVPEGRIYTVYQLSHDIDVGRFQTLMECFTSTFEDVKILAFDLLMKLSKTAVHFQDSGKLQGLFQAALELSTSTKPYDCVTASYLLNFLIWQDALPSSLSAYLTQQVACDNGDRPAAVVERNTLMVIKCLMENLEEEVSQAENSLLQAAAAFPMYGRVHCITGALQKLSLNSLQLVSEWRPVVEKLLLMSYRLSTVVSPVIQSSSPEGLIPMDTDSESASRLQMILNEIQPRDTNDYFNQAKILKEHDSFDMKDLNASVVNIDTSTEIKGKEVKTCDVTAQMVLVCCWRSMKEVALLLGMLCQLLPMQPVPESSDGLLTVEQVKEIGDYFKQHLLQSRHRGAFELAYTGFVKLTEVLNRCPNVSLQKLPEQWLWSVLEEIKCSDPSSKLCATRRSAGIPFYIQALLASEPKKGRMDLLKITMKELISLAGPTDDIQSTVPQVHALNILRALFRDTRLGENIIPYVADGAKAAILGFTSPVWAMTGREFFSRFPELYPFLLKQLETVANTVDSDMGEPNRHPSMFLLLLVLERLYASPMDGTSSALSMGPFVPFIMRCGHSPVYHSREMAARALVPFVMIDHIPNTIRTLLSTLPSCTDQCFRQNHIHGTLLQVFHLLQAYSDSKHGTNSDFQHELTDITVCTKAKLWLAKRQNPCLVTRAVYIDILFLLTCCLNRSAKDNQPVLESLGFWEEVRGIISGSELITGFPWAFKVPGLPQYLQSLTRLAIAAVWAAAAKSGERETNVPISFSQLLESAFPEVRSLTLEALLEKFLAAASGLGEKGVPPLLCNMGEKFLLLAMKENHPECFCKILKILHCMDPGEWLPQTEHCVHLTPKEFLIWTMDIASNERSEIQSVALRLASKVISHHMQTCVENRELIAAELKQWVQLVILSCEDHLPTESRLAVVEVLTSTTPLFLTNPHPILELQDTLALWKCVLTLLQSEEQAVRDAATETVTTAMSQENTCQSTEFAFCQVDASIALALALAVLCDLLQQWDQLAPGLPILLGWLLGESDDLVACVESMHQVEEDYLFEKAEVNFWAETLIFVKYLCKHLFCLLSKSGWRPPSPEMLCHLQRMVSEQCHLLSQFFRELPPAAEFVKTVEFTRLRIQEERTLACLRLLAFLEGKEGEDTLVLSVWDSYAESRQLTLPRTEAAC

SEQ ID NO: 5195 - protein, 1879 aa, Homo sapiens
MGVKKKKEMQVAALTICHQDLETLKSFADVEGKNLASLLLHCVQLTDGVSQIHYIKQIVPLLEKADKNGMCDPTIQSCLDILAGIYLSLSLKNPLKKVLASSLNSLPDFFLPEAMHRFTSRLQEELNTTDLYSYRKVTDNISSCMENFNLGRASVNNLLKNVLHFLQKSLIEILEENRKCAGNHIIQTQLMNDLLVGIRVSMMLVQKVQDFQGNLWKTSDSPIWQNMCGLLSIFTKVLSDDDLLQTVQSTSGLAIILFIKTMFHPSEKIPHLISSVLLRSVDCTSVPEWFMSSCRSLCCGDISQSAVLFLCQGTLAMLDWQNGSMGRSGEALLLDTAHVLFTLSSQIKEPTLEMFLSRILASWTNSAIQVLESSSPSLTDSLNGNSSIVGRLLEYVYTHWEHPLDALRHQTKIMFKNLLQMHRLTVEGADFVPDPFFVELTESLLRLEWHIKGKYTCLGCLVECIGVEHILAIDKTIPSQILEVMGDQSLVPYASDLLETMFRNHKSHLKSQTAESSWIDQWHETWVSPLLFILCEGNLDQKSYVIDYYLPKLLSYSPESLQYMVKILQTSIDAKTGQEQSFPSLGSCNSRGALGALMACLRIARAHGHLQSATDTWENLVSDARIKQGLIHQHCQVRIDTLGLLCESNRSTEIVSMEEMQWIQFFITYNLNSQSPGVRQQICSLLKKLFCRIQESSQVLYKLEQSKSKREPENELTKQHPSVSLQQYKNFMSSICNSLFEALFPGSSYSTRFSALTILGSIAEVFHVPEGRIYTVYQLSHDIDVGRFQTLMECFTSTFEDVKILAFDLLMKLSKTAVHFQDSGKLQGLFQAALELSTSTKPYDCVTASYLLNFLIWQDALPSSLSAYLTQQVACDNGDRPAAVVERNTLMVIKCLMENLEEEVSQAENSLLQAAAAFPMYGRVHCITGALQKLSLNSLQLVSEWRPVVEKLLLMSYRLSTVVSPVIQSSSPEGLIPMDTDSESASRLQMILNEIQPRDTNDYFNQAKILKEHDSFDMKDLNASVVNIDTSTEIKGKEVKTCDVTAQMVLVCCWRSMKEVALLLGMLCQLLPMQPVPESSDGLLTVEQVKEIGDYFKQHLLQSRHRGAFELAYTGFVKLTEVLNRCPNVSLQKLPEQWLWSVLEEIKCSDPSSKLCATRRSAGIPFYIQALLASEPKKGRMDLLKITMKELISLAGPTDDIQSTVPQVHALNILRALFRDTRLGENIIPYVADGAKAAILGFTSPVWAVRNSSTLLFSALITRIFGVKRAKDEHSKTNRCGHSPVYHSREMAARALVPFVMIDHIPNTIRTLLSTLPSCTDQCFRQNHIHGTLLQVFHLLQAYSDSKHGTNSDFQHELTDITVCTKAKLWLAKRQNPCLVTRAVYIDILFLLTCCLNRSAKDNQPVLESLGFWEEVRGIISGSELITGFPWAFKVPGLPQYLQSLTRLAIAAVWAAAAKSGERETNVPISFSQLLESAFPEVRSLTLEALLEKFLAAASGLGEKGVPPLLCNMGEKFLLLAMKENHPECFCKILKILHCMDPGEWLPQTEHCVHLTPKEFLIWTMDIASNERSEIQSVALRLASKVISHHMQTCVENRELIAAELKQWVQLVILSCEDHLPTESRLAVVEVLTSTTPLFLTNPHPILELQDTLALWKCVLTLLQSEEQAVRDAATETVTTAMSQENTCQSTEFAFCQVDASIALALALAVLCDLLQQWDQLAPGLPILLGWLLGESDDLVACVESMHQVEEDYLFEKAEVNFWAETLIFVKYLCKHLFCLLSKSGWRPPSPEMLCHLQRMVSEQCHLLSQFFRELPPAAEFVKTVEFTRLRIQEERTLACLRLLAFLEGKEGEDTLVLSVWDSYAESRQLTLPRTEAAC

SEQ ID NO: 5196 - protein, 674 aa, Homo sapiens
MTGREFFSRFPELYPFLLKQLETVANTVDSDMGEPNRHPSMFLLLLVLERLYASPMDGTSSALSMGPFVPFIMRCGHSPVYHSREMAARALVPFVMIDHIPNTIRTLLSTLPSCTDQCFRQNHIHGTLLQVFHLLQAYSDSKHGTNSDFQHELTDITVCTKAKLWLAKRQNPCLVTRAVYIDILFLLTCCLNRSAKDNQPVLESLGFWEEVRGIISGSELITGFPWAFKVPGLPQYLQSLTRLAIAAVWAAAAKSGERETNVPISFSQLLESAFPEVRSLTLEALLEKFLAAASGLGEKGVPPLLCNMGEKFLLLAMKENHPECFCKILKILHCMDPGEWLPQTEHCVHLTPKEFLIWTMDIASNERSEIQSVALRLASKVISHHMQTCVENRELIAAELKQWVQLVILSCEDHLPTESRLAVVEVLTSTTPLFLTNPHPILELQDTLALWKCVLTLLQSEEQAVRDAATETVTTAMSQENTCQSTEFAFCQVDASIALALALAVLCDLLQQWDQLAPGLPILLGWLLGESDDLVACVESMHQVEEDYLFEKAEVNFWAETLIFVKYLCKHLFCLLSKSGWRPPSPEMLCHLQRMVSEQCHLLSQFFRELPPAAEFVKTVEFTRLRIQEERTLACLRLLAFLEGKEGEDTLVLSVWDSYAESRQLTLPRTEAAC

SEQ ID NO: 5197 - protein, 937 aa, Homo sapiens
MGVKKKKEMQVAALTICHQDLETLKSFADVEGKNLASLLLHCVQLTDGVSQIHYIKQIVPLLEKADKNGMCDPTIQSCLDILAGIYLSLSLKNPLKKVLASSLNSLPDFFLPEAMHRFTSRLQEELNTTDLYSYRKVTDNISSCMENFNLGRASVNNLLKNVLHFLQKSLIEILEENRKCAGNHIIQTQLMNDLLVGIRVSMMLVQKVQDFQGNLWKTSDSPIWQNMCGLLSIFTKVLSDDDLLQTVQSTSGLAIILFIKTMFHPSEKIPHLISSVLLRSVDCTSVPEWFMSSCRSLCCGDISQSAVLFLCQGTLAMLDWQNGSMGRSGEALLLDTAHVLFTLSSQIKEPTLEMFLSRILASWTNSAIQVLESSSPSLTDSLNGNSSIVGRLLEYVYTHWEHPLDALRHQTKIMFKNLLQMHRLTVEGADFVPDPFFVELTESLLRLEWHIKGKYTCLGCLVECIGVEHILAIDKTIPSQILEVMGDQSLVPYASDLLETMFRNHKSHLKSQTAESSWIDQWHETWVSPLLFILCEGNLDQKSYVIDYYLPKLLSYSPESLQYMVKILQTSIDAKTGQEQSFPSLGSCNSRGALGALMACLRIARAHGHLQSATDTWENLVSDARIKQGLIHQHCQVRIDTLGLLCESNRSTEIVSMEEMQWIQFFITYNLNSQSPGVRQQICSLLKKLFCRIQESSQVLYKLEQSKSKREPENELTKQHPSVSLQQYKNFMSSICNSLFEALFPGSSYSTRFSALTILGSIAEVFHVPEGRIYTVYQLSHDIDVGRFQTLMECFTSTFEDVKILAFDLLMKLSKTAVHFQDSGKLQGLFQAALELSTSTKPYDCVTASYLLNFLIWQDALPSSLSAYLTQQVACDNGDRPAAVVERNTLMVIKCLMENLEEEVSQAENSLLQAAAAFPMYGRVHCITGALQKLSLK

SEQ ID NO: 5198 - protein, 894 aa, Homo sapiens
MGVKKKKEMQVAALTICHQDLETLKSFADVEGKNLASLLLHCVQLTDGVSQIHYIKQIVPLLEKADKNGMCDPTIQSCLDILAGIYLSLSLKNPLKKVLASSLNSLPDFFLPEAMHRFTSRLQEELNTTDLYSYRKVTDNISSCMENFNLGRASVNNLLKNVLHFLQKSLIEILEENRKCAGNHIIQTQLMNDLLVGIRVSMMLVQKVQDFQGNLWKTSDSPIWQNMCGLLSIFTKVLSDDDLLQTVQSTSGLAIILFIKTMFHPSEKIPHLISSVLLRSVDCTSVPEWFMSSCRSLCCGDISQSAVLFLCQGTLAMLDWQNGSMGRSGEALLLDTAHVLFTLSSQIKEPTLEMFLSRILASWTNSAIQVLESSSPSLTDSLNGNSSIVGRLLEYVYTHWEHPLDALRHQTKIMFKNLLQMHRLTVEGADFVPDPFFVELTESLLRLEWHIKGKYTCLGCLVECIGVEHILAIDKTIPSQILEVMGDQSLVPYASDLLETMFRNHKSHLKSQTAESSWIDQWHETWVSPLLFILCEGNLDQKSYVIDYYLPKLLSYSPESLQYMVKILQTSIDAKTGQEQSFPSLGSCNSRGALGALMACLRIARAHGHLQSATDTWENLVSDARIKQGLIHQHCQVRIDTLGLLCESNRSTEIVSMEEMQWIQFFITYNLNSQSPGVRQQICSLLKKLFCRIQESSQVLYKLEQSKSKREPENELTKQHPSVSLQQYKNFMSSICNSLFEALFPGSSYSTRFSALTILGSIAEVFHVPEGRIYTVYQLSHDIDVGRFQTLMECFTSTFEDVKILAFDLLMKLSKTAVHFQDSGKLQGLFQAALELSTSTKPYDCVTASYLLNFLIWQDALPSSLSAYLTQQVACDNGDRPAAVVERNTLMGLY

SEQ ID NO: 5199 - protein, 117 aa, Homo sapiens
MQKSCEENEGKPQNMPKAEEDRPLEDVPQEAEGNPQPSEEGVSQEAEGNPRGGPNQPGQGFKEDTPVRHLDPEEMIRGVDELERLREEIRRVRNKFVMMHWKQRHSRSRPYPVCFRP

SEQ ID NO: 5200 - protein, 200 aa, Homo sapiens
MEKPYNKNEGNLENEGKPEDEVEPDDEGKSDEEEKPDAEGKTECEGKRKAEGEPGDEGQLEDKGSQEKQGKSEGEGKPQGEGKPASQAKPEGQPRAAEKRPAGDYVPRKAKRKTDRGTDDSPKDSQEDLQERHLSSEEMMRECGDVSRAQEELRKKQKMGGFHWMQRDVQDPFAPRGQRGVRGVRGGGRGQRGLHDIPYL

SEQ ID NO: 5201 - protein, 183 aa, Homo sapiens
MEKPYNKNEGNLENEGKPEDEVEPDDEGKSDEEEKPDAEGKTECEGKRKAEGEPGDEGQLEDKGSQEKQGKSEGEGKPQGEGKPASQAKPEGQPRAAEKRPAGDYVPRKAKRKTDRGTDDSPKDSQEDLQERHLSSEEMMRECGDVSRAQEELRKKQKMGGFHWMQRDVQDPFAQGDNGVSGE

SEQ ID NO: 5202 - protein, 549 aa, Homo sapiens
MNKRGKYTTLNLEEKMKVLSRIEAGRSLKSVMDEFGISKSTFYDIKKNKKLILDFVLKQDMPLVGAEKRKRTTGAKYGDVDDAVYMWYQQKRSAGVPVRGVELQAAAERFARCFGRTDFKASTGWLFRFRNRHAIGNRKGCGEQVLSSVSENVEPFRQKLSMIIKEEKLCLAQLYSGDETDLFWKSMPENSQASRKDICLPGKKINKERLSAFLCANADGTHKLKSIIIGKSKLPKSVKEDTSTLPVIYKPSKDVWFTRELFSEWFFQNFVPEVRHFQLNVLRFHDEDVRALLLLDSCPAHPSSESLTSEDGRIKCMFFPHNTSTLIQPMNQGVILSCKRLYRWKQLEESLVIFEESDDEQEKGDKGVSKIKIYNIKSAIFNWAKSWEEVKQITIANAWENLLYKKEPEYDFQGLEHGDYREILEKCGELETKLDDDRVWLNGDEEKGCLLKTKGGITKEVVQKGGEAEKQTAEFKLSAVRESLDYLLDFVDATPEFQRFHFTLKEMQQEIVKKQFQSKIHSRIGSFLKPRPHNIKDSFSGPSTSGSNH

SEQ ID NO: 5203 - protein, 511 aa, Homo sapiens
MNKRGKYTTLNLEEKMKVLSRIEAGRSLKSVMDEFGISKSTFYDIKKNKKLILDFVLKQDMPLVGAEKRKRTTGAKYGDVDDAVYMWYQQKRSAGVPVRGVELQAAAERFARCFGRTDFKASTGWLFRFRNRHAIGNRKGCGEQVLSSVSENVEPFRQKLSMIIKEEKLCLAQLYSGDETDLFWKSMPENSQASRKDICLPGKKINKERLSAFLCANADGTHKLKSIIIGKSKLPKSVKEDTSTLPVIYKPSKDVWFTRELFSEWFFQNFVPEVRHFQLNVLRFHDEDVRALLLLDSCPAHPSSESLTSEDGRIKCMFFPHNTSTLIQPMNQGVILSCKRLYRWKQLEESLVIFEESDDEQEKGDKGVSKIKIYNIKSAIFNWAKSWEEVKQITIANAWENLLYKKEPEYDFQGLEHGDYREILEKCGELETKLDDDRVWLNGDEEKGCLLKTKGGITKEVVQKGGEAEKQTAEFKLSAVRESLDYLLDFVDATPEFQRFHFTLCEFSDDS

SEQ ID NO: 5204 - protein, 549 aa, Homo sapiens
MDVVEVAGSWWAQEREDIIMKYEKGHRAGLPEDKGPKPFRSYNNNVDHLGIVHETELPPLTAREAKQIRREISRKSKWVDMLGDWEKYKSSRKLIDRAYKGMPMNIRGPMWSVLLNTEEMKLKNPGRYQIMKEKGKRSSEHIQRIDRDVSGTLRKHIFFRDRYGTKQRELLHILLAYEEYNPEVGYCRDLSHIAALFLLYLPEEDAFWALVQLLASERHSLQGFHSPNGGTVQGLQDQQEHVVATSQPKTMGHQDKKDLCGQCSPLGCLIRILIDGISLGLTLRLWDVYLVEGEQALMPITRIAFKVQQKRLTKTSRCGPWARFCNRFVDTWARDEDTVLKHLRASMKKLTRKQGDLQPPAKPEQGSSASRPVPASRGGKTLCKGDRQAPPGPPARFPRPIWSASPPRAPRSSTPCPGGAVREDTYPVGTQGVPSPALAQGGPQGSWRFLQWNSMPRLPTDLDVEGPWFRHYDFRQSCWVRAISQEDQLAPCWQAEHPAERVRSAFAAPSTDSDQGTPFRARDEQPCAPTSGPCLCGLHLESSQFPPGF

SEQ ID NO: 5205 - protein, 451 aa, Homo sapiens
MRECISIHVGQAGVQIGNACWELYCLEHGIQPDGQMPSDKTIGGGDDSFNTFFSETGAGKHVPRAVFVDLEPTVIDEVRTGTYRQLFHPEQLITGKEDAANNYARGHYTIGKEIIDLVLDRIRKLADQCTGLQGFLVFHSFGGGTGSGFTSLLMERLSVDYGKKSKLEFSIYPAPQVSTAVVEPYNSILTTHTTLEHSDCAFMVDNEAIYDICRRNLDIERPTYTNLNRLIGQIVSSITASLRFDGALNVDLTEFQTNLVPYPRIHFPLATYAPVISAEKAYHEQLSVAEITNACFEPANQMVKCDPRHGKYMACCLLYRGDVVPKDVNAAIATIKTKRTIQFVDWCPTGFKVGINYQPPTVVPGGDLAKVQRAVCMLSNTTAIAEAWARLDHKFDLMYAKRAFVHWYVGEGMEEGEFSEAREDMAALEKDYEEVGVDSVEGEGEEEGEEY

SEQ ID NO: 5206 - protein, 416 aa, Homo sapiens
MPSDKTIGGGDDSFNTFFSETGAGKHVPRAVFVDLEPTVIDEVRTGTYRQLFHPEQLITGKEDAANNYARGHYTIGKEIIDLVLDRIRKLADQCTGLQGFLVFHSFGGGTGSGFTSLLMERLSVDYGKKSKLEFSIYPAPQVSTAVVEPYNSILTTHTTLEHSDCAFMVDNEAIYDICRRNLDIERPTYTNLNRLIGQIVSSITASLRFDGALNVDLTEFQTNLVPYPRIHFPLATYAPVISAEKAYHEQLSVAEITNACFEPANQMVKCDPRHGKYMACCLLYRGDVVPKDVNAAIATIKTKRTIQFVDWCPTGFKVGINYQPPTVVPGGDLAKVQRAVCMLSNTTAIAEAWARLDHKFDLMYAKRAFVHWYVGEGMEEGEFSEAREDMAALEKDYEEVGVDSVEGEGEEEGEEY

SEQ ID NO: 5207 - protein, 963 aa, Homo sapiens
MPGAGARAEEGGGGGEGAAQGAAAEPGAGPAREPARLCGYLQKLSGKGPLRGYRSRWFVFDARRCYLYYFKSPQDALPLGHLDIADACFSYQGPDEAAEPGTEPPAHFQVHSAGAVTVLKAPNRQLMTYWLQELQQKRWEYCNSLDMVKWDSRTSPTPGDFPKGLVARDNTDLIYPHPNASAEKARNVLAVETVPGELVGEQAANQPAPGHPNSINFYSLKQWGNELKNSMSSFRPGRGHNDSRRTVFYTNEEWELLDPTPKDLEESIVQEEKKKLTPEGNKGVTGSGFPFDFGRNPYKGKRPLKDIIGSYKNRHSSGDPSSEGTSGSGSVSIRKPASEMQLQVQSQQEELEQLKKDLSSQKELVRLLQQTVRSSQYDKYFTSSRLCEGVPKDTLELLHQKDDQILGLTSQLERFSLEKESLQQEVRTLKSKVGELNEQLGMLMETIQAKDEVIIKLSEGEGNGPPPTVAPSSPSVVPVARDQLELDRLKDNLQGYKTQNKFLNKEILELSALRRNAERRERDLMAKYSSLEAKLCQIESKYLILLQEMKTPVCSEDQGPTREVIAQLLEDALQVESQEQPEQAFVKPHLVSEYDIYGFRTVPEDDEEEKLVAKVRALDLKTLYLTENQEVSTGVKWENYFASTVNREMMCSPELKNLIRAGIPHEHRSKVWKWCVDRHTRKFKDNTEPGHFQTLLQKALEKQNPASKQIELDLLRTLPNNKHYSCPTSEGIQKLRNVLLAFSWRNPDIGYCQGLNRLVAVALLYLEQEDAFWCLVTIVEVFMPRDYYTKTLLGSQVDQRVFRDLMSEKLPRLHGHFEQYKVDYTLITFNWFLVVFVDSVVSDILFKIWDSFLYEGPKVIFRFALALFKYKEEEILKLQDSMSIFKYLRYFTRTILDARKLISISFGDLNPFPLRQIRNRRAYHLEKVRLELTELEAIREDFLRERDTSPDKGELVSDEEEDT

SEQ ID NO: 5208 - protein, 914 aa, Homo sapiens
MPGAGARAEEGGGGGEGAAQGAAAEPGAGPAREPARLCGYLQKLSGKGPLRGYRSRWFVFDARRCYLYYFKSPQDALPLGHLDIADACFSYQGPDEAAEPGTEPPAHFQVHSAGAVTVLKAPNRQLMTYWLQELQQKRWEYCNSLDMVKWDSRTSPTPGDFPKGLVARDNTDLIYPHPNASAEKARNVLAVETVPGELVGEQAANQPAPGHPNSINFYSLKQWGNELKNSMSSFRPGRGHNDSRRTVFYTNEEWELLDPTPKDLEESIVQEEKKKLTPEGNKGVTGSGFPFDFGRNPYKGKRPLKDIIGSYKNRHSSGDPSSEGTSGSGSVSIRKPASEMQLQVQSQQEELEQLKKDLSSQKELVRLLQQTVRSSQYDKYFTSSRLCEGVPKDTLELLHQKDDQILGLTSQLERFSLEKESLQQEVRTLKSKVGELNEQLGMLMETIQAKDEVIIKLSEGEGNGPPPTVAPSSPSVVPVARDQLELDRLKDNLQGYKTQNKFLNKEILELSALRRNAERRERDLMAKYSSLEAKLCQIESKYLILLQEMKTPVCSEDQGPTREVIAQLLEDALQVESQEQPEQAFVKPHLVSEYDIYGFRTVPEDDEEEKLVAKVRALDLKTLYLTENQEVSTGVKWENYFASTVNREMMCSPELKNLIRAGIPHEHRSKVWKWCVDRHTRKFKDNTEPGHFQTLLQKALEKQNPASKQIELDLLRTLPNNKHYSCPTSEGIQKLRNVLLAFSWRNPDIGYCQGLNRLVAVALLYLEQEDAFWCLVTIVEVFMPRDYYTKTLLGSQVDQRVFRDLMSEKLPRLHGHFEQYKVDYTLITFNWFLVVFVDSVVSDILFKIWDSFLYEGPKVIFRFALALFKYKEEEILKLQDSMSIFKYLRYFTRTILDARSGTDAPTTWRKSGWS

SEQ ID NO: 5209 - protein, 312 aa, Homo sapiens
MKTPVCSEDQGPTREVIAQLLEDALQVESQEQPEQAFVKPHLVSEYDIYGFRTVPEDDEEEKLVAKVRALDLKTLYLTENQEVSTGVKWENYFASTVNREMMCSPELKNLIRAGIPHEHRSKVWKWCVDRHTRKFKDNTEPGHFQTLLQKALEKQNPASKQIELDLLRTLPNNKHYSCPTSEGIQKLRNVLLAFSWRNPDIGYCQGLNRLVAVALLYLEQEDAFWCLVTIVEVFMPRDYYTKTLLGSQVDQRVFRDLMSEKLPRLHGHFEQYKVDYTLITFNWFLVVFVDSVVSDILFKIWDSFLYEGPKVS

SEQ ID NO: 5210 - protein, 454 aa, Homo sapiens
MDHEAAQLEKQHVHNVYESTAPYFSDLQSKAWPRVRQFLQEQKPGSLIADIGCGTGKYLKVNSQVHTVGCDYCGPLVEIARNRGCEAMVCDNLNLPFRDEGFDAIISIGVIHHFSTKQRRIRAIKEMARVLVPGGQLMIYVWAMEQKNRHFEKQDVLVPWNRALCSQLFSESSQSGRKRQCGYPERGHPYHPPCSECSCSVCFKEQCGSKRSHSVGYEPAMARTCFANISKEGEEEYGFYSTLGKSFRSWFFSRSLDESTLRKQIERVRPLKNTEVWASSTVTVQPSRHSSLDFDHQEPFSTKGQSLDEEVFVESSSGKHLEWLRAPGTLKHLNGDHQGEMRRNGGGNFLDSTNTGVNCVDAGNIEDDNPSASKILRRISAVDSTDFNPDDTMSVEDPQTDVLDSTAFMRYYHVFREGELCSLLKENVSELRILSSGNDHGNWCIIAEKKRGCD

SEQ ID NO: 5211 - protein, 60 aa, Homo sapiens
MDHEAAQLEKQHVHNVYESTAPYFSDLQSKAWPRVRQFLQEQKPGSLIADIGNQAASSLT

SEQ ID NO: 5212 - protein, 374 aa, Homo sapiens
MAIRKKSTKSPPVLSHEFVLQNHADIVSCVAMVFLLGLMFEITAKASIIFVTLQYNVTLPATEEQATESVSLYYYGIKDLATVFFYMLVAIIIHAVIQEYMLDKINRRMHFSKTKHSKFNESGQLSAFYLFACVWGTFILISENYISDPTILWRAYPHNLMTFQMKFFYISQLAYWLHAFPELYFQKTKKEDIPRQLVYIGLYLFHIAGAYLLNLNHLGLVLLVLHYFVEFLFHISRLFYFSNEKYQKGFSLWAVLFVLGRLLTLILSVLTVGFGLARAENQKLDFSTGNFNVLAVRIAVLASICVTQAFMMWKFINFQLRRWREHSAFQAPAVKKKPTVTKGRSSKKGTENGVNGTLTSNVADSPRNKKEKSS

SEQ ID NO: 5213 - protein, 343 aa, Homo sapiens
MVFLLGLMFEITAKASIIFVTLQYNVTLPATEEQATESVSLYYYGIKDLATVFFYMLVAIIIHAVIQEYMLDKINRRMHFSKTKHSKFNESGQLSAFYLFACVWGTFILISENYISDPTILWRAYPHNLMTFQMKFFYISQLAYWLHAFPELYFQKTKKEDIPRQLVYIGLYLFHIAGAYLLNLNHLGLVLLVLHYFVEFLFHISRLFYFSNEKYQKGFSLWAVLFVLGRLLTLILSVLTVGFGLARAENQKLDFSTGNFNVLAVRIAVLASICVTQAFMMWKFINFQLRRWREHSAFQAPAVKKKPTVTKGRSSKKGTENGVNGTLTSNVADSPRNKKEKSS

SEQ ID NO: 5214 - protein, 125 aa, Homo sapiens
MKLLTHNLLSSHVRGVGSRGFPLRLQATEVRICPVEFNPNFVARMIPKVEWSAFLEAADNLRLIQVPKGPVEGYEENEEFLRTMHHLLLEVEVIEGTLQCPESGRMFPISRGIPNMLLSEEETES

SEQ ID NO: 5215 - protein, 120 aa, Homo sapiens
MKLLTHNLLSSHVRGVGSRGFPLRLQATEVRICPVEFNPNFVARMIPKVEWSAFLEAADNVPKGPVEGYEENEEFLRTMHHLLLEVEVIEGTLQCPESGRMFPISRGIPNMLLSEEETES

SEQ ID NO: 5216 - protein, 808 aa, Homo sapiens
METGTAPLVAPPRRHGAPAAPSPPPRGSRAGPVVVVAPGPPVTTATSAPVTLVAPGEARPAWVPGSAETSAPAPAPAPAPAPAVTGSTVVVLTLEASPEAPKPQLPSGPESPEPAAVAGVETSRALAAGADSPKTEEARPSPAPGPGTPTGTPTRTPSRTAPGALTAKPPLAPKPGTTVASGVTARSASGQVTGGHGAAAATSASAGQAPEDPSGPGTGPSGTCEAPVAVVTVTPAPEPAENSQDLGSTSSLGPGISGPRGQAPDTLSYLDSVSLMSGTLESLADDVSSMGSDSEINGLALRKTDKYGFLGGSQYSGSLESSIPVDVARQRELKWLDMFSNWDKWLSRRFQKVKLRCRKGIPSSLRAKAWQYLSNSKELLEQNPGKFEELERAPGDPKWLDVIEKDLHRQFPFHEMFAARGGHGQQDLYRILKAYTIYRPDEGYCQAQAPVAAVLLMHMPAEQAFWCLVQICDKYLPGYYSAGLEAIQLDGEIFFALLRRASPLAHRHLRRQRIDPVLYMTEWFMCIFARTLPWASVLRVWDMFFCEGVKIIFRVALVLLRHTLGSVEKLRSCQGMYETMEQLRNLPQQCMQEDFLVHEVTNLPVTEALIERENAAQLKKWRETRGELQYRPSRRLHGSRAIHEERRRQQPPLGPSSSLLSLPGLKSRGSRAAGGAPSPPPPVRRASAGPAPGPVVTAEGLHPSLPSPTGNSTPLGSSKETRKQEKERQKQEKERQKQEKEREKERQKQEKEREKQEKEREKQEKERQKQEKKAQGRKLSLRRKADGPPGPHDGGDRPSAEARQDAYF

SEQ ID NO: 5217 - protein, 233 aa, Homo sapiens
MYETMEQLRNLPQQCMQEDFLVHEVTNLPVTEALIERENAAQLKKWRETRGELQYRPSRRLHGSRAIHEERRRQQPPLGPSSSLLSLPGLKSRGSRAAGGAPSPPPPVRRASAGPAPGPVVTAEGLHPSLPSPTGNSTPLGSSKETRKQEKERQKQEKERQKQEKEREKERQKQEKEREKQEKEREKQEKERQKQEKKAQGRKLSLRRKADGPPGPHDGGDRPSAEARQDAYF

SEQ ID NO: 5218 - protein, 747 aa, Homo sapiens
MSQVKSSYSYDAPSDFINFSSLDDEGDTQNIDSWFEEKANLENKLLGKNGTGGLFQGKTPLRKANLQQAIVTPLKPVDNTYYKEAEKENLVEQSIPSNACSSLEVEAAISRKTPAQPQRRSLRLSAQKDLEQKEKHHVKMKAKRCATPVIIDEILPSKKMKVSNNKKKPEEEGSAHQDTAEKNASSPEKAKGRHTVPCMPPAKQKFLKSTEEQELEKSMKMQQEVVEMRKKNEEFKKLALAGIGQPVKKSVSQVTKSVDFHFRTDERIKQHPKNQEEYKEVNFTSELRKHPSSPARVTKGCTIVKPFNLSQGKKRTFDETVSTYVPLAQQVEDFHKRTPNRYHLRSKKDDINLLPSKSSVTKICRDPQTPVLQTKHRARAVTCKSTAELEAEELEKLQQYKFKARELDPRILEGGPILPKKPPVKPPTEPIGFDLEIEKRIQERESKKKTEDEHFEFHSRPCPTKILEDVVGVPEKKVLPITVPKSPAFALKNRIRMPTKEDEEEDEPVVIKAQPVPHYGVPFKPQIPEARTVEICPFSFDSRDKERQLQKEKKIKELQKGEVPKFKALPLPHFDTINLPEKKVKNVTQIEPFCLETDRRGALKAQTWKHQLEEELRQQKEAACFKARPNTVISQEPFVPKKEKKSVAEGLSGSLVQEPFQLATEKRAKERQELEKRMAEVEAQKAQQLEEARLQEEEQKKEELARLRRELVHKANPIRKYQGLEIKSSDQPLTVPVSPKFSTRFHC

SEQ ID NO: 5219 - protein, 783 aa, Homo sapiens
MSQVKSSYSYDAPSDFINFSSLDDEGDTQNIDSWFEEKANLENKLLGKNGTGGLFQGKTPLRKANLQQAIVTPLKPVDNTYYKEAEKENLVEQSIPSNACSSLEVEAAISRKTPAQPQRRSLRLSAQKDLEQKEKHHVKMKAKRCATPVIIDEILPSKKMKVSNNKKKPEEEGSAHQDTAEKNASSPEKAKGRHTVPCMPPAKQKFLKSTEEQELEKSMKMQQEVVEMRKKNEEFKKLALAGIGQPVKKSVSQVTKSVDFHFRTDERIKQHPKNQEEYKEVNFTSELRKHPSSPARVTKGCTIVKPFNLSQGKKRTFDETVSTYVPLAQQVEDFHKRTPNRYHLRSKKDDIKTGSCSVTQAGVQWRDHGSLQCPTPGLKQSSCLSLPNLLPSKSSVTKICRDPQTPVLQTKHRARAVTCKSTAELEAEELEKLQQYKFKARELDPRILEGGPILPKKPPVKPPTEPIGFDLEIEKRIQERESKKKTEDEHFEFHSRPCPTKILEDVVGVPEKKVLPITVPKSPAFALKNRIRMPTKEDEEEDEPVVIKAQPVPHYGVPFKPQIPEARTVEICPFSFDSRDKERQLQKEKKIKELQKGEVPKFKALPLPHFDTINLPEKKVKNVTQIEPFCLETDRRGALKAQTWKHQLEEELRQQKEAACFKARPNTVISQEPFVPKKEKKSVAEGLSGSLVQEPFQLATEKRAKERQELEKRMAEVEAQKAQQLEEARLQEEEQKKEELARLRRELVHKANPIRKYQGLEIKSSDQPLTVPVSPKFSTRFHC

SEQ ID NO: 5220 - protein, 1192 aa, Homo sapiens
MALSDEPAAGGPEEEAEDETLAFGAALEAFGESAETRALLGRLREVHGGGAEREVALERFRVIMDKYQEQPHLLDPHLEWMMNLLLDIVQDQTSPASLVHLAFKFLYIITKVRGYKTFLRLFPHEVADVEPVLDLVTIQNPKDHEAWETRYMLLLWLSVTCLIPFDFSRLDGNLLTQPGQARMSIMDRILQIAESYLIVSDKARDAAAVLVSRFITRPDVKQSKMAEFLDWSLCNLARSSFQTMQGVITMDGTLQALAQIFKHGKREDCLPYAATVLRCLDGCRLPESNQTLLRKLGVKLVQRLGLTFLKPKVAAWRYQRGCRSLAANLQLLTQGQSEQKPLILTEDDDEDDDVPEGVERVIEQLLVGLKDKDTVVRWSAAKGIGRMAGRLPRALADDVVGSVLDCFSFQETDKAWHGGCLALAELGRRGLLLPSRLVDVVAVILKALTYDEKRGACSVGTNVRDAACYVCWAFARAYEPQELKPFVTAISSALVIAAVFDRDINCRRAASAAFQENVGRQGTFPHGIDILTTADYFAVGNRSNCFLVISVFIAGFPEYTQPMIDHLVTMKISHWDGVIRELAARALHNLAQQAPEFSATQVFPRLLSMTLSPDLHMRHGSILACAEVAYALYKLAAQENRPVTDHLDEQAVQGLKQIHQQLYDRQLYRGLGGQLMRQAVCVLIEKLSLSKMPFRGDTVIDGWQWLINDTLRHLHLISSHSRQQMKDAAVSALAALCSEYYMKEPGEADPAIQEELITQYLAELRNPEEMTRCGFSLALGALPGFLLKGRLQQVLTGLRAVTHTSPEDVSFAESRRDGLKAIARICQTVGVKAGAPDEAVCGENVSQIYCALLGCMDDYTTDSRGDVGTWVRKAAMTSLMDLTLLLARSQPELIEAHTCERIMCCVAQQASEKIDRFRAHAASVFLTLLHFDSPPIPHVPHRGELEKLFPRSDVASVNWSAPSQAFPRITQLLGLPTYRYHVLLGLVVSLGGLTESTIRHSTQSLFEYMKGIQSDPQALGSFSGTLLQIFEDNLLNERVSVPLLKTLDHVLTHGCFDIFTTEEDHPFAVKLLALCKKEIKNSKDIQKLLSGIAVFCEMVQFPGDVRRQALLQLCLLLCHRFPLIRKTTASQVYETLLTYSDVVGADVLDEVVTVLSDTAWDAELAVVREQRNRLCDLLGVPRPQLVPQPGAC

SEQ ID NO: 5221 - protein, 184 aa, Homo sapiens
MKGIQSDPQALGSFSGTLLQIFEDNLLNERVSVPLLKTLDHVLTHGCFDIFTTEEDHPFAVKLLALCKKEIKNSKDIQKLLSGIAVFCEMVQFPGDVRRQALLQLCLLLCHRFPLIRKTTASQVYETLLTYSDVVGADVLDEVVTVLSDTAWDAELAVVREQRNRLCDLLGVPRPQLVPQPGAC

SEQ ID NO: 5222 - protein, 151 aa, Homo sapiens
MFNSVFIAGFPEYTQPMIDHLVTMKISHWDGVIRELAARALHNLAQQAPEFSATQVFPRLLSMTLSPDLHMRHGSILACAEVAYALYKLAAQENRPVTDHLDEQAVQGLKQIHQQPCICSWGLMSPESKAEFCVCVCRISLGRQCVHLSGL

SEQ ID NO: 5223 - protein, 1248 aa, Homo sapiens
MALSDEPAAGGPEEEAEDETLAFGAALEAFGESAETRALLGRLREVHGGGAEREVALERFRVIMDKYQEQPHLLDPHLEWMMNLLLDIVQDQTSPASLVHLAFKFLYIITKVRGYKTFLRLFPHEVADVEPVLDLVTIQNPKDHEAWETRYMLLLWLSVTCLIPFDFSRLDGNLLTQPGQARMSIMDRILQIAESYLIVSDKARDAAAVLVSRFITRPDVKQSKMAEFLDWSLCNLARSSFQTMQGVITMDGTLQALAQIFKHGKREDCLPYAATVLRCLDGCRLPESNQTLLRKLGVKLVQRLGLTFLKPKVAAWRYQRGCRSLAANLQLLTQGQSEQKPLILTEDDDEDDDVPEGVERVIEQLLVGLKDKDTVVRWSAAKGIGRMAGRLPRALADDVVGSVLDCFSFQETDKAWHGGCLALAELGRRGLLLPSRLVDVVAVILKALTYDEKRGACSVGTNVRDAACYVCWAFARAYEPQELKPFVTAISSALVIAAVFDRDINCRRAASAAFQENVGRQGTFPHGIDILTTADYFAVGNRSNCFLVISVFIAGFPEYTQPMIDHLVTMKISHWDGVIRELAARALHNLAQQAPEFSATQVFPRLLSMTLSPDLHMRHGSILACAEVAYALYKLAAQENRPVTDHLDEQAVQGLKQIHQQLYDRQLYRGLGGQLMRQAVCVLIEKLSLSKMPFRGDTVIDGWQWLINDTLRHLHLISSHSRQQMKDAAVSALAALCSEYYMKEPGEADPAIQEELITQYLAELRNPEEMTRCGFSLALGALPGFLLKGRLQQVLTGLRAVTHTSPEDVSFAESRRDGLKAIARICQTVGVKAGAPDEAVCGENVSQIYCALLGCMDDYTTDSRGDVGTWVRKAAMTSLMDLTLLLARSQPELIEAHTCERIMCCVAQQASEKIDRFRAHAASVFLTLLHFDSPPIPHVPHRGELEKLFPRSDVASVNWSAPSQAFPRITQLLGLPTYRYHVLLGLVVSLGGLTESTIRHSTQSLFEYMKGIQSDPQALGSFSGTLLQIFEDNLLNERVSVPLLKTLDHVLTHGCFDIFTTEEDHPFAVKLLALCKKEIKNSKDIQKLLSGIAVDFPSATLVCVGTVQMYAHTHLRLGAPGPHCAHGSAMPRFCEMVQFPGDVRRQALLQLCLLLCHRFPLIRKTTASQVYETLLTYSDVVGADVLDEVVTVLSDTAWDAELAVVREQRNRLCDLLGVPSPTWCPAWCLLKPVLEPIPHPCLVRMSCS

SEQ ID NO: 5224 - protein, 757 aa, Homo sapiens
MALSDEPAAGGPEEEAEDETLAFGAALEAFGESAETRALLGRLREVHGGGAEREVALERFREWMMNLLLDIVQDQTSPASLVHLAFKFLYIITKVRGYKTFLRLFPHEVADVEPVLDLVTIQNPKDHEAWETRYMLLLWLSVTCLIPFDFSRLDGNLLTQPGQARMSIMDRILQIAESYLIVSDKARDAAAVLVSRFITRPDVKQSKMAEFLDWSLCNLARSSFQTMQGVITMDGTLQALAQIFKHGKREDCLPYAATVLRCLDGCRLPESNQTLLRKLGVKLVQRLGLTFLKPKVAAWRYQRGCRSLAANLQLLTQGQSEQKPLILTEDDDEDDDVPEGVERVIEQLLVGLKDKDTVVRWSAAKGIGRMAGRLPRALADDVVGSVLDCFSFQETDKAWHGGCLALAELGRRGLLLPSRLVDVVAVILKALTYDEKRGACSVGTNVRDAACYVCWAFARAYEPQELKPFVTAISSALVIAAVFDRDINCRRAASAAFQENVGRQGTFPHGIDILTTADYFAVGNRSNCFLVISVFIAGFPEYTQPMIDHLVTMKISHWDGVIRELAARALHNLAQQAPEFSATQVFPRLLSMTLSPDLHMRHGSILACAEVAYALYKLAAQENRPVTDHLDEQAVQGLKQIHQQLYDRQLYRGLGGQLMRQAVCVLIEKLSLSKMPFRGDTVIDGWQWLINDTLRHLHLISSHSRQQMKDAAVSALAALCSDTAWDAELAVVREQRNRLCDLLGVPRPQLVPQPGAC

SEQ ID NO: 5225 - protein, 636 aa, Homo sapiens
MEGRGPYRIYDPGGSVPSGEASAAFERLVKENSRLKEKMQGIKMLGELLEESQMEATRLRQKAEELVKDNELLPPPSPSLGSFDPLAELTGKDSNVTASPTAPACPSDKPAPVQKPPSSGTSSEFEVVTPEEQNSPESSSHANAMALGPLPREDGNLMLHLQRLETTLSVCAEEPDHGQLFTHLGRMALEFNRLASKVHKNEQRTSILQTLCEQLRKENEALKAKLDKGLEQRDQAAERLREENLELKKLLMSNGNKEGASGRPGSPKMEGTGKKAVAGQQQASVTAGKVPEVVALGAAEKKVKMLEQQRSELLEVNKQWDQHFRSMKQQYEQKITELRQKLADLQKQVTDLEAEREQKQRDFDRKLLLAKSKIEMEETDKEQLTAEAKELRQKVKYLQDQLSPLTRQREYQEKEIQRLNKALEEALSIQTPPSSPPTAFGSPEGAGALLRKQELVTQNELLKQQVKIFEEDFQRERSDRERMNEEKEELKKQVEKLQAQVTLSNAQLKAFKDEEKAREALRQQKRKAKASGERYHVEPHPEHLCGAYPYAYPPMPAMVPHHGFEDWSQIRYPPPPMAMEHPPPLPNSRLFHLPEYTWRLPCGGVRNPNQSSQVMDPPTARPTEPESPKNDREGPQ

SEQ ID NO: 5226 - protein, 635 aa, Homo sapiens
MEGRGPYRIYDPGGSVPSGEASAAFERLVKENSRLKEKMQGIKMLGELLEESQMEATRLRQKAEELVKDNELLPPPSPSLGSFDPLAELTGKDSNVTASPTAPACPSDKPAPVQKPPSSGTSSEFEVVTPEEQNSPESSSHANAMALGPLPREDGNLMLHLQRLETTLSVCAEEPDHGQLFTHLGRMALEFNRLASKVHKNEQRTSILQTLCEQLRKENEALKAKLDKGLEQRDQAAERLREENLELKKLLMSNGNKEGASGRPGSPKMEGTGKKAVAGQQQASVTAGKVPEVVALGAAEKKVKMLEQQRSELLEVNKQWDQHFRSMKQQYEQKITELRQKLADLQKQVTDLEAEREQKQRDFDRKLLLAKSKIEMEETDKEQLTAEAKELRQKVKYLQDQLSPLTRQREYQEKEIQRLNKALEEALSIQTPPSSPPTAFGSPEGAGALLRKQELVTQNELLKQQVKIFEEDFQRERSDRERMNEEKEELKKQVEKLQAQVTLSNAQLKAFKDEEKAREALRQQKRKAKASGERYHVEPHPEHLCGAYPYAYPPMPAMVPHHGFEDWSQIRYPPPPMAMEHPPPLPNSRLFHLPEYTWRLPCGGVRNPNQSSQVMDPPTARPTEPEPADLRLPRN

SEQ ID NO: 5227 - protein, 583 aa, Homo sapiens
MEATRLRQKAEELVKDNELLPPPSPSLGSFDPLAELTGKDSNVTASPTAPACPSDKPAPVQKPPSSGTSSEFEVVTPEEQNSPESSSHANAMALGPLPREDGNLMLHLQRLETTLSVCAEEPDHGQLFTHLGRMALEFNRLASKVHKNEQRTSILQTLCEQLRKENEALKAKLDKGLEQRDQAAERLREENLELKKLLMSNGNKEGASGRPGSPKMEGTGKKAVAGQQQASVTAGKVPEVVALGAAEKKVKMLEQQRSELLEVNKQWDQHFRSMKQQYEQKITELRQKLADLQKQVTDLEAEREQKQRDFDRKLLLAKSKIEMEETDKEQLTAEAKELRQKVKYLQDQLSPLTRQREYQEKEIQRLNKALEEALSIQTPPSSPPTAFGSPEGAGALLRKQELVTQNELLKQQVKIFEEDFQRERSDRERMNEEKEELKKQVEKLQAQVTLSNAQLKAFKDEEKAREALRQQKRKAKASGERYHVEPHPEHLCGAYPYAYPPMPAMVPHHGFEDWSQIRYPPPPMAMEHPPPLPNSRLFHLPEYTWRLPCGGVRNPNQSSQVMDPPTARPTEPESPKNDREGPQ

SEQ ID NO: 5228 - protein, 572 aa, Homo sapiens
MEGRGPYRIYDPGGSVPSGEASAAFERLVKENSRLKEKMQGIKMLGELLEESQMEATRLRQKAEELVKDNELLPPPSPSLGSFDPLAELTGKDSNVTASPTAPACPSDKPAPVQKPPSSGTSSEFEVVTPEEQNSPESSSHANAMALGPLPREDGNLMLHLQRLETTLSVCAEEPDHGQLFTHLGRMALEFNRLASKVHKNEQRTSILQTLCEQLRKENEALKAKLDKGLEQRDQAAERLREENLELKKLLMSNGNKEGASGRPGSPKMEGTGKKAVAGQQQASVTAGKVPEVVALGAAEKKVKMLEQQRSELLEVNKQWDQHFRSMKQQYEQKITELRQKLADLQKQVTDLEAEREQKQRDFDRKLLLAKSKIEMEETDKEQLTAEAKELRQKVKYLQDQLSPLTRQREYQEKEIQRLNKALEEALSIQTPPSSPPTAFGSPEGAGALLRKQELVTQNELLKQQVKIFEEDFQRERSDRERMNEEKEELKKQVEKLQAQVTLSNAQLKAFKDEEKAREALRQQKRKAKPEYTWRLPCGGVRNPNQSSQVMDPPTARPTEPESPKNDREGPQ

SEQ ID NO: 5229 - protein, 556 aa, Homo sapiens
MEGRGPYRIYDPGGSVPSGEASAAFERLVKENSRLKEKMQGIKMLGELLEESQMEATRLRQKAEELVKDNELLPPPSPSLGSFDPLAELTGKDSNVTASPTAPACPSDKPAPVQKPPSSGTSSEFEVVTPEEQNSPESSSHANAMALGPLPREDGNLMLHLQRLETTLSVCAEEPDHGQLFTHLGRMALEFNRLASKVHKNEQRTSILQTLCEQLRKENEALKAKLDKGLEQRDQAAERLREENLELKKLLMSNGNKEGASGRPGSPKMEGTGKKAVAGQQQASVTAGKVPEVVALGAAEKKVKMLEQQRSELLEVNKQWDQHFRSMKQQYEQKITELRQKLADLQKQVTDLEAEREQKQRDFDRKLLLAKSKIEMEETDKEQLTAEAKELRQKVKYLQDQLSPLTRQREYQEKEIQRLNKALEEALSIQTPPSSPPTAFGSPEGAGALLRKQELVTQNELLKQQVKIFEEDFQRERSDRERMNEEKEELKKQVEKLQAQVTLSNAQLKAFKDEEKAREALRQQKRKAKSLQKMTVRGLSETRLCHLAPPSSCRAS

SEQ ID NO: 5230 - protein, 571 aa, Homo sapiens
MEGRGPYRIYDPGGSVPSGEASAAFERLVKENSRLKEKMQGIKMLGELLEESQMEATRLRQKAEELVKDNELLPPPSPSLGSFDPLAELTGKDSNVTASPTAPACPSDKPAPVQKPPSSGTSSEFEVVTPEEQNSPESSSHANAMALGPLPREDGNLMLHLQRLETTLSVCAEEPDHGQLFTHLGRMALEFNRLASKVHKNEQRTSILQTLCEQLRKENEALKAKLDKGLEQRDQAAERLREENLELKKLLMSNGNKEGASGRPGSPKMEGTGKKAVAGQQQASVTAGKVPEVVALGAAEKKVKMLEQQRSELLEVNKQWDQHFRSMKQQYEQKITELRQKLADLQKQVTDLEAEREQKQRDFDRKLLLAKSKIEMEETDKEQLTAEAKELRQKVKYLQDQLSPLTRQREYQEKEIQRLNKALEEALSIQTPPSSPPTAFGSPEGAGALLRKQELVTQNELLKQQVKIFEEDFQRERSDRERMNEEKEELKKQVEKLQAQVTLSNAQLKAFKDEEKAREALRQQKRKAKPEYTWRLPCGGVRNPNQSSQVMDPPTARPTEPEPADLRLPRN

SEQ ID NO: 5231 - protein, 545 aa, Homo sapiens
MEGRGPYRIYDPGGSVPSGEASAAFERLVKENSRLKEKMQGIKMLGELLEESQMEATRLRQKAEELVKDNELLPPPSPSLGSFDPLAELTGKDSNVTASPTAPACPSDKPAPVQKPPSSGTSSEFEVVTPEEQNSPESSSHANAMALGPLPREDGNLMLHLQRLETTLSVCAEEPDHGQLFTHLGRMALEFNRLASKVHKNEQRTSILQTLCEQLRKENEALKAKLDKGLEQRDQAAERLREENLELKKLLMSNGNKEGASGRPGSPKMEGTGKKAVAGQQQASVTAGKVPEVVALGAAEKKVKMLEQQRSELLEVNKQWDQHFRSMKQQYEQKITELRQKLADLQKQVTDLEAEREQKQRDFDRKLLLAKSKIEMEETDKEQLTAEAKELRQKVKYLQDQLSPLTRQREYQEKEIQRLNKALEEALSIQTPPSSPPTAFGSPEGAGALLRKQELVTQNELLKQQVKIFEEDFQRERSDRERMNEEKEELKKQVEKLQAQVTLSNAQLKAFKDEEKAREALRQQKRKAKGTHRGCPRRLPERKVK

SEQ ID NO: 5232 - protein, 552 aa, Homo sapiens
MEGRGPYRIYDPGGSVPSGEASAAFERLVKENSRLKEKMQGIKMLGELLEESQMEATRLRQKAEELVKDNELLPPPSPSLGSFDPLAELTGKDSNVTASPTAPACPSDKPAPVQKPPSSGTSSEFEVVTPEEQNSPESSSHANAMALGPLPREDGNLMLHLQRLETTLSVCAEEPDHGQLFTHLGRMALEFNRLASKVHKNEQRTSILQTLCEQLRKENEALKAKLDKGLEQRDQAAERLREENLELKKLLMSNGNKEGASGRPGSPKMEGTGKKAVAGQQQASVTAGKVPEVVALGAAEKKVKMLEQQRSELLEVNKQWDQHFRSMKQQYEQKITELRQKLADLQKQVTDLEAEREQKQRDFDRKLLLAKSKIEMEETDKEQLTAEAKELRQKVKYLQDQLSPLTRQREYQEKEIQRLNKALEEALSIQTPPSSPPTAFGSPEGAGALLRKQELVTQNELLKQQVKIFEEDFQRERSDRERMNEEKEELKKQVEKLQAQVTLSNAQLKAFKDEEKAREALRQQKRKAKSQLISDCQETRSHLHGVARASAG

SEQ ID NO: 5233 - protein, 165 aa, Homo sapiens
MDSSRARQQLRRRFLLLPDAEAQLDREGDAGPETSTAVEKKEKPLPRLNIHSGFWILASIVVTYYVDFFKTLKENFHTSSWFLCGSALLLVSLSIAFYCIVYLEWYCGIGEYDVKYPALIPITTASFIAAGICFNIALWHVWSFFTPLLLFTQFMGVVMFITLLG

SEQ ID NO: 5234 - protein, 141 aa, Homo sapiens
MPPFGYKTETSTAVEKKEKPLPRLNIHSGFWILASIVVTYYVDFFKTLKENFHTSSWFLCGSALLLVSLSIAFYCIVYLEWYCGIGEYDVKYPALIPITTASFIAAGICFNIALWHVWSFFTPLLLFTQFMGVVMFITLLG

SEQ ID NO: 5235 - protein, 277 aa, Homo sapiens
MCVGARRLGRGPCAALLLLGLGLSTVTGLHCVGDTYPSNDRCCHECRPGNGMVSRCSRSQNTVCRPCGPGFYNDVVSSKPCKPCTWCNLRSGSERKQLCTATQDTVCRCRAGTQPLDSYKPGVDCAPCPPGHFSPGDNQACKPWTNCTLAGKHTLQPASNSSDAICEDRDPPATQPQETQGPPARPITVQPTEAWPRTSQGPSTRPVEVPGGRAVAAILGLGLVLGLLGPLAILLALYLLRRDQRLPPDAHKPPGGGSFRTPIQEEQADAHSTLAKI

SEQ ID NO: 5236 - protein, 575 aa, Homo sapiens
MLGVLVLGALALAGLGFPAPAEPQPGGSQCVEHDCFALYPGPATFLNASQICDGLRGHLMTVRSSVAADVISLLLNGDGGVGRRRLWIGLQLPPGCGDPKRLGPLRGFQWVTGDNNTSYSRWARLDLNGAPLCGPLCVAVSAAEATVPSEPIWEEQQCEVKADGFLCEFHFPATCRPLAVEPGAAAAAVSITYGTPFAARGADFQALPVGSSAAVAPLGLQLMCTAPPGAVQGHWAREAPGAWDCSVENGGCEHACNAIPGAPRCQCPAGAALQADGRSCTASATQSCNDLCEHFCVPNPDQPGSYSCMCETGYRLAADQHRCEDVDDCILEPSPCPQRCVNTQGGFECHCYPNYDLVDGECVEPVDPCFRANCEYQCQPLNQTSYLCVCAEGFAPIPHEPHRCQMFCNQTACPADCDPNTQASCECPEGYILDDGFICTDIDECENGGFCSGVCHNLPGTFECICGPDSALARHIGTDCDSGKVDGGDSGSGEPPPSPTPGSTLTPPAVGLVHSGLLIGISIASLCLVVALLALLCHLRKKQGAARAKMEYKCAAPSKEVVLQHVRTERTPQRL

SEQ ID NO: 5237 - protein, 276 aa, Homo sapiens
MCIIFFKFDPRPVSKNAYRLILAANRDEFYSRPSKLADFWGNNNEILSGLDMEEGKEGGTWLGISTRGKLAALTNYLQPQLDWQARGRGELVTHFLTTDVDSLSYLKKVSMEGHLYNGFNLIAADLSTAKGDVICYYGNRGEPDPIVLTPGTYGLSNALLETPWRKLCFGKQLFLEAVERSQALPKDVLIASLLDVLNNEEAQLPDPAIEDQGGEYVQPMLSKYAAVCVRCPGYGTRTNTIILVDADGHVTFTERSMMDKDLSHWETRTYEFTLQS

SEQ ID NO: 5238 - protein, 214 aa, Homo sapiens
MCIIFFKFDPRPVSKNAYRLILAANRDEFYSRPSKLADFWGNNNEILSGLDMEEGKEGGTWLGISTRGKLAALTNYLQPQLDWQARGRGTYGLSNALLETPWRKLCFGKQLFLEAVERSQALPKDVLIASLLDVLNNEEAQLPDPAIEDQGGEYVQPMLSKYAAVCVRCPGYGTRTNTIILVDADGHVTFTERSMMDKDLSHWETRTYEFTLQS

SEQ ID NO: 5239 - protein, 273 aa, Homo sapiens
MPLGAGTPVNVQRREDSATEGSHRLILAANRDEFYSRPSKLADFWGNNNEILSGLDMEEGKEGGTWLGISTRGKLAALTNYLQPQLDWQARGRGELVTHFLTTDVDSLSYLKKVSMEGHLYNGFNLIAADLSTAKGDVICYYGNRGEPDPIVLTPGTYGLSNALLETPWRKLCFGKQLFLEAVERSQALPKDVLNNEEAQLPDPAIEDQGGEYVQPMLSKYAAVCVRCPGYGTRTNTIILVDADGHVTFTERSMMDKDLSHWETRTYEFTLQS

SEQ ID NO: 5240 - protein, 317 aa, Homo sapiens
MPPKLLCAGRCVGQDGAAQAWHCPPGQGHSVWDAVRMPLGAGTPVNVQRREDSATEGSHRLILAANRDEFYSRPSKLADFWGNNNEILSGLDMEEGKEGGTWLGISTRGKLAALTNYLQPQLDWQARGRGELVTHFLTTDVDSLSYLKKVSMEGHLYNGFNLIAADLSTAKGDVICYYGNRGEPDPIVLTPGTYGLSNALLETPWRKLCFGKQLFLEAVERSQALPKDVLIASLLDVLNNEEAQLPDPAIEDQGGEYVQPMLSKYAAVCVRCPGYGTRTNTIILVDADGHVTFTERSMMDKDLSHWETRTYEFTLQS

SEQ ID NO: 5241 - protein, 178 aa, Homo sapiens
MAGHQHTWQAGSTHQLPAAAAGLAGPRASTAKGDVICYYGNRGEPDPIVLTPGTYGLSNALLETPWRKLCFGKQLFLEAVERSQALPKDVLIASLLDVLNNEEAQLPDPAIEDQGGEYVQPMLSKYAAVCVRCPGYGTRTNTIILVDADGHVTFTERSMMDKDLSHWETRTYEFTLQS

SEQ ID NO: 5242 - protein, 198 aa, Homo sapiens
MPPKLLCAGRCVGQDGAAQAWHCPPGQGHSVWDAVRMPLGAGTPVNVQRREDSATEGSHRLILAANRDEFYSRPSKLADFWGNNNEILSGLDMEEGKEGGTWLGISTRGKLAALTNYLQPQLDWQARGRGELVTHFLTTDVDSLSYLKKVSMEGHLYNGFNLIAADLSTAKGDVICYYGNRGEPDPIVLTPEPTLSSW

SEQ ID NO: 5243 - protein, 450 aa, Homo sapiens
MASAITQCSTSELTCSICTDYLTDPVTICCGHRFCSPCLCLLWEDTLTPNCCPVCREISQQMYFKRIIFAEKQVIPTRESVPCQLSSSAMLICRRHQEIKNLICETDRSLLCFLCSQSPRHATHKHYMTREADEYYRKKLLIQMKSIWKKKQKNQRNLNRETNIIGTWEVFINLRSMMISAEYPKVCQYLREEEQKHVESLAREGRIIFQQLKRSQTRMAKMGILLREMYEKLKEMSCKADVNLPQDLGDVMKRNEFLRLAMPQPVNPQLSAWTITGVSERLNFFRVYITLDRKICSNHKLLFEDLRHLQCSLDDTDMSCNPTSTQYTSSWGAQILSSGKHYWEVDVKDSCNWVIGLCREAWTKRNDMRLDSEGIFLLLCLKVDDHFSLFSTSPLLPHYIPRPQGWLGVFLDYECGIVSFVNVAQSSLICSFLSRIFYFPLRPFICHGSK

SEQ ID NO: 5244 - protein, 255 aa, Homo sapiens
MGNSCYNIVATLLLVLNFERTRSLQDPCSNCPAGTFCDNNRNQICSPCPPNSFSSAGGQRTCDICRQCKGVFRTRKECSSTSNAECDCTPGFHCLGAGCSMCEQDCKQGQELTKKGCKDCCFGTFNDQKRGICRPWTNCSLDGKSVLVNGTKERDVVCGPSPADLSPGASSVTPPAPAREPGHSPQIISFFLALTSTALLFLLFFLTLRFSVVKRGRKKLLYIFKQPFMRPVQTTQEEDGCSCRFPEEEEGGCEL

SEQ ID NO: 5245 - protein, 1049 aa, Homo sapiens
MVFPMWTLKRQILILFNIILISKLLGARWFPKTLPCDVTLDVPKNHVIVDCTDKHLTEIPGGIPTNTTNLTLTINHIPDISPASFHRLDHLVEIDFRCNCVPIPLGSKNNMCIKRLQIKPRSFSGLTYLKSLYLDGNQLLEIPQGLPPSLQLLSLEANNIFSIRKENLTELANIEILYLGQNCYYRNPCYVSYSIEKDAFLNLTKLKVLSLKDNNVTAVPTVLPSTLTELYLYNNMIAKIQEDDFNNLNQLQILDLSGNCPRCYNAPFPCAPCKNNSPLQIPVNAFDALTELKVLRLHSNSLQHVPPRWFKNINKLQELDLSQNFLAKEIGDAKFLHFLPSLIQLDLSFNFELQVYRASMNLSQAFSSLKSLKILRIRGYVFKELKSFNLSPLHNLQNLEVLDLGTNFIKIANLSMFKQFKRLKVIDLSVNKISPSGDSSEVGFCSNARTSVESYEPQVLEQLHYFRYDKYARSCRFKNKEASFMSVNESCYKYGQTLDLSKNSIFFVKSSDFQHLSFLKCLNLSGNLISQTLNGSEFQPLAELRYLDFSNNRLDLLHSTAFEELHKLEVLDISSNSHYFQSEGITHMLNFTKNLKVLQKLMMNDNDISSSTSRTMESESLRTLEFRGNHLDVLWREGDNRYLQLFKNLLKLEELDISKNSLSFLPSGVFDGMPPNLKNLSLAKNGLKSFSWKKLQCLKNLETLDLSHNQLTTVPERLSNCSRSLKNLILKNNQIRSLTKYFLQDAFQLRYLDLSSNKIQMIQKTSFPENVLNNLKMLLLHHNRFLCTCDAVWFVWWVNHTEVTIPYLATDVTCVGPGAHKGQSVISLDLYTCELDLTNLILFSLSISVSLFLMVMMTASHLYFWDVWYIYHFCKAKIKGYQRLISPDCCYDAFIVYDTKDPAVTEWVLAELVAKLEDPREKHFNLCLEERDWLPGQPVLENLSQSIQLSKKTVFVMTDKYAKTENFKIAFYLSHQRLMDEKVDVIILIFLEKPFQKSKFLQLRKRLCGSSVLEWPTNPQAHPYFWQCLKNALATDNHVAYSQVFKETV

SEQ ID NO: 5246 - protein, 386 aa, Homo sapiens
MGLWGQSVPTASSARAGRYPGARTASGTRPWLLDPKILKFVVFIVAVLLPVRVDSATIPRQDEVPQQTVAPQQQRRSLKEEECPAGSHRSEYTGACNPCTEGVDYTIASNNLPSCLLCTVCKSGQTNKSSCTTTRDTVCQCEKGSFQDKNSPEMCRTCRTGCPRGMVKVSNCTPRSDIKCKNESAASSTGKTPAAEETVTTILGMLASPYHYLIIIVVLVIILAVVVVGFSCRKKFISYLKGICSGGGGGPERVHRVLFRRRSCPSRVPGAEDNARNETLSNRYLQPTQVSEQEIQGQELAELTGVTVESPEEPQRLLEQAEAEGCQRRRLLVPVNDADSADISTLLDASATLEEGHAKETIQDQLVGSEKLFYEEDEAGSATSCL

SEQ ID NO: 5247 - protein, 335 aa, Homo sapiens
MLGIWTLLPLVLTSVARLSSKSVNAQVTDINSKGLELRKTVTTVETQNLEGLHHDGQFCHKPCPPGERKARDCTVNGDEPDCVPCQEGKEYTDKAHFSSKCRRCRLCDEGHGLEVEINCTRTQNTKCRCKPNFFCNSTVCEHCDPCTKCEHGIIKECTLTSNTKCKEEGSRSNLGWLCLLLLPIPLIVWVKRKEVQKTCRKHRKENQGSHESPTLNPETVAINLSDVDLSKYITTIAGVMTLSQVKGFVRKNGVNEAKIDEIKNDNVQDTAEQKVQLLRNWHQLHGKKEAYDTLIKDLKKANLCTLAEKIQTIILKDITSDSENSNFRNEIQSLV

SEQ ID NO: 5248 - protein, 103 aa, Homo sapiens
MLGIWTLLPLVLTSVARLSSKSVNAQVTDINSKGLELRKTVTTVETQNLEGLHHDGQFCHKPCPPDVNMESSRNAHSPATPSAKRKDPDLTWGGFVFFFCQFH

SEQ ID NO: 5249 - protein, 86 aa, Homo sapiens
MLGIWTLLPLVLTSVARLSSKSVNAQVTDINSKGLELRKTVTTVETQNLEGLHHDGQFCHKPCPPDVNMESSRNAHSPATPSAKRK

SEQ ID NO: 5250 - protein, 149 aa, Homo sapiens
MLGIWTLLPLVLTSVARLSSKSVNAQVTDINSKGLELRKTVTTVETQNLEGLHHDGQFCHKPCPPGERKARDCTVNGDEPDCVPCQEGKEYTDKAHFSSKCRRCRLCDEGHDVNMESSRNAHSPATPSAKRKDPDLTWGGFVFFFCQFH

SEQ ID NO: 5251 - protein, 132 aa, Homo sapiens
MLGIWTLLPLVLTSVARLSSKSVNAQVTDINSKGLELRKTVTTVETQNLEGLHHDGQFCHKPCPPGERKARDCTVNGDEPDCVPCQEGKEYTDKAHFSSKCRRCRLCDEGHDVNMESSRNAHSPATPSAKRK

SEQ ID NO: 5252 - protein, 314 aa, Homo sapiens
MLGIWTLLPLVLTSVARLSSKSVNAQVTDINSKGLELRKTVTTVETQNLEGLHHDGQFCHKPCPPGERKARDCTVNGDEPDCVPCQEGKEYTDKAHFSSKCRRCRLCDEGHGLEVEINCTRTQNTKCRCKPNFFCNSTVCEHCDPCTKCEHGIIKECTLTSNTKCKEEVKRKEVQKTCRKHRKENQGSHESPTLNPETVAINLSDVDLSKYITTIAGVMTLSQVKGFVRKNGVNEAKIDEIKNDNVQDTAEQKVQLLRNWHQLHGKKEAYDTLIKDLKKANLCTLAEKIQTIILKDITSDSENSNFRNEIQSLV

SEQ ID NO: 5253 - protein, 220 aa, Homo sapiens
MLGIWTLLPLVLTSVARLSSKSVNAQVTDINSKGLELRKTVTTVETQNLEGLHHDGQFCHKPCPPGERKARDCTVNGDEPDCVPCQEGKEYTDKAHFSSKCRRCRLCDEGHGLEVEINCTRTQNTKCRCKPNFFCNSTVCEHCDPCTKCEHGIIKECTLTSNTKCKEEGSRSNLGWLCLLLLPIPLIVWVKRKEVQKTCRKHRKENQGSHESPTLNPMLT

SEQ ID NO: 5254 - protein, 203 aa, Homo sapiens
MPKAPKGKSAGREKKVIHPYSRKAAQITREAHKQEKKEKLKNEKALRLNLVGEKLQWFQNHLDPQKKRYSKKDACELIERYLNRFSSELEQIELHNSIRDRQGRRHCSRETVIKQTMERERQQFEGYGLEIPDILNASNLKTFREWDFDLKKLPNIKMRKICANDAIPKTCKRKTIITVDQDLGELELNDESSDSDEEMTAVA

SEQ ID NO: 5255 - protein, 186 aa, Homo sapiens
MDTFSTKSLALQAQKKLLSKMASKAVVAVLVDDTSSEVLDELYRATREFTRSRKEAQKMLKNLVKVALKLGLLLRGDQLGGEELALLRRFRHRARCLAMTAVSFHQVDFTFDRRVLAAGLLECRDLLHQAVGPHLTAKSHGRINHVFGHLADCDFLAALYGPAEPYRSHLRRICEGLGRMLDEGSL

SEQ ID NO: 5256 - protein, 712 aa, Homo sapiens
MEENPTLESEAWGSSRGWLAPREARGAPCSSPGPSLSSVLNELPSAATLRYRDPGVLPWGALEEEEEDGGRSRKAFTEVTQTELQDPHPSRELPWPMQARRAHRQRNASRDQVVYGSGTKTDRWARLLRRSKEKTKEGLRSLQPWAWTLKRIGGQFGAGTESYFSLLRFLLLLNVLASVLMACMTLLPTWLGGAPPGPPGPDISSPCGSYNPHSQGLVTFATQLFNLLSGEGYLEWSPLFYGFYPPRPRLAVTYLCWAFAVGLICLLLILHRSVSGLKQTLLAESEALTSYSHRVFSAWDFGLCGDVHVRLRQRIILYELKVELEETVVRRQAAVRTLGQQARVWLVRVLLNLLVVALLGAAFYGVYWATGCTVELQEMPLVQELPLLKLGVNYLPSIFIAGVNFVLPPVFKLIAPLEGYTRSRQIVFILLRTVFLRLASLVVLLFSLWNQITCGGDSEAEDCKTCGYNYKQLPCWETVLGQEMYKLLLFDLLTVLAVALLIQFPRKLLCGLCPGALGRLAGTQEFQVPDEVLGLIYAQTVVWVGSFFCPLLPLLNTVKFLLLFYLKKLTLFSTCSPAARTFRASAANFFFPLVLLLGLAISSVPLLYSIFLIPPSKLCGPFRGQSSIWAQIPESISSLPETTQNFLFFLGTQAFAVPLLLISSILMAYTVALANSYGRLISELKRQRQTEAQNKVFLARRAVALTSTKPAL

SEQ ID NO: 5257 - protein, 706 aa, Homo sapiens
MEENPTLESEAWGSSRGWLAPREARGGPSLSSVLNELPSAATLRYRDPGVLPWGALEEEEEDGGRSRKAFTEVTQTELQDPHPSRELPWPMQARRAHRQRNASRDQVVYGSGTKTDRWARLLRRSKEKTKEGLRSLQPWAWTLKRIGGQFGAGTESYFSLLRFLLLLNVLASVLMACMTLLPTWLGGAPPGPPGPDISSPCGSYNPHSQGLVTFATQLFNLLSGEGYLEWSPLFYGFYPPRPRLAVTYLCWAFAVGLICLLLILHRSVSGLKQTLLAESEALTSYSHRVFSAWDFGLCGDVHVRLRQRIILYELKVELEETVVRRQAAVRTLGQQARVWLVRVLLNLLVVALLGAAFYGVYWATGCTVELQEMPLVQELPLLKLGVNYLPSIFIAGVNFVLPPVFKLIAPLEGYTRSRQIVFILLRTVFLRLASLVVLLFSLWNQITCGGDSEAEDCKTCGYNYKQLPCWETVLGQEMYKLLLFDLLTVLAVALLIQFPRKLLCGLCPGALGRLAGTQEFQVPDEVLGLIYAQTVVWVGSFFCPLLPLLNTVKFLLLFYLKKLTLFSTCSPAARTFRASAANFFFPLVLLLGLAISSVPLLYSIFLIPPSKLCGPFRGQSSIWAQIPESISSLPETTQNFLFFLGTQAFAVPLLLISSILMAYTVALANSYGRLISELKRQRQTEAQNKVFLARRAVALTSTKPAL

SEQ ID NO: 5258 - protein, 294 aa, Homo sapiens
MKGGGGQRDVGADRTVFLRLASLVVLLFSLWNQITCGGDSEAEDCKTCGYNYKQLPCWETVLGQEMYKLLLFDLLTVLAVALLIQFPRKLLCGLCPGALGRLAGTQEFQVPDEVLGLIYAQTVVWVGSFFCPLLPLLNTVKFLLLFYLKKLTLFSTCSPAARTFRASAANFFFPLVLLLGLAISSVPLLYSIFLIPPSKLCGPFRGQSSIWAQIPESISSLPETTQNFLFFLGTQAFAVPLLLISSILMAYTVALANSYGRLISELKRQRQTEAQNKVFLARRAVALTSTKPAL

SEQ ID NO: 5259 - protein, 723 aa, Homo sapiens
MSESSGSALQPGRPSRQPAVHPENLSLDSSCFSSPPVNFLQELPSYRSIARRRTTVHSRDKQSGTLLKPTDSYSSQLEDRIAENLSSHSLRNYALNISEKRRLRDIQETQMKYLSEWDQWKRYSSKSWKRFLEKAREMTTHLELWREDIRSIEGKFGTGIQSYFSFLRFLVLLNLVIFLIIFMLVLLPVLLTKYKITNSSFVLIPFKDMDKQCTVYPVSSSGLIYFYSYIIDLLSGTGFLEETSLFYGHYTIDGVKFQNFTYDLPLAYLLSTIASLALSLLWIVKRSVEGFKINLIRSEEHFQSYCNKIFAGWDFCITNRSMADLKHSSLRYELRADLEEERMRQKIAERTSEETIRIYSLRLFLNCIVLAVLGACFYAIYVATVFSQEHMKKEIDKMVFGENLFILYLPSIVITLANFITPMIFAKIIRYEDYSPGFEIRLTILRCVFMRLATICVLVFTLGSKITSCDDDTCDLCGYNQKLYPCWETQVGQEMYKLMIFDFIIILAVTLFVDFPRKLLVTYCSSCKLIQCWGQQEFAIPDNVLGIVYGQTICWIGAFFSPLLPAIATLKFIIIFYVKEWSLLYTCRPSPRPFRASNSNFFFLLVLLIGLCLAIIPLTISISRIPSSKACGPFTNFNTTWEVIPKTVSTFPSSLQSFIHGVTSEAFAVPFFMIICLIMFYFIALAGAHKRVVIQLREQLSLESRDKCYLIQKLTEAQRDMRN

SEQ ID NO: 5260 - protein, 613 aa, Homo sapiens
MKYLSEWDQWKRYSSKSWKRFLEKAREMTTHLELWREDIRSIEGKFGTGIQSYFSFLRFLVLLNLVIFLIIFMLVLLPVLLTKYKITNSSFVLIPFKDMDKQCTVYPVSSSGLIYFYSYIIDLLSGTGFLEETSLFYGHYTIDGVKFQNFTYDLPLAYLLSTIASLALSLLWIVKRSVEGFKINLIRSEEHFQSYCNKIFAGWDFCITNRSMADLKHSSLRYELRADLEEERMRQKIAERTSEETIRIYSLRLFLNCIVLAVLGACFYAIYVATVFSQEHMKKEIDKMVFGENLFILYLPSIVITLANFITPMIFAKIIRYEDYSPGFEIRLTILRCVFMRLATICVLVFTLGSKITSCDDDTCDLCGYNQKLYPCWETQVGQEMYKLMIFDFIIILAVTLFVDFPRKLLVTYCSSCKLIQCWGQQEFAIPDNVLGIVYGQTICWIGAFFSPLLPAIATLKFIIIFYVKEWSLLYTCRPSPRPFRASNSNFFFLLVLLIGLCLAIIPLTISISRIPSSKACGPFTNFNTTWEVIPKTVSTFPSSLQSFIHGVTSEAFAVPFFMIICLIMFYFIALAGAHKRVVIQLREQLSLESRDKCYLIQKLTEAQRDMRN

SEQ ID NO: 5261 - protein, 210 aa, Homo sapiens
MADGSSDAAREPRPAPAPIRRRSSNYRAYATEPHAKKKSKISASRKLQLKTLLLQIAKQELEREAEERRGEKGRALSTRCQPLELAGLGFAELQDLCRQLHARVDKVDEERYDIEAKVTKNITEIADLTQKIFDLRGKFKRPTLRRVRISADAMMQALLGARAKESLDLRAHLKQVKKEDTEKENREVGDWRKNIDALSGMEGRKKKFES

SEQ ID NO: 5262 - protein, 224 aa, Homo sapiens
MDCREMDLYEDYQSPFDFDAGVNKSYLYLSPSGNSSPPGSPTLQKFGLLRTDPVPEEGEDVAATISATETLSEEEQEELRRELAKVEEEIQTLSQVLAAKEKHLAEIKRKLGINSLQELKQNIAKGWQDVTATSAYKKTSETLSQAGQKASAAFSSVGSVITKKLEDVKNSPTFKSFEEKVENLKSKVGGTKPAGGDFGEVLNSAANASATTTEPLPEKTQESL

SEQ ID NO: 5263 - protein, 184 aa, Homo sapiens
MDRGEQGLLRTDPVPEEGEDVAATISATETLSEEEQEELRRELAKVEEEIQTLSQVLAAKEKHLAEIKRKLGINSLQELKQNIAKGWQDVTATSAYKKTSETLSQAGQKASAAFSSVGSVITKKLEDVKNSPTFKSFEEKVENLKSKVGGTKPAGGDFGEVLNSAANASATTTEPLPEKTQESL

SEQ ID NO: 5264 - protein, 248 aa, Homo sapiens
MTPRESAPGRGRAAPPRPTPLGVGTSRESPAEARRSSARRGGRSEPGRAAGGGAAEDTRRRAGDMDRGEQGLLRTDPVPEEGEDVAATISATETLSEEEQEELRRELAKVEEEIQTLSQVLAAKEKHLAEIKRKLGINSLQELKQNIAKGWQDVTATSAYKKTSETLSQAGQKASAAFSSVGSVITKKLEDVKNSPTFKSFEEKVENLKSKVGGTKPAGGDFGEVLNSAANASATTTEPLPEKTQESL

SEQ ID NO: 5265 - protein, 207 aa, Homo sapiens
MDRGEQGLLRTDPVPEEGEDVAATISATETLSEEEQEELRRELAKVEEEIQTLSQVLAAKEKHLAEIKRKLGINSLQELKQNIAKGWQDVTATSAYKKTSETLSQAGQKASAAFSSVGSVITKKLEDVKLQAFSHSFSIRSIQHSISMPAMRNSPTFKSFEEKVENLKSKVGGTKPAGGDFGEVLNSAANASATTTEPLPEKTQESL

SEQ ID NO: 5266 - protein, 238 aa, Homo sapiens
MDCREMDLYEDYQSPFDFDAGVNKSYLYLSPSGNSSPPGSPTLQKFGLLRTDPVPEEGEDVAATISATETLSEEEQEELRRELAKVEEEIQTLSQVLAAKEKHLAEIKRKLGINSLQELKQNIAKGWQDVTATSAYKKTSETLSQAGQKASAAFSSVGSVITKKLEDVNIRSIQHSISMPAMRNSPTFKSFEEKVENLKSKVGGTKPAGGDFGEVLNSAANASATTTEPLPEKTQESL

SEQ ID NO: 5267 - protein, 247 aa, Homo sapiens
MDCREMDLYEDYQSPFDFDAGVNKSYLYLSPSGNSSPPGSPTLQKFGLLRTDPVPEEGEDVAATISATETLSEEEQEELRRELAKVEEEIQTLSQVLAAKEKHLAEIKRKLGINSLQELKQNIAKGWQDVTATSAYKKTSETLSQAGQKASAAFSSVGSVITKKLEDVKLQAFSHSFSIRSIQHSISMPAMRNSPTFKSFEEKVENLKSKVGGTKPAGGDFGEVLNSAANASATTTEPLPEKTQESL

SEQ ID NO: 5268 - protein, 233 aa, Homo sapiens
MDCREMDLYEDYQSPFDFDAGVNKSYLYLSPSGNSSPPGSPTLQKFGLLRTDPVPEEGEDVAATISATETLSEEEQEELRRELAKVEEEIQTLSQVLAAKEKHLAEIKRKLGINSLQELKQNIAKGWQDVTATSAYKKTSETLSQAGQKASAAFSSVGSVITKKLEDVKLQAFSHSFRNSPTFKSFEEKVENLKSKVGGTKPAGGDFGEVLNSAANASATTTEPLPEKTQESL

SEQ ID NO: 5269 - protein, 151 aa, Homo sapiens
MDCREMDLYEDYQSPFDFDAGVNKSYLYLSPSGNSSPPGSPTLQKFGLLRTDPVPEEGEDVAATISATETLSEEEQEELRRELAKVEEEIQTLSQVLAAKEKHLAEIKRKLGINSLQELKQNIAKGWQDVTATSARSKLLAAETELLCLLY

SEQ ID NO: 5270 - protein, 453 aa, Homo sapiens
MAIFRQLSLGAKATLAAVTVFVSMIASRSYLAESLELRAWRWLLRLQLALFVNSLLLIGSLYIWRSTVSNLCHSPAAESTCFQLWKVVVLAFLALAHSSFFTMFFLVAEEPYLFSLAAYSCLGAYIIMLFFLFILSGMEQAYQLLAWRSGRVVGSLEKTRKLVLRPALAVGVTAVLSVAGILNAAQPPAVKTVEVPIHQLPASMNNLKIVLLSDIHLGPTVGRTKMEMFVRMVNVLEPDITVIVGDLSDSEASVLRTAVAPLGQLHSHLGAYFVTGNHEYYTSDVSNWFALLESLHVQPLHNENVKISATRAQRGGGGSGSGSEDEDWICLAGVDDIEADILHYSGHGMDLDKALEGCSPDHTIILLAHQPLAAKRALQARPDINLILSGHTHAGQIFPLNVAAYLLNPFFAGLYQVAQATFVYVSPGTAYYGIPMRLGSRAEITELILQRSP

SEQ ID NO: 5271 - protein, 316 aa, Homo sapiens
MEQAYQLLAWRSGRVVGSLEKTRKLVLRPALAVGVTAVLSVAGILNAAQPPAVKTVEVPIHQLPASMNNLKIVLLSDIHLGPTVGRTKMEMFVRMVNVLEPDITVIVGDLSDSEASVLRTAVAPLGQLHSHLGAYFVTGNHEYYTSDVSNWFALLESLHVQPLHNENVKISATRAQRGGGGSGSGSEDEDWICLAGVDDIEADILHYSGHGMDLDKALEGCSPDHTIILLAHQPLAAKRALQARPDINLILSGHTHAGQIFPLNVAAYLLNPFFAGLYQVAQATFVYVSPGTAYYGIPMRLGSRAEITELILQRSP

SEQ ID NO: 5272 - protein, 557 aa, Homo sapiens
MTSAAPAKKPYRKAPPEHRELRLEIPGSRLEQEEPLTDAERMKLLQEENEELRRRLASATRRTEALERELEIGQDCLELELGQSREELDKFKDKFRRLQNSYTASQRTNQELEDKLHTLASLSHSWIFAIKKAEMDRKTLDWEIVELTNKLLDAKNTINKLEELNERYRLDCNLAVQLLKCNKSHFRNHKFADLPCELQDMVRKHLHSGQEAASPGPAPSLAPGAVVPTSVIARVLEKPESLLLNSAQSGSAGRPLAEDVFVHVDMSEGVPGDPASPPAPGSPTPQPNGECHSLGTARGSPEEELPLPAFEKLNPYPTPSPPHPLYPGRRVIEFSEDKVRIPRNSPLPNCTYATRQAISLSLVEEGSERARPSPVPSTPASAQASPHHQPSPAPLTLSAPASSASSEEDLLVSWQRAFVDRTPPPAAVAQRTAFGRDALPELQRHFAHSPADRDEVVQAPSARPEESELLLPTEPDSGFPREEEELNLPISPEEERQSLLPINRGTEEGPGTSHTEGRAWPLPSSSRPQRSPKRMGVHHLHRKDSLTQAQEQGNLLN

SEQ ID NO: 5273 - protein, 547 aa, Homo sapiens
MTSAAPAKKPYRKAPPEHRELRLEIPGSRLEQEEPLTDAERMKLLQEENEELRRRLASATRRTEALERELEIGQDCLELELGQSREELDKFKDKFRRLQNSYTASQRTNQELEDKLHTLIKKAEMDRKTLDWEIVELTNKLLDAKNTINKLEELNERYRLDCNLAVQLLKCNKSHFRNHKFADLPCELQDMVRKHLHSGQEAASPGPAPSLAPGAVVPTSVIARVLEKPESLLLNSAQSGSAGRPLAEDVFVHVDMSEGVPGDPASPPAPGSPTPQPNGECHSLGTARGSPEEELPLPAFEKLNPYPTPSPPHPLYPGRRVIEFSEDKVRIPRNSPLPNCTYATRQAISLSLVEEGSERARPSPVPSTPASAQASPHHQPSPAPLTLSAPASSASSEEDLLVSWQRAFVDRTPPPAAVAQRTAFGRDALPELQRHFAHSPADRDEVVQAPSARPEESELLLPTEPDSGFPREEEELNLPISPEEERQSLLPINRGTEEGPGTSHTEGRAWPLPSSSRPQRSPKRMGVHHLHRKDSLTQAQEQGNLLN

SEQ ID NO: 5274 - protein, 43 aa, Homo sapiens
MTSAAPAKKPYRKAPPEHRELRLEIPGSRLEQEEPLTDAERMK

SEQ ID NO: 5275 - protein, 482 aa, Homo sapiens
MERELEIGQDCLELELGQSREELDKFKDKFRRLQNSYTASQRTNQELEDKLHTLIKKAEMDRKTLDWEIVELTNKLLDAKNTINKLEELNERYRLDCNLAVQLLKCNKSHFRNHKFADLPCELQDMVRKHLHSGQEAASPGPAPSLAPGAVVPTSVIARVLEKPESLLLNSAQSGSAGRPLAEDVFVHVDMSEGVPGDPASPPAPGSPTPQPNGECHSLGTARGSPEEELPLPAFEKLNPYPTPSPPHPLYPGRRVIEFSEDKVRIPRNSPLPNCTYATRQAISLSLVEEGSERARPSPVPSTPASAQASPHHQPSPAPLTLSAPASSASSEEDLLVSWQRAFVDRTPPPAAVAQRTAFGRDALPELQRHFAHSPADRDEVVQAPSARPEESELLLPTEPDSGFPREEEELNLPISPEEERQSLLPINRGTEEGPGTSHTEGRAWPLPSSSRPQRSPKRMGVHHLHRKDSLTQAQEQGNLLN

SEQ ID NO: 5276 - protein, 109 aa, Homo sapiens
MSQYAPSPDFKRALDSSPEANTEDDKTEEDVPMPKNYLWLTIVSCFCPAYPINIVALVFSIMSLNSYNDGDYEGARRLGRNAKWVAIASIIIGLLIIGISCAVHFTRNA

SEQ ID NO: 5277 - protein, 444 aa, Homo sapiens
MIEDNKENKDHSLERGRASLIFSLKNEVGGLIKALKIFQEKHVNLLHIESRKSKRRNSEFEIFVDCDINREQLNDIFHLLKSHTNVLSVNLPDNFTLKEDGMETVPWFPKKISDLDHCANRVLMYGSELDADHPGFKDNVYRKRRKYFADLAMNYKHGDPIPKVEFTEEEIKTWGTVFQELNKLYPTHACREYLKNLPLLSKYCGYREDNIPQLEDVSNFLKERTGFSIRPVAGYLSPRDFLSGLAFRVFHCTQYVRHSSDPFYTPEPDTCHELLGHVPLLAEPSFAQFSQEIGLASLGASEEAVQKLATCYFFTVEFGLCKQDGQLRVFGAGLLSSISELKHALSGHAKVKPFDPKITCKQECLITTFQDVYFVSESFEDAKEKMREFTKTIKRPFGVKYNPYTRSIQILKDTKSITSAMNELQHDLDVVSDALAKVSRKPSI

SEQ ID NO: 5278 - protein, 466 aa, Homo sapiens
MIEDNKENKDHSLERGRASLIFSLKNEVGGLIKALKIFQEKHVNLLHIESRKSKRRNSEFEIFVDCDINREQLNDIFHLLKSHTNVLSVNLPDNFTLKEDGMETVPWFPKKISDLDHCANRVLMYGSELDADHPGFKDNVYRKRRKYFADLAMNYKHGDPIPKVEFTEEEIKTWGTVFQELNKLYPTHACREYLKNLPLLSKYCGYREDNIPQLEDVSNFLKERTGFSIRPVAGYLSPRDFLSGLAFRVFHCTQYVRHSSDPFYTPEPDTCHELLGHVPLLAEPSFAQFSQEIGLASLGASEEAVQKLATCYFFTVEFGLCKQDGQLRVFGAGLLSSISELKHALSGHAKVKPFDPKITCKQECLITTFQDVYFVSESFEDAKEKMREFTKTIKRPFGVKYNPYTRSIQILKDTKSITSAMNELQHDLDVVSDALAKSLNEDVLQVSVFALLLFLPSLHGECHPDT

SEQ ID NO: 5279 - protein, 246 aa, Homo sapiens
MTLIEGVGDEVTVLFSVLACLLVLALAWVSTHTAEGGDPLPQPSGTPTPSQPSAAMAATDSMRGEAPGAETPSLRHRGQAAQPEPSTGFTATPPAPDSPQEPLVLRLKFLNDSEQVARAWPHDTIGSLKRTQFPGREQQVRLIYQGQLLGDDTQTLGSLHLPPNCVLHCHVSTRVGPPNPPCPPGSEPGPSGLEIGSLLLPLLLLLLLLLWYCQIQYRPFFPLTATLGLAGFTLLLSLLAFAMYRP

SEQ ID NO: 5280 - protein, 227 aa, Homo sapiens
MPGCRISACGPGAQEGTAEQRSPPPPWDPMPSSQPPPPTPTLTPTPTPGQSPPLPDAAGASAGAAEDQELQRWRQGASGIAGLAGPGGGSGAAAGAGGRALELAEARRRLLEVEGRRRLVSELESRVLQLHRVFLAAELRLAHRAESLSRLSGGVAQAELYLAAHGSRLKKGPRRGRRGRPPALLASALGLGGCVPWGAGRLRRGHGPEPDSPFRRSPPRGPASPQR

SEQ ID NO: 5281 - protein, 475 aa, Homo sapiens
MGEAPSPAPALWDWDYLDRCFARHRVCISFGLWICASSCWIAAHALLLYLRCAQKPRQDQSALCAACCLLTSLCDTVGALLARQLTIQVFTGAYLAAIDLVNFMFILFPVCGSKFKSNSDREARERKRRRQLRASVFALALPLSLGPCWALWVAVPKASATIRGPQRRLLASLLQENTEILGYLLGSVAAFGSWASRIPPLSRIAPPPTLGITTQHEIWRGQMSKPSQSPSRSPSGHWRAAAQRQVLGTEMCRGKTFPSIHLWTRLLSALAGLLYASAIVAHDQHPEYLLRATPWFLTSLGRAALDLAIIFLSCVMKSKMRQALGFAKEARESPDTQALLTCAEKEEENQENLDWVPLTTLSHCKSLRTMTAISRYMELTIEPVQQAGCSATRLPGDGQTSAGDASLQDPPSYPPVQVIRARVSSGSSSEVSSINSDLEWDPEDVNLEGSKENVELLGSQVHQDSVRTAHLSDDD

SEQ ID NO: 5282 - protein, 428 aa, Homo sapiens
MGEAPSPAPALWDWDYLDRCFARHRVCISFGLWICASSCWIAAHALLLYLRCAQKPRQDQSALCAACCLLTSLCDTVGALLARQLTIQVFTGAYLAAIDLVNFMFILFPVCGSKFKSNSDREARERKRRRQLRASVFALALPLSLGPCWALWVAVPKASATIRGPQRRLLASLLQENTEILGYLLGSVAAFGSWASRIPPLSRICRGKTFPSIHLWTRLLSALAGLLYASAIVAHDQHPEYLLRATPWFLTSLGRAALDLAIIFLSCVMKSKMRQALGFAKEARESPDTQALLTCAEKEEENQENLDWVPLTTLSHCKSLRTMTAISRYMELTIEPVQQAGCSATRLPGDGQTSAGDASLQDPPSYPPVQVIRARVSSGSSSEVSSINSDLEWDPEDVNLEGSKENVELLGSQVHQDSVRTAHLSDDD

SEQ ID NO: 5283 - protein, 396 aa, Homo sapiens
MGEAPSPAPALWDWDYLDRCFARHRVCISFGLWICASSCWIAAHALLLYLRCAQKPRQDQSALCAACCLLTSLCDTVGALLARQLTIQVFTGAYLAAIDLVNFMFILFPVCGSKFKSNSDREARERKRRRQLRASVFALALPLSLGPCWALWVAVPKASATIRGPQRRLLASLLQENTEILGYLLGSVAAFGSWASRIPPLSRICRGKTFPSIHLWTRLLSALAGLLYASAIVAHDQHPEYLLRATPWFLTSLGRAALDLAIIFLSCVMKSKMRQALGFAKEARESPDTQALLTCAEKEEENQENLDWVPLTTLSHCKSLRTMTAISRYMELTIEPVQQAAVPPGCQVTGRRAPEMRPCRTPRRTLPFRSSGPGCLPAAPLRSPPSTPTWSGTLKM

SEQ ID NO: 5284 - protein, 439 aa, Homo sapiens
MGEAPSPAPALWDWDYLDRCFARHRVCISFGLWICASSCWIAAHALLLYLRCAQKPRQDQSALCAACCLLTSLCDTVGALLARQLTIQVFTGAYLAAIDLVNFMFILFPVCGSKFKSNSDREARERKRRRQLRASVFALALPLSLGPCWALWVAVPKASATIRGPQRRLLASLLQENTEILGYLLGSVAAFGSWASRIPPLSRICRGKTFPSIHLWTRLLSALAGLLYASAIVAHDQHPEYLLRATPWFLTSLGRAALDLAIIFLSCVMKSKMRQALGFAKEARESPDTQALLTCAEKEEENQENLDWVPLTTLSHCKSLRTMTAISRYMELTIEPVQQAGCSATRLPGDGQTSAGDASLQDPPSYPPVQVIRARVSSGSSSEVSSINSDLEQKYWEALNSEQWDPEDVNLEGSKENVELLGSQVHQDSVRTAHLSDDD

SEQ ID NO: 5285 - protein, 438 aa, Homo sapiens
MGEAPSPAPALWDWDYLDRCFARHRVCISFGLWICASSCWIAAHALLLYLRCAQKPRQDQSALCAACCLLTSLCDTVGALLARQLTIQVFTGAYLAAIDLVNFMFILFPVCGSKFKSNSDREARERKRRRQLRASVFALALPLSLGPCWALWVAVPKASATIRGPQRRLLASLLQENTEILGYLLGSVAAFGSWASRIPPLSRICRGKTFPSIHLWTRLLSALAGLLYASAIVAHDQHPEYLLRATPWFLTSLGRAALDLAIIFLSCVMKSKMRQALGFAKEARESPDTQALLTCAEKEEENQENLDWVPLTTLSHCKSLRTMTAISRYMELTIEPVQQAGCSATRLPGDGQTSAGDASLQDPPSYPPVQVIRARVSSGSSSEVSSINSDLEKYWEALNSEQWDPEDVNLEGSKENVELLGSQVHQDSVRTAHLSDDD

SEQ ID NO: 5286 - protein, 905 aa, Homo sapiens
MEGESSRFEIHTPVSDKKKKKCSIHKERPQKHSHEIFRDSSLVNEQSQITRRKKRKKDFQHLISSPLKKSRICDETANATSTLKKRKKRRYSALEVDEEAGVTVVLVDKENINNTPKHFRKDVDVVCVDMSIEQKLPRKPKTDKFQVLAKSHAHKSEALHSKVREKKNKKHQRKAASWESQRARDTLPQSESHQEESWLSVGPGGEITELPASAHKNKSKKKKKKSSNREYETLAMPEGSQAGREAGTDMQESQPTVGLDDETPQLLGPTHKKKSKKKKKKKSNHQEFEALAMPEGSQVGSEVGADMQESRPAVGLHGETAGIPAPAYKNKSKKKKKKSNHQEFEAVAMPESLESAYPEGSQVGSEVGTVEGSTALKGFKESNSTKKKSKKRKLTSVKRARVSGDDFSVPSKNSESTLFDSVEGDGAMMEEGVKSRPRQKKTQACLASKHVQEAPRLEPANEEHNVETAEDSEIRYLSADSGDADDSDADLGSAVKQLQEFIPNIKDRATSTIKRMYRDDLERFKEFKAQGVAIKFGKFSVKENKQLEKNVEDFLALTGIESADKLLYTDRYPEEKSVITNLKRRYSFRLHIGRNIARPWKLIYYRAKKMFDVNNYKGRYSEGDTEKLKMYHSLLGNDWKTIGEMVARSSLSVALKFSQISSQRNRGAWSKSETRKLIKAVEEVILKKMSPQELKEVDSKLQENPESCLSIVREKLYKGISWVEVEAKVQTRNWMQCKSKWTEILTKRMTNGRRIYYGMNALRAKVSLIERLYEINVEDTNEIDWEDLASAIGDVPPSYVQTKFSRLKAVYVPFWQKKTFPEIIDYLYETTLPLLKEKLEKMMEKKGTKIQTPAAPKQVFPFRDIFYYEDDSEGEDIEKESEGQAPCMAHACNSSTLGGQGRWII

SEQ ID NO: 5287 - protein, 2022 aa, Homo sapiens
MKEQPVLERLQSQKSWIKGVFDKRECSTIIPSSKNPHRCTPVCQVCQNLIRCYCGRLIGDHAGIDYSWTISAAKGKESEQWSVEKHTTKSPTDTFGTINFQDGEHTHHAKYIRTSYDTKLDHLLHLMLKEWKMELPKLVISVHGGIQNFTMPSKFKEIFSQGLVKAAETTGAWIITEGINTGVSKHVGDALKSHSSHSLRKIWTVGIPPWGVIENQRDLIGKDVVCLYQTLDNPLSKLTTLNSMHSHFILSDDGTVGKYGNEMKLRRNLEKYLSLQKIHCRSRQGVPVVGLVVEGGPNVILSVWETVKDKDPVVVCEGTGRAADLLAFTHKHLADEGMLRPQVKEEIICMIQNTFNFSLKQSKHLFQILMECMVHRDCITIFDADSEEQQDLDLAILTALLKGTNLSASEQLNLAMAWDRVDIAKKHILIYEQHWKPDALEQAMSDALVMDRVDFVKLLIEYGVNLHRFLTIPRLEELYNTKQGPTNTLLHHLVQDVKQHTLLSGYRITLIDIGLVVEYLIGRAYRSNYTRKHFRALYNNLYRKYKHQRHSSGNRNESAESTLHSQFIRTAQPYKFKEKSIVLHKSRKKSKEQNVSDDPESTGFLYPYNDLLVWAVLMKRQKMAMFFWQHGEEATVKAVIACILYRAMAHEAKESHMVDDASEELKNYSKQFGQLALDLLEKAFKQNERMAMTLLTYELRNWSNSTCLKLAVSGGLRPFVSHTCTQMLLTDMWMGRLKMRKNSWLKIIISIILPPTILTLEFKSKAEMSHVPQSQDFQFMWYYSDQNASSSKESASVKEYDLERGHDEKLDENQHFGLESGHQHLPWTRKVYEFYSAPIVKFWFYTMAYLAFLMLFTYTVLVEMQPQPSVQEWLVSIYIFTNAIEVVREICISEPGKFTQKVKVWISEYWNLTETVAIGLFSAGFVLRWGDPPFHTAGRLIYCIDIIFWFSRLLDFFAVNQHAGPYVTMIAKMTANMFYIVIIMAIVLLSFGVARKAILSPKEPPSWSLARDIVFEPYWMIYGEVYAGEIDVCSSQPSCPPGSFLTPFLQAVYLFVQYIIMVNLLIAFFNNVYLDMESISNNLWKYNRYRYIMTYHEKPWLPPPLILLSHVGLLLRRLCCHRAPHDQEEGDVGLKLYLSKEDLKKLHDFEEQCVEKYFHEKMEDVNCSCEERIRVTSERVTEMYFQLKEMNEKVSFIKDSLLSLDSQVGHLQDLSALTVDTLKVLSAVDTLQEDEALLAKRKHSTCKKLPHSWSNVICAEVLGSMEIAGEKKYQYYSMPSSLLRSLAGGRHPPRVQRGALLEITNSKREATNVRNDQERQETQSSIVVSGVSPNRQAHSKYGQFLLVPSNLKRVPFSAETVLPLSRPSVPDVLATEQDIQTEVLVHLTGQTPVVSDWASVDEPKEKHEPIAHLLDGQDKAEQVLPTLSCTPEPMTMSSPLSQAKIMQTGGGYVNWAFSEGDETGVFSIKKKWQTCLPSTCDSDSSRSEQHQKQAQDSSLSDNSTRSAQSSECSEVGPWLQPNTSFWINPLRRYRPFARSHSFRFHKEEKLMKICKIKNLSGSSEIGQGAWVKAKMLTKDRRLSKKKKNTQGLQVPIITVNACSQSDQLNPEPGENSISEEEYSKNWFTVSKFSHTGVEPYIHQKMKTKEIGQCAIQISDYLKQSQEDLSKNSLWNSRSTNLNRNSLLKSSIGVDKISASLKSPQEPHHHYSAIERNNLMRLSQTIPFTPVQLFAGEEITVYRLEESSPLNLDKSMSSWSQRGRAAMIQVLSREEMDGGLRKAMRVVSTWSEDDILKPGQVFIVKSFLPEVVRTWHKIFQESTVLHLCLREIQQQRAAQKLIYTFNQVKPQTIPYTPRFLEVFLIYCHSANQWLTIEKYMTGEFRKYNNNNGDEITPTNTLEELMLAFSHWTYEYTRGELLVLDLQGVGENLTDPSVIKPEVKQSRGMVFGPANLGEDAIRNFIAKHHCNSCCRKLKLPDLKRNDYSPERINSTFGLEIKIESAEEPPARETGRNSPEDDMQL

SEQ ID NO: 5288 - protein, 2017 aa, Homo sapiens
MIILSKSQKSWIKGVFDKRECSTIIPSSKNPHRCTPVCQVCQNLIRCYCGRLIGDHAGIDYSWTISAAKGKESEQWSVEKHTTKSPTDTFGTINFQDGEHTHHAKYIRTSYDTKLDHLLHLMLKEWKMELPKLVISVHGGIQNFTMPSKFKEIFSQGLVKAAETTGAWIITEGINTGVSKHVGDALKSHSSHSLRKIWTVGIPPWGVIENQRDLIGKDVVCLYQTLDNPLSKLTTLNSMHSHFILSDDGTVGKYGNEMKLRRNLEKYLSLQKIHCRSRQGVPVVGLVVEGGPNVILSVWETVKDKDPVVVCEGTGRAADLLAFTHKHLADEGMLRPQVKEEIICMIQNTFNFSLKQSKHLFQILMECMVHRDCITIFDADSEEQQDLDLAILTALLKGTNLSASEQLNLAMAWDRVDIAKKHILIYEQHWKPDALEQAMSDALVMDRVDFVKLLIEYGVNLHRFLTIPRLEELYNTKQGPTNTLLHHLVQDVKQHTLLSGYRITLIDIGLVVEYLIGRAYRSNYTRKHFRALYNNLYRKYKHQRHSSGNRNESAESTLHSQFIRTAQPYKFKEKSIVLHKSRKKSKEQNVSDDPESTGFLYPYNDLLVWAVLMKRQKMAMFFWQHGEEATVKAVIACILYRAMAHEAKESHMVDDASEELKNYSKQFGQLALDLLEKAFKQNERMAMTLLTYELRNWSNSTCLKLAVSGGLRPFVSHTCTQMLLTDMWMGRLKMRKNSWLKIIISIILPPTILTLEFKSKAEMSHVPQSQDFQFMWYYSDQNASSSKESASVKEYDLERGHDEKLDENQHFGLESGHQHLPWTRKVYEFYSAPIVKFWFYTMAYLAFLMLFTYTVLVEMQPQPSVQEWLVSIYIFTNAIEVVREICISEPGKFTQKVKVWISEYWNLTETVAIGLFSAGFVLRWGDPPFHTAGRLIYCIDIIFWFSRLLDFFAVNQHAGPYVTMIAKMTANMFYIVIIMAIVLLSFGVARKAILSPKEPPSWSLARDIVFEPYWMIYGEVYAGEIDVCSSQPSCPPGSFLTPFLQAVYLFVQYIIMVNLLIAFFNNVYLDMESISNNLWKYNRYRYIMTYHEKPWLPPPLILLSHVGLLLRRLCCHRAPHDQEEGDVGLKLYLSKEDLKKLHDFEEQCVEKYFHEKMEDVNCSCEERIRVTSERVTEMYFQLKEMNEKVSFIKDSLLSLDSQVGHLQDLSALTVDTLKVLSAVDTLQEDEALLAKRKHSTCKKLPHSWSNVICAEVLGSMEIAGEKKYQYYSMPSSLLRSLAGGRHPPRVQRGALLEITNSKREATNVRNDQERQETQSSIVVSGVSPNRQAHSKYGQFLLVPSNLKRVPFSAETVLPLSRPSVPDVLATEQDIQTEVLVHLTGQTPVVSDWASVDEPKEKHEPIAHLLDGQDKAEQVLPTLSCTPEPMTMSSPLSQAKIMQTGGGYVNWAFSEGDETGVFSIKKKWQTCLPSTCDSDSSRSEQHQKQAQDSSLSDNSTRSAQSSECSEVGPWLQPNTSFWINPLRRYRPFARSHSFRFHKEEKLMKICKIKNLSGSSEIGQGAWVKAKMLTKDRRLSKKKKNTQGLQVPIITVNACSQSDQLNPEPGENSISEEEYSKNWFTVSKFSHTGVEPYIHQKMKTKEIGQCAIQISDYLKQSQEDLSKNSLWNSRSTNLNRNSLLKSSIGVDKISASLKSPQEPHHHYSAIERNNLMRLSQTIPFTPVQLFAGEEITVYRLEESSPLNLDKSMSSWSQRGRAAMIQVLSREEMDGGLRKAMRVVSTWSEDDILKPGQVFIVKSFLPEVVRTWHKIFQESTVLHLCLREIQQQRAAQKLIYTFNQVKPQTIPYTPRFLEVFLIYCHSANQWLTIEKYMTGEFRKYNNNNGDEITPTNTLEELMLAFSHWTYEYTRGELLVLDLQGVGENLTDPSVIKPEVKQSRGMVFGPANLGEDAIRNFIAKHHCNSCCRKLKLPDLKRNDYSPERINSTFGLEIKIESAEEPPARETGRNSPEDDMQL

SEQ ID NO: 5289 - protein, 2017 aa, Homo sapiens
MTAPVTSQKSWIKGVFDKRECSTIIPSSKNPHRCTPVCQVCQNLIRCYCGRLIGDHAGIDYSWTISAAKGKESEQWSVEKHTTKSPTDTFGTINFQDGEHTHHAKYIRTSYDTKLDHLLHLMLKEWKMELPKLVISVHGGIQNFTMPSKFKEIFSQGLVKAAETTGAWIITEGINTGVSKHVGDALKSHSSHSLRKIWTVGIPPWGVIENQRDLIGKDVVCLYQTLDNPLSKLTTLNSMHSHFILSDDGTVGKYGNEMKLRRNLEKYLSLQKIHCRSRQGVPVVGLVVEGGPNVILSVWETVKDKDPVVVCEGTGRAADLLAFTHKHLADEGMLRPQVKEEIICMIQNTFNFSLKQSKHLFQILMECMVHRDCITIFDADSEEQQDLDLAILTALLKGTNLSASEQLNLAMAWDRVDIAKKHILIYEQHWKPDALEQAMSDALVMDRVDFVKLLIEYGVNLHRFLTIPRLEELYNTKQGPTNTLLHHLVQDVKQHTLLSGYRITLIDIGLVVEYLIGRAYRSNYTRKHFRALYNNLYRKYKHQRHSSGNRNESAESTLHSQFIRTAQPYKFKEKSIVLHKSRKKSKEQNVSDDPESTGFLYPYNDLLVWAVLMKRQKMAMFFWQHGEEATVKAVIACILYRAMAHEAKESHMVDDASEELKNYSKQFGQLALDLLEKAFKQNERMAMTLLTYELRNWSNSTCLKLAVSGGLRPFVSHTCTQMLLTDMWMGRLKMRKNSWLKIIISIILPPTILTLEFKSKAEMSHVPQSQDFQFMWYYSDQNASSSKESASVKEYDLERGHDEKLDENQHFGLESGHQHLPWTRKVYEFYSAPIVKFWFYTMAYLAFLMLFTYTVLVEMQPQPSVQEWLVSIYIFTNAIEVVREICISEPGKFTQKVKVWISEYWNLTETVAIGLFSAGFVLRWGDPPFHTAGRLIYCIDIIFWFSRLLDFFAVNQHAGPYVTMIAKMTANMFYIVIIMAIVLLSFGVARKAILSPKEPPSWSLARDIVFEPYWMIYGEVYAGEIDVCSSQPSCPPGSFLTPFLQAVYLFVQYIIMVNLLIAFFNNVYLDMESISNNLWKYNRYRYIMTYHEKPWLPPPLILLSHVGLLLRRLCCHRAPHDQEEGDVGLKLYLSKEDLKKLHDFEEQCVEKYFHEKMEDVNCSCEERIRVTSERVTEMYFQLKEMNEKVSFIKDSLLSLDSQVGHLQDLSALTVDTLKVLSAVDTLQEDEALLAKRKHSTCKKLPHSWSNVICAEVLGSMEIAGEKKYQYYSMPSSLLRSLAGGRHPPRVQRGALLEITNSKREATNVRNDQERQETQSSIVVSGVSPNRQAHSKYGQFLLVPSNLKRVPFSAETVLPLSRPSVPDVLATEQDIQTEVLVHLTGQTPVVSDWASVDEPKEKHEPIAHLLDGQDKAEQVLPTLSCTPEPMTMSSPLSQAKIMQTGGGYVNWAFSEGDETGVFSIKKKWQTCLPSTCDSDSSRSEQHQKQAQDSSLSDNSTRSAQSSECSEVGPWLQPNTSFWINPLRRYRPFARSHSFRFHKEEKLMKICKIKNLSGSSEIGQGAWVKAKMLTKDRRLSKKKKNTQGLQVPIITVNACSQSDQLNPEPGENSISEEEYSKNWFTVSKFSHTGVEPYIHQKMKTKEIGQCAIQISDYLKQSQEDLSKNSLWNSRSTNLNRNSLLKSSIGVDKISASLKSPQEPHHHYSAIERNNLMRLSQTIPFTPVQLFAGEEITVYRLEESSPLNLDKSMSSWSQRGRAAMIQVLSREEMDGGLRKAMRVVSTWSEDDILKPGQVFIVKSFLPEVVRTWHKIFQESTVLHLCLREIQQQRAAQKLIYTFNQVKPQTIPYTPRFLEVFLIYCHSANQWLTIEKYMTGEFRKYNNNNGDEITPTNTLEELMLAFSHWTYEYTRGELLVLDLQGVGENLTDPSVIKPEVKQSRGMVFGPANLGEDAIRNFIAKHHCNSCCRKLKLPDLKRNDYSPERINSTFGLEIKIESAEEPPARETGRNSPEDDMQL

SEQ ID NO: 5290 - protein, 1943 aa, Homo sapiens
MKEQPVLERLQSQKSWIKGVFDKRECSTIIPSSKNPHRCTPVCQVCQNLIRCYCGRLIGDHAGIDYSWTISAAKGKESEQWSVEKHTTKSPTDTFGTINFQDGEHTHHAKYIRTSYDTKLDHLLHLMLKEWKMELPKLVISVHGGIQNFTMPSKFKEIFSQGLVKAAETTGAWIITEGINTGVSKHVGDALKSHSSHSLRKIWTVGIPPWGVIENQRDLIGKDVVCLYQTLDNPLSKLTTLNSMHSHFILSDDGTVGKYGNEMKLRRNLEKYLSLQKIHCRSRQGVPVVGLVVEGGPNVILSVWETVKDKDPVVVCEGTGRAADLLAFTHKHLADEGMLRPQVKEEIICMIQNTFNFSLKQSKHLFQILMECMVHRDCITIFDADSEEQQDLDLAILTALLKGTNLSASEQLNLAMAWDRVDIAKKHILIYEQHWKPDALEQAMSDALVMDRVDFVKLLIEYGVNLHRFLTIPRLEELYNTKQGPTNTLLHHLVQDVKQHTLLSGYRITLIDIGLVVEYLIGRAYRSNYTRKHFRALYNNLYRKYKHQRHSSGNRNESAESTLHSQFIRTAQPYKFKEKSIVLHKSRKKSKEQNVSDDPESTGFLYPYNDLLVWAVLMKRQKMAMFFWQHGEEATVKAVIACILYRAMAHEAKESHMVDDASEELKNYSKQFGQLALDLLEKAFKQNERMAMTLLTYELRNWSNSTCLKLAVSGGLRPFVSHTCTQMLLTDMWMGRLKMRKNSWLKIIISIILPPTILTLEFKSKAEMSHVPQSQDFQFMWYYSDQNASSSKESASVKEYDLERGHDEKLDENQHFGLESGHQHLPWTRKVYEFYSAPIVKFWFYTMAYLAFLMLFTYTVLVEMQPQPSVQEWLVSIYIFTNAIEVVREICISEPGKFTQKVKVWISEYWNLTETVAIGLFSAGFVLRWGDPPFHTAGRLIYCIDIIFWFSRLLDFFAVNQHAGPYVTMIAKMTANMFYIVIIMAIVLLSFGVARKAILSPKEPPSWSLARDIVFEPYWMIYGEVYAGEIDVCSSQPSCPPGSFLTPFLQAVYLFVQYIIMVNLLIAFFNNVYLDMESISNNLWKYNRYRYIMTYHEKPWLPPPLILLSHVGLLLRRLCCHRAPHDQEEGDVGLKLYLSKEDLKKLHDFEEQCVEKYFHEKMEDVNCSCEERIRVTSERVTEMYFQLKEMNEKVSFIKDSLLSLDSQVGHLQDLSALTVDTLKVLSAVDTLQEDEALLAKRKHSTCKKLPHSWSNVICAEVLGSMEIAGEKKYQYYSMPSSLLRSLAGGRHPPRVQRGALLEITNSKREATNVRNDQERQETQSSIVVSGVSPNRQAHSKYGQFLLVPSNLKRVPFSAETVLPLSRPSVPDVLATEQDIQTEVLVHLTGQTPVVSDWASVDEPKEKHEPIAHLLDGQDKAEQVLPTLSCTPEPMTMSSPLSQAKIMQTGGGYVNWAFSEGDETGVFSIKKKWQTCLPSTCDSDSSRSEQHQKQAQDSSLSDNSTRSAQSSECSEVGPWLQPNTSFWINPLRRYRPFARSHSFRFHKEEKLMKICKIKNLSGSSEIGQGAWVKAKMLTKDRRLSKKKKNTQGLQVPIITVNACSQSDQLNPEPGENSISEEEYSKNWFTVSKFSHTGVEPYIHQKMKTKEIGQCAIQISDYLKQSQEDLSKNSLWNSRSTNLNRNSLLKSSIGVDKISASLKSPQEPHHHYSAIERNNLMRLSQTIPFTPVQLFAGEEITVYRLEESSPLNLDKSMSSWSQRGRAAMIQVLSREEMDGGLRKAMRVVSTWSEDDILKPGQVFIVKSFLPEVVRTWHKIFQESTVLHLCLREIQQQRAAQKLIYTFNQVKPQTIPYTPRFLEVFLIYCHSANQWLTIEKYMTGEFRKYNNNNGDEITPTNTLEELMLAFSHWTYEYTRGELLVLDLQALWFWDSMLKARLGGWRM

SEQ ID NO: 5291 - protein, 973 aa, Homo sapiens
MKEQPVLERLQSQKSWIKGVFDKRECSTIIPSSKNPHRCTPVCQVCQNLIRCYCGRLIGDHAGIDYSWTISAAKGKESEQWSVEKHTTKSPTDTFGTINFQDGEHTHHAKYIRTSYDTKLDHLLHLMLKEWKMELPKLVISVHGGIQNFTMPSKFKEIFSQGLVKAAETTGAWIITEGINTGVSKHVGDALKSHSSHSLRKIWTVGIPPWGVIENQRDLIGKDVVCLYQTLDNPLSKLTTLNSMHSHFILSDDGTVGKYGNEMKLRRNLEKYLSLQKIHCRSRQGVPVVGLVVEGGPNVILSVWETVKDKDPVVVCEGTGRAADLLAFTHKHLADEGMLRPQVKEEIICMIQNTFNFSLKQSKHLFQILMECMVHRDCITIFDADSEEQQDLDLAILTALLKGTNLSASEQLNLAMAWDRVDIAKKHILIYEQHWKPDALEQAMSDALVMDRVDFVKLLIEYGVNLHRFLTIPRLEELYNTKQGPTNTLLHHLVQDVKQHTLLSGYRITLIDIGLVVEYLIGRAYRSNYTRKHFRALYNNLYRKYKIITVNACSQSDQLNPEPGENSISEEEYSKNWFTVSKFSHTGVEPYIHQKMKTKEIGQCAIQISDYLKQSQEDLSKNSLWNSRSTNLNRNSLLKSSIGVDKISASLKSPQEPHHHYSAIERNNLMRLSQTIPFTPVQLFAGEEITVYRLEESSPLNLDKSMSSWSQRGRAAMIQVLSREEMDGGLRKAMRVVSTWSEDDILKPGQVFIVKSFLPEVVRTWHKIFQESTVLHLCLREIQQQRAAQKLIYTFNQVKPQTIPYTPRFLEVFLIYCHSANQWLTIEKYMTGEFRKYNNNNGDEITPTNTLEELMLAFSHWTYEYTRGELLVLDLQGVGENLTDPSVIKPEVKQSRGMVFGPANLGEDAIRNFIAKHHCNSCCRKLKLPDLKRNDYSPERINSTFGLEIKIESAEEPPARETGRNSPEDDMQL

SEQ ID NO: 5292 - protein, 855 aa, Homo sapiens
MKEQPVLERLQSQKSWIKGVFDKRECSTIIPSSKNPHRCTPVCQVCQNLIRCYCGRLIGDHAGIDYSWTISAAKGKESEQWSVEKHTTKSPTDTFGTINFQDGEHTHHAKYIRTSYDTKLDHLLHLMLKEWKMELPKLVISVHGGIQNFTMPSKFKEIFSQGLVKAAETTGAWIITEGINTGVSKHVGDALKSHSSHSLRKIWTVGIPPWGVIENQRDLIGKDVVCLYQTLDNPLSKLTTLNSMHSHFILSDDGTVGKYGNEMKLRRNLEKYLSLQKIHCRSRQGVPVVGLVVEGGPNVILSVWETVKDKDPVVVCEGTGRAADLLAFTHKHLADEGMLRPQVKEEIICMIQNTFNFSLKQSKHLFQILMECMVHRDCITIFDADSEEQQDLDLAILTALLKGTNLSASEQLNLAMAWDRVDIAKKHILIYEQHWKPDALEQAMSDALVMDRVDFVKLLIEYGVNLHRFLTIPRLEELYNTKQGPTNTLLHHLVQDVKQDLSKNSLWNSRSTNLNRNSLLKSSIGVDKISASLKSPQEPHHHYSAIERNNLMRLSQTIPFTPVQLFAGEEITVYRLEESSPLNLDKSMSSWSQRGRAAMIQVLSREEMDGGLRKAMRVVSTWSEDDILKPGQVFIVKSFLPEVVRTWHKIFQESTVLHLCLREIQQQRAAQKLIYTFNQVKPQTIPYTPRFLEVFLIYCHSANQWLTIEKYMTGEFRKYNNNNGDEITPTNTLEELMLAFSHWTYEYTRGELLVLDLQGVGENLTDPSVIKPEVKQSRGMVFGPANLGEDAIRNFIAKHHCNSCCRKLKLPDLKRNDYSPERINSTFGLEIKIESAEEPPARETGRNSPEDDMQL

SEQ ID NO: 5293 - protein, 569 aa, Homo sapiens
MKEQPVLERLQSQKSWIKGVFDKRECSTIIPSSKNPHRCTPVCQVCQNLIRCYCGRLIGDHAGIDYSWTISAAKGKESEQWSVEKHTTKSPTDTFGTINFQDGEHTHHAKYIRTSYDTKLDHLLHLMLKEWKMELPKLVISVHGGIQNFTMPSKFKEIFSQGLVKAAETTGAWIITEGINTGVSKHVGDALKSHSSHSLRKIWTVGIPPWGVIENQRDLIGKDVVCLYQTLDNPLSKLTTLNSMHSHFILSDDGTVGKYGNEMKLRRNLEKYLSLQKIHCPGEEITVYRLEESSPLNLDKSMSSWSQRGRAAMIQVLSREEMDGGLRKAMRVVSTWSEDDILKPGQVFIVKSFLPEVVRTWHKIFQESTVLHLCLREIQQQRAAQKLIYTFNQVKPQTIPYTPRFLEVFLIYCHSANQWLTIEKYMTGEFRKYNNNNGDEITPTNTLEELMLAFSHWTYEYTRGELLVLDLQGVGENLTDPSVIKPEVKQSRGMVFGPANLGEDAIRNFIAKHHCNSCCRKLKLPDLKRNDYSPERINSTFGLEIKIESAEEPPARETGRNSPEDDMQL

SEQ ID NO: 5294 - protein, 151 aa, Homo sapiens
MEGQRQESHATLTLAQAHFNNGEYAEAEALYSAYIRRCACAASSDESPGSKCSPEDLATAYNNRGQIKYFRVDFYEAMDDYTSAIEVQPNFEVPYYNRGLILYRLGYFDDALEDFKKVLDLNPGFQDATLSLKQTILDKEEKQRRNVAKNY

SEQ ID NO: 5295 - protein, 931 aa, Homo sapiens
MAEVEAVQLKEEGNRHFQLQDYKAATNSYSQALKLTKDKALLATLYRNRAACGLKTESYVQAASDASRAIDINSSDIKALYRRCQALEHLGKLDQAFKDVQRCATLEPRNQNFQEMLRRLNTSIQEKLRVQFSTDSRVQKMFEILLDENSEADKREKAANNLIVLGREEAGAEKIFQNNGVALLLQLLDTKKPELVLAAVRTLSGMCSGHQARATVILHAVRIDRICSLMAVENEEMSLAVCNLLQAIIDSLSGEDKREHRGKEEALVLDTKKDLKQITSHLLDMLVSKKVSGQGRDQALNLLNKNVPRKDLAIHDNSRTIYVVDNGLRKILKVVGQVPDLPSCLPLTDNTRMLASILINKLYDDLRCDPERDHFRKICEEYITGKFDPQDMDKNLNAIQTVSGILQGPFDLGNQLLGLKGVMEMMVALCGSERETDQLVAVEALIHASTKLSRATFIITNGVSLLKQIYKTTKNEKIKIRTLVGLCKLGSAGGTDYGLRQFAEGSTEKLAKQCRKWLCNMSIDTRTRRWAVEGLAYLTLDADVKDDFVQDVPALQAMFELAKAGTSDKTILYSVATTLVNCTNSYDVKEVIPELVQLAKFSKQHVPEEHPKDKKDFIDMRVKRLLKAGVISALACMVKADSAILTDQTKELLARVFLALCDNPKDRGTIVAQGGGKALIPLALEGTDVGKVKAAHALAKIAAVSNPDIAFPGERVYEVVRPLVRLLDTQRDGLQNYEALLGLTNLSGRSDKLRQKIFKERALPDIENYMFENHDQLRQAATECMCNMVLHKEVQERFLADGNDRLKLVVLLCGEDDDKVQNAAAGALAMLTAAHKKLCLKMTQVTTQWLEILQRLCLHDQLSVQHRGLVIAYNLLAADAELAKKLVESELLEILTVVGKQEPDEKKAEVVQTARECLIKCMDYGFIKPVS

SEQ ID NO: 5296 - protein, 850 aa, Homo sapiens
MAEVEAVQLKEEGNRHFQLQDYKAATNSYSQALKLTKDKALLATLYRNRAACGLKTESYVQAASDASRAIDINSSDIKALYRRCQALEHLGKLDQAFKDVQRCATLEPRNQNFQEMLRRLNTSIQEKLRVQFSTDSRVQKMFEILLDENSEADKREKAANNLIVLGREEAGAEKIFQNNGVALLLQLLDTKKPELVLAAVRTLSGMCSGHQARATVILHAVRIDRICSLMAVENEEMSLAVCNLLQAIIDSLSGEDKREHRGKEEALVLDTKKDLKQITSHLLDMLVSKKVSGQGRDQALNLLNKNVPRKDLAIHDNSRTIYVVDNGLRKILKVVGQVPDLPSCLPLTDNTRMLASILINKLYDDLRCDPERDHFRKICEEYITGKFDPQDMDKNLNAIQTVSGILQGPFDLGNQLLGLKGVMEMMVALCGSERETDQLVAVEALIHASTKLSRATFIITNGVSLLKQIYKTTKNEKIKIRTLVTSDKTILYSVATTLVNCTNSYDVKEVIPELVQLAKFSKQHVPEEHPKDKKDFIDMRVKRLLKAGVISALACMVKADSAILTDQTKELLARVFLALCDNPKDRGTIVAQGGGKALIPLALEGTDVGKVKAAHALAKIAAVSNPDIAFPGERVYEVVRPLVRLLDTQRDGLQNYEALLGLTNLSGRSDKLRQKIFKERALPDIENYMFENHDQLRQAATECMCNMVLHKEVQERFLADGNDRLKLVVLLCGEDDDKVQNAAAGALAMLTAAHKKLCLKMTQVTTQWLEILQRLCLHDQLSVQHRGLVIAYNLLAADAELAKKLVESELLEILTVVGKQEPDEKKAEVVQTARECLIKCMDYGFIKPVS

SEQ ID NO: 5297 - protein, 929 aa, Homo sapiens
MAEVEAVQLKEEGNRHFQLQDYKAATNSYSQALKLTKDKALLATLYRNRAACGLKTESYVQAASDASRAIDINSSDIKALYRRCQALEHLGKLDQAFKDVQRCATLEPRNQNFQEMLRRLNTSIQEKLRVQFSTDSRVQKMFEILLDENSEADKREKAANNLIVLGREEAGAEKIFQNNGVALLLQLLDTKKPELVLAAVRTLSGMCSGHQARATVILHAVRIDRICSLMAVENEEMSLAVCNLLQAIIDSLSGEDKREHRGKEEALVLDTKKDLKQITSHLLDMLVSKKVSGQGRDQALNLLNKNVPRKDLAIHDNSRTIYVVDNGLRKILKVVGQVPDLPSCLPLTDNTRMLASILINKLYDDLRCDPERDHFRKICEEYITGKFDPQDMDKNLNAIQTVSGILQGPFDLGNQLLGLKGVMEMMVALCGSERETDQLVAVEALIHASTKLSRATFIITNGVSLLKQIYKTTKNEKIKIRTLVGLCKLGSAGGTDYGLRQFAEGSTEKLAKQCRKWLCNMSIDTRTRRWAVEGLAYLTLDADVKDDFVQDVPALQAMFELAKTSDKTILYSVATTLVNCTNSYDVKEVIPELVQLAKFSKQHVPEEHPKDKKDFIDMRVKRLLKAGVISALACMVKADSAILTDQTKELLARVFLALCDNPKDRGTIVAQGGGKALIPLALEGTDVGKVKAAHALAKIAAVSNPDIAFPGERVYEVVRPLVRLLDTQRDGLQNYEALLGLTNLSGRSDKLRQKIFKERALPDIENYMFENHDQLRQAATECMCNMVLHKEVQERFLADGNDRLKLVVLLCGEDDDKVQNAAAGALAMLTAAHKKLCLKMTQVTTQWLEILQRLCLHDQLSVQHRGLVIAYNLLAADAELAKKLVESELLEILTVVGKQEPDEKKAEVVQTARECLIKCMDYGFIKPVS

SEQ ID NO: 5298 - protein, 283 aa, Homo sapiens
MQQIYTVKEIRSVAARSGPFAPVLSATSRGVAGALRPLVQATVPATPEQPVLDLKRPFLSRESLSGQAVRRPLVASVGLNVPASVCYSHTDIKVPDFSEYRRLEVLDSTKSSRESTEARKGFSYLVTGVTTVGVAYAAKNAVTQFVSSMSASADVLALAKIEIKLSDIPEGKNMAFKWRGKPLFVRHRTQKEIKQEAAVELSQLRDPQHDLDRVKKPEWVILIGVCTHLGCVPIANAGDFGGYYCPCHGSHYDASGRIRLGPATLNLEVPTYEFTSDDMVIVG

SEQ ID NO: 5299 - protein, 312 aa, Homo sapiens
MVGLKPSDVPPTMAVKFLGAGTAACFADLVTFPLDTAKVRLQIQGENQAVQTARLVQYRGVLGTILTMVRTEGPCSPYNGLVAGLQRQMSFASIRIGLYDSVKQVYTPKGADNSSLTTRILAGCTTGAMAVTCAQPTDVVKVRFQASIHLGPSRSDRKYSGTMDAYRTIAREEGVRGLWKGTLPNIMRNAIVNCAEVVTYDILKEKLLDYHLLTDNFPCHFVSAFGAGFCATVVASPVDVVKTRYMNSPPGQYFSPLDCMIKMVAQEGPTAFYKGFTPSFLRLGSWNVVMFVTYEQLKRALMKVQMLRESPF

SEQ ID NO: 5300 - protein, 275 aa, Homo sapiens
MVGLKPSDVPPTMAVKFLGAGTAACFADLVTFPLDTAKVRLQIQGENQAVQTARLVQYRGVLGTILTMVRTEGPCSPYNGLVAGLQRQMSFASIRIGLYDSVKQVYTPKGADNSSLTTRILAGCTTGAMAVTCAQPTDVVKVRFQASIHLGPSRSDRKYSGTMDAYRTIAREEGVRGLWKGTLPNIMRNAIVNCAEVVTYDILKEKLLDYHLLTDNFPCHFVSAFGAGFCATVVASPVDVVKTRYMNSPPGQYFSPLDCMIKMVAQEGPTAFYKG

SEQ ID NO: 5301 - protein, 209 aa, Homo sapiens
MVGLKPSDVPPTMAVKFLGAGTAACFADLVTFPLDTAKVRLQIQGENQAVQTARLVQYRGVLGTILTMVRTEGPCSPYNGLVAGLQRQMSFASIRIGLYDSVKQVYTPKGADNFPCHFVSAFGAGFCATVVASPVDVVKTRYMNSPPGQYFSPLDCMIKMVAQEGPTAFYKGFTPSFLRLGSWNVVMFVTYEQLKRALMKVQMLRESPF

SEQ ID NO: 5302 - protein, 530 aa, Homo sapiens
MEDDSLYLGGEWQFNHFSKLTSSRPDAAFAEIQRTSLPEKSPLSCETRVDLCDDLAPVARQLAPREKLPLSSRRPAAVGAGLQNMGNTCYVNASLQCLTYTPPLANYMLSREHSQTCHRHKGCMLCTMQAHITRALHNPGHVIQPSQALAAGFHRGKQEDAHEFLMFTVDAMKKACLPGHKQVDHHSKDTTLIHQIFGGYWRSQIKCLHCHGISDTFDPYLDIALDIQAAQSVQQALEQLVKPEELNGENAYHCGVCLQRAPASKTLTLHTSAKVLILVLKRFSDVTGNKIAKNVQYPECLDMQPYMSQQNTGPLVYVLYAVLVHAGWSCHNGHYFSYVKAQEGQWYKMDDAEVTAASITSVLSQQAYVLFYIQKSEWERHSESVSRGREPRALGAEDTDRRATQGELKRDHPCLQAPELDEHLVERATQESTLDHWKFLQEQNKTKPEFNVRKVEGTLPPDVLVIHQSKYKCGMKNHHPEQQSSLLNLSSSTPTHQESMNTGTLASLRGRARRSKGKNKHSKRALLVCQ

SEQ ID NO: 5303 - protein, 1055 aa, Homo sapiens
MTVEQNVLQQSAAQKHQQTFLNQLREITGINDTQILQQALKDSNGNLELAVAFLTAKNAKTPQQEETTYYQTALPGNDRYISVGSQADTNVIDLTGDDKDDLQRAIALSLAESNRAFRETGITDEEQAISRVLEASIAENKACLKRTPTEVWRDSRNPYDRKRQDKAPVGLKNVGNTCWFSAVIQSLFNLLEFRRLVLNYKPPSNAQDLPRNQKEHRNLPFMRELRYLFALLVGTKRKYVDPSRAVEILKDAFKSNDSQQQDVSEFTHKLLDWLEDAFQMKAEEETDEEKPKNPMVELFYGRFLAVGVLEGKKFENTEMFGQYPLQVNGFKDLHECLEAAMIEGEIESLHSENSGKSGQEHWFTELPPVLTFELSRFEFNQALGRPEKIHNKLEFPQVLYLDRYMHRNREITRIKREEIKRLKDYLTVLQQRLERYLSYGSGPKRFPLVDVLQYALEFASSKPVCTSPVDDIDASSPPSGSIPSQTLPSTTEQQGALSSELPSTSPSSVAAISSRSVIHKPFTQSRIPPDLPMHPAPRHITEEELSVLESCLHRWRTEIENDTRDLQESISRIHRTIELMYSDKSMIQVPYRLHAVLVHEGQANAGHYWAYIFDHRESRWMKYNDIAVTKSSWEELVRDSFGGYRNASAYCLMYINDKAQFLIQEEFNKETGQPLVGIETLPPDLRDFVEEDNQRFEKELEEWDAQLAQKALQEKLLASQKLRESETSVTTAQAAGDPEYLEQPSRSDFSKHLKEETIQIITKASHEHEDKSPETVLQSAIKLEYARLVKLAQEDTPPETDYRLHHVVVYFIQNQAPKKIIEKTLLEQFGDRNLSFDERCHNIMKVAQAKLEMIKPEEVNLEEYEEWHQDYRKFRETTMYLIIGLENFQRESYIDSLLFLICAYQNNKELLSKGLYRGHDEELISHYRRECLLKLNEQAAELFESGEDREVNNGLIIMNEFIVPFLPLLLVDEMEEKDILAVEDMRNRWCSYLGQEMEPHLQEKLTDFLPKLLDCSMEIKSFHEPPKLPSYSTHELCERFARIMLSLSRTPADGR

SEQ ID NO: 5304 - protein, 1087 aa, Homo sapiens
MTVEQNVLQQSAAQKHQQTFLNQLREITGINDTQILQQALKDSNGNLELAVAFLTAKNAKTPQQEETTYYQTALPGNDRYISVGSQADTNVIDLTGDDKDDLQRAIALSLAESNRAFRETGITDEEQAISRVLEASIAENKACLKRTPTEVWRDSRNPYDRKRQDKAPVGLKNVGNTCWFSAVIQSLFNLLEFRRLVLNYKPPSNAQDLPRNQKEHRNLPFMRELRYLFALLVGTKRKYVDPSRAVEILKDAFKSNDSQQQDVSEFTHKLLDWLEDAFQMKAEEETDEEKPKNPMVELFYGRFLAVGVLEGKKFENTEMFGQYPLQVNGFKDLHECLEAAMIEGEIESLHSENSGKSGQEHWFTELPPVLTFELSRFEFNQALGRPEKIHNKLEFPQVLYLDRYMHRNREITRIKREEIKRLKDYLTVLQQRLERYLSYGSGPKRFPLVDVLQYALEFASSKPVCTSPVDDIDASSPPSGSIPSQTLPSTTEQQGALSSELPSTSPSSVAAISSRSVIHKPFTQSRIPPDLPMHPAPRHITEEELSVLESCLHRWRTEIENDTRDLQESISRIHRTIELMYSDKSMIQVPYRLHAVLVHEGQANAGHYWAYIFDHRESRWMKYNDIAVTKSSWEELVRDSFGGYRNASAYCLMYINDKAQFLIQEEFNKETGQPLVGIETLPPDLRDFVEEDNQRFEKELEEWDAQLAQKALQEKLLASQKLRESETSVTTAQAAGDPEYLEQPSRSDFSKHLKEETIQIITKASHEHEDKSPETVLQSIMMTPNMQGIIMAIGKSRSVYDRCGPEAGFFKAIKLEYARLVKLAQEDTPPETDYRLHHVVVYFIQNQAPKKIIEKTLLEQFGDRNLSFDERCHNIMKVAQAKLEMIKPEEVNLEEYEEWHQDYRKFRETTMYLIIGLENFQRESYIDSLLFLICAYQNNKELLSKGLYRGHDEELISHYRRECLLKLNEQAAELFESGEDREVNNGLIIMNEFIVPFLPLLLVDEMEEKDILAVEDMRNRWCSYLGQEMEPHLQEKLTDFLPKLLDCSMEIKSFHEPPKLPSYSTHELCERFARIMLSLSRTPADGR

SEQ ID NO: 5305 - protein, 1125 aa, Homo sapiens
MTVEQNVLQQSAAQKHQQTFLNQLREITGINDTQILQQALKDSNGNLELAVAFLTAKNAKTPQQEETTYYQTALPGNDRYISVGSQADTNVIDLTGDDKDDLQRAIALSLAESNRAFRETGITDEEQAISRVLEASIAENKACLKRTPTEVWRDSRNPYDRKRQDKAPVGLKNVGNTCWFSAVIQSLFNLLEFRRLVLNYKPPSNAQDLPRNQKEHRNLPFMRELRYLFALLVGTKRKYVDPSRAVEILKDAFKSNDSQQQDVSEFTHKLLDWLEDAFQMKAEEETDEEKPKNPMVELFYGRFLAVGVLEGKKFENTEMFGQYPLQVNGFKDLHECLEAAMIEGEIESLHSENSGKSGQEHWFTELPPVLTFELSRFEFNQALGRPEKIHNKLEFPQVLYLDRYMHRNREITRIKREEIKRLKDYLTVLQQRLERYLSYGSGPKRFPLVDVLQYALEFASSKPVCTSPVDDIDASSPPSGSIPSQTLPSTTEQQGALSSELPSTSPSSVAAISSRSVIHKPFTQSRIPPDLPMHPAPRHITEEELSVLESCLHRWRTEIENDTRDLQESISRIHRTIELMYSDKSMIQVPYRLHAVLVHEGQANAGHYWAYIFDHRESRWMKYNDIAVTKSSWEELVRDSFGGYRNASAYCLMYINDKAQFLIQEEFNKETGQPLVGIETLPPDLRDFVEEDNQRFEKELEEWDAQLAQKALQEKLLASQKLRESETSVTTAQAAGDPEYLEQPSRSDFSKHLKEETIQIITKASHEHEDKSPETVLQSKPENTTSQPLSNQRVVEVAIPHVGKFMIESKEGGYDDEIMMTPNMQGIIMAIGKSRSVYDRCGPEAGFFKAIKLEYARLVKLAQEDTPPETDYRLHHVVVYFIQNQAPKKIIEKTLLEQFGDRNLSFDERCHNIMKVAQAKLEMIKPEEVNLEEYEEWHQDYRKFRETTMYLIIGLENFQRESYIDSLLFLICAYQNNKELLSKGLYRGHDEELISHYRRECLLKLNEQAAELFESGEDREVNNGLIIMNEFIVPFLPLLLVDEMEEKDILAVEDMRNRWCSYLGQEMEPHLQEKLTDFLPKLLDCSMEIKSFHEPPKLPSYSTHELCERFARIMLSLSRTPADGR

SEQ ID NO: 5306 - protein, 441 aa, Homo sapiens
MKKFFQEFKADIKFKSAGPGQKLKESVGEKAHKEKPNQPAPRPPRQGPTNEAQMAAAAALARLEQKQSRAWGPTSQDTIRNQVRKELQAEATVSGSPEAPGTNVVSEPREEGSAHLAVPGVYFTCPLTGATLRKDQRDACIKEAILLHFSTDPVAASIMKIYTFNKDQDRVKLGVDTIAKYLDNIHLHPEEEKYRKIKLQNKVFQERINCLEGTHEFFEAIGFQKVLLPAQDQEDPEEFYVLSETTLAQPQSLERHKEQLLAAEPVRAKLDRQRRVFQPSPLASQFELPGDFFNLTAEEIKREQRLRSEAVERLSVLRTKAMREKEEQRGLRKYNYTLLRVRLPDGCLLQGTFYARERLGAVYGFVREALQSDWLPFELLASGGQKLSEDENLALNECGLVPSALLTFSWDMAVLEDIKAAGAEPDSILKPELLSAIEKLL

SEQ ID NO: 5307 - protein, 388 aa, Homo sapiens
MAAAAALARLEQKQSRAWGPTSQDTIRNQVRKELQAEATVSGSPEAPGTNVVSEPREEGSAHLAVPGVYFTCPLTGATLRKDQRDACIKEAILLHFSTDPVAASIMKIYTFNKDQDRVKLGVDTIAKYLDNIHLHPEEEKYRKIKLQNKVFQERINCLEGTHEFFEAIGFQKVLLPAQDQEDPEEFYVLSETTLAQPQSLERHKEQLLAAEPVRAKLDRQRRVFQPSPLASQFELPGDFFNLTAEEIKREQRLRSEAVERLSVLRTKAMREKEEQRGLRKYNYTLLRVRLPDGCLLQGTFYARERLGAVYGFVREALQSDWLPFELLASGGQKLSEDENLALNECGLVPSALLTFSWDMAVLEDIKAAGAEPDSILKPELLSAIEKLL

SEQ ID NO: 5308 - protein, 411 aa, Homo sapiens
MFSVFEEITRIVVKEMDAGGDMIAVRSLVDADRFRCFHLVGEKRTFFGCRHYTTGLTLMDILDTDGDKWLDELDSGLQGQKAEFQILDNVDSTGELIVRLPKEITISGSFQGFHHQKIKISENRISQQYLATLENRKLKRELPFSFRSINTRENLYLVTETLETVKEETLKSDRQYKFWSQISQGHLSYKHKGQREVTIPPNRVLSYRVKQLVFPNKETMSAGLDIHFRGKTKSFPEGKSLGSEDSRNMKEKLEDMESVLKDLTEEKRKDVLNSLAKCLGKEDIRQDLEQRVSEVLISGELHMEDPDKPLLSSLFNAAGVLVEARAKAILDFLDALLELSEEQQFVAEALEKGTLPLLKDQVKSVMEQNWDELASSPPDMDYDPEARILCALYVVVSILLELAEGPTSVSS

SEQ ID NO: 5309 - protein, 394 aa, Homo sapiens
MFSVFEEITRIVVKEMDAGGDMIAVRSLVDADRFRCFHLVGEKRTFFGCRHYTTGLTLMDILDTDGDKWLDELDSGLQGQKAEFQILDNVDSTGELIVRLPKEITISGSFQGFHHQKIKISENRISQQYLATLENRKLKRELPFSFRSINTRENLYLVTETLETVKEETLKSDRQYKFWSQISQGHLSYKHKGQREVTIPPNRVLSYRVKQLVFPNKETMRKSLGSEDSRNMKEKLEDMESVLKDLTEEKRKDVLNSLAKCLGKEDIRQDLEQRVSEVLISGELHMEDPDKPLLSSLFNAAGVLVEARAKAILDFLDALLELSEEQQFVAEALEKGTLPLLKDQVKSVMEQNWDELASSPPDMDYDPEARILCALYVVVSILLELAEGPTSVSS

SEQ ID NO: 5310 - protein, 403 aa, Homo sapiens
MFSVFEEITRIVVKEMDAGGDMIAVRSLVDADRFRCFHLVGEKRTFFGCRHYTTGLTLMDILDTDGDKWLDELDSGLQGQKAEFQILDNVDSTGELIVRLPKEITISGSFQGFHHQKIKISENRISQQYLATLENRKLKRELPFSFRSINTRENLYLVTETLETVKEETLKSDRQYKFWSQISQGHLSYKHKGQREVTIPPNRVLSYRVKQLVFPNKETMKKDGASSCLGKSLGSEDSRNMKEKLEDMESVLKDLTEEKRKDVLNSLAKCLGKEDIRQDLEQRVSEVLISGELHMEDPDKPLLSSLFNAAGVLVEARAKAILDFLDALLELSEEQQFVAEALEKGTLPLLKDQVKSVMEQNWDELASSPPDMDYDPEARILCALYVVVSILLELAEGPTSVSS

SEQ ID NO: 5311 - protein, 416 aa, Homo sapiens
MFSVFEEITRIVVKEMDAGGDMIAVRSLVDADRFRCFHLVGEKRTFFGCRHYTTGLTLMDILDTDGDKWLDELDSGLQGQKAEFQILDNVDSTGELIVRLPKEITISGSFQGFHHQKIKISENRISQQYLATLENRKLKRELPFSFRSINTRENLYLVTETLETVKEETLKSDRQYKFWSQISQGHLSYKHKGQREVTIPPNRVLSYRVKQLVFPNKETMNIHFRGKTKSFPEEKDGASSCLGKSLGSEDSRNMKEKLEDMESVLKDLTEEKRKDVLNSLAKCLGKEDIRQDLEQRVSEVLISGELHMEDPDKPLLSSLFNAAGVLVEARAKAILDFLDALLELSEEQQFVAEALEKGTLPLLKDQVKSVMEQNWDELASSPPDMDYDPEARILCALYVVVSILLELAEGPTSVSS

SEQ ID NO: 5312 - protein, 163 aa, Homo sapiens
MKEKLEDMESVLKDLTEEKRKDVLNSLAKCLGKEDIRQDLEQRVSEVLISGELHMEDPDKPLLSSLFNAAGVLVEARAKAILDFLDALLELSEEQQFVAEALEKGTLPLLKDQVKSVMEQNWDELASSPPDMDYDPEARILCALYVVVSILLELAEGPTSVSS

SEQ ID NO: 5313 - protein, 407 aa, Homo sapiens
MFSVFEEITRIVVKEMDAGGDMIAVRSLVDADRFRCFHLVGEKRTFFGCRHYTTGLTLMDILDTDGDKWLDELDSGLQGQKAEFQILDNVDSTGELIVRLPKEITISGSFQGFHHQKIKISENRISQQYLATLENRKLKRELPFSFRSINTRENLYLVTETLETVKEETLKSDRQYKFWSQISQGHLSYKHKGQREVTIPPNRVLSYRVKQLVFPNKETMNIHFRGKTKSFPEGKSLGSEDSRNMKEKLEDMESVLKDLTEEKRKDVLNSLAKCLGKEDIRQDLEQRVSEVLISGELHMEDPDKPLLSSLFNAAGVLVEARAKAILDFLDALLELSEEQQFVAEALEKGTLPLLKDQVKSVMEQNWDELASSPPDMDYDPEARILCALYVVVSILLELAEGPTSVSS

SEQ ID NO: 5314 - protein, 484 aa, Homo sapiens
MGSAFERVVRRVVQELDHGGEFIPVTSLQSSTGFQPYCLVVRKPSSSWFWKPRYKCVNLSIKDILEPDAAEPDVQRGRSFHFYDAMDGQIQGSVELAAPGQAKIAGGAAVSDSSSTSMNVYSLSVDPNTWQTLLHERHLRQPEHKVLQQLRSRGDNVYVVTEVLQTQKEVEVTRTHKREGSGRFSLPGATCLQGEGQGHLSQKKTVTIPSGSTLAFRVAQLVIDSDLDVLLFPDKKQRTFQPPATGHKRSTSEGAWPQLPSGLSMMRCLHNFLTDGVPAEGAFTEDFQGLRAEVETISKELELLDRELCQLLLEGLEGVLRDQLALRALEEALEQGQSLGPVEPLDGPAGAVLECLVLSSGMLVPELAIPVVYLLGALTMLSETQHKLLAEALESQTLLGPLELVGSLLEQSAPWQERSTMSLPPGLLGNSWGEGAPAWVLLDECGLELGEDTPHVCWEPQAQGRMCALYASLALLSGLSQEPH

SEQ ID NO: 5315 - protein, 46 aa, Homo sapiens
MTGKNWILISTTTPKSLEDEIVGRLLKILFVIFVDLISIIYVVITS

SEQ ID NO: 5316 - protein, 779 aa, Homo sapiens
MGKSEGPVGMVESAGRAGQKRPGFLEGGLLLLLLLVTAALVALGVLYADRRGKQLPRLASRLCFLQEERTFVKRKPRGIPEAQEVSEVCTTPGCVIAAARILQNMDPTTEPCDDFYQFACGGWLRRHVIPETNSRYSIFDVLRDELEVILKAVLENSTAKDRPAVEKARTLYRSCMNQSVIEKRGSQPLLDILEVVGGWPVAMDRWNETVGLEWELERQLALMNSQFNRRVLIDLFIWNDDQNSSRHIIYIDQPTLGMPSREYYFNGGSNRKVREAYLQFMVSVATLLREDANLPRDSCLVQEDMVQVLELETQLAKATVPQEERHDVIALYHRMGLEELQSQFGLKGFNWTLFIQTVLSSVKIKLLPDEEVVVYGIPYLQNLENIIDTYSARTIQNYLVWRLVLDRIGSLSQRFKDTRVNYRKALFGTMVEEVRWRECVGYVNSNMENAVGSLYVREAFPGDSKSMVRELIDKVRTVFVETLDELGWMDEESKKKAQEKAMSIREQIGHPDYILEEMNRRLDEEYSNLNFSEDLYFENSLQNLKVGAQRSLRKLREKVDPNLWIIGAAVVNAFYSPNRNQIVFPAGILQPPFFSKEQPQALNFGGIGMVIGHEITHGFDDNGRNFDKNGNMMDWWSNFSTQHFREQSECMIYQYGNYSWDLADEQNVNGFNTLGENIADNGGVRQAYKAYLKWMAEGGKDQQLPGLDLTHEQLFFINYAQVWCGSYRPEFAIQSIKTDVHSPLKYRVLGSLQNLAAFADTFHCARGTPMHPKERCRVW

SEQ ID NO: 5317 - protein, 611 aa, Homo sapiens
MGKSEGPVGMVESAGRAGQKRPGFLEGGLLLLLLLVTAALVALGVLYADRRGKQLPRLASRLCFLQEERTFVKRKPRGIPEAQEVSEVCTTPGCVIAAARILQNMDPTTEPCDDFYQFACGGWLRRHVIPETNSRYSIFDVLRDELEVILKAVLENSTAKDRPAVEKARTLYRSCMNQSVIEKRGSQPLLDILEVVGGWPVAMDRWNETVGLEWELERQLALMNSQFNRRVLIDLFIWNDDQNSSRHIIYIDQPTLGMPSREYYFNGGSNRKVREAYLQFMVSVATLLREDANLPRDSCLVQEDMVQVLELETQLAKATVPQEERHDVIALYHRMGLEELQSQFGLKGFNWTLFIQTVLSSVKIKLLPDEEVVVYGIPYLQNLENIIDTYSARTIQNYLVWRLVLDRIGSLSQRFKDTRVNYRKALFGTMVEEVRWRECVGYVNSNMENAVGSLYVREAFPGDSKSMVRELIDKVRTVFVETLDELGWMDEESKKKAQEKAMSIREQIGHPDYILEEMNRRLDEEYSNLNFSEDLYFENSLQNLKVGAQRSLRKLREKVDPNLWIIGAAVVNAFYSPNRNQIAYSLSRPWGQYSLPGSSSPPSSARSSHRP

SEQ ID NO: 5318 - protein, 622 aa, Homo sapiens
MGKSEGPVGMVESAGRAGQKRPGFLEGGLLLLLLLVTAALVALGVLYADRRGKQLPRLASRLCFLQEERTFVKRKPRGIPEAQEVSEVCTTPGCVIAAARILQNMDPTTEPCDDFYQFACGGWLRRHVIPETNSRYSIFDVLRDELEVILKAVLENSTAKATVPQEERHDVIALYHRMGLEELQSQFGLKGFNWTLFIQTVLSSVKIKLLPDEEVVVYGIPYLQNLENIIDTYSARTIQNYLVWRLVLDRIGSLSQRFKDTRVNYRKALFGTMVEEVRWRECVGYVNSNMENAVGSLYVREAFPGDSKSMVRELIDKVRTVFVETLDELGWMDEESKKKAQEKAMSIREQIGHPDYILEEMNRRLDEEYSNLNFSEDLYFENSLQNLKVGAQRSLRKLREKVDPNLWIIGAAVVNAFYSPNRNQIVFPAGILQPPFFSKEQPQALNFGGIGMVIGHEITHGFDDNGRNFDKNGNMMDWWSNFSTQHFREQSECMIYQYGNYSWDLADEQNVNGFNTLGENIADNGGVRQAYKAYLKWMAEGGKDQQLPGLDLTHEQLFFINYAQVWCGSYRPEFAIQSIKTDVHSPLKYRVLGSLQNLAAFADTFHCARGTPMHPKERCRVW

SEQ ID NO: 5319 - protein, 858 aa, Homo sapiens
MLQTKDLIWTLFFLGTAVSLQVDIVPSQGEISVGESKFFLCQVAGDAKDKDISWFSPNGEKLTPNQQRISVVWNDDSSSTLTIYNANIDDAGIYKCVVTGEDGSESEATVNVKIFQKLMFKNAPTPQEFREGEDAVIVCDVVSSLPPTIIWKHKGRDVILKKDVRFIVLSNNYLQIRGIKKTDEGTYRCEGRILARGEINFKDIQVIVNVPPTIQARQNIVNATANLGQSVTLVCDAEGFPEPTMSWTKDGEQIEQEEDDEKYIFSDDSSQLTIKKVDKNDEAEYICIAENKAGEQDATIHLKVFAKPKITYVENQTAMELEEQVTLTCEASGDPIPSITWRTSTRNISSEEKASWTRPEKQETLDGHMVVRSHARVSSLTLKSIQYTDAGEYICTASNTIGQDSQSMYLEVQYAPKLQGPVAVYTWEGNQVNITCEVFAYPSATISWFRDGQLLPSSNYSNIKIYNTPSASYLEVTPDSENDFGNYNCTAVNRIGQESLEFILVQADTPSSPSIDQVEPYSSTAQVQFDEPEATGGVPILKYKAEWRAVGEEVWHSKWYDAKEASMEGIVTIVGLKPETTYAVRLAALNGKGLGEISAASEFKTQPVQGEPSAPKLEGQMGEDGNSIKVNLIKQDDGGSPIRHYLVRYRALSSEWKPEIRLPSGSDHVMLKSLDWNAEYEVYVVAENQQGKSKAAHFVFRTSAQPTAIPANGSPTSGLSTGAIVGILIVIFVLLLVVVDITCYFLNKCGLFMCIAVNLCGKAGPGAKGKDMEEGKAAFSKDESKEPIVEVRTEEERTPNHDGGKHTEPNETTPLTEPEKGPVEAKPECQETETKPAPAEVKTVPNDATQTKENESKA

SEQ ID NO: 5320 - protein, 848 aa, Homo sapiens
MLQTKDLIWTLFFLGTAVSLQVDIVPSQGEISVGESKFFLCQVAGDAKDKDISWFSPNGEKLTPNQQRISVVWNDDSSSTLTIYNANIDDAGIYKCVVTGEDGSESEATVNVKIFQKLMFKNAPTPQEFREGEDAVIVCDVVSSLPPTIIWKHKGRDVILKKDVRFIVLSNNYLQIRGIKKTDEGTYRCEGRILARGEINFKDIQVIVNVPPTIQARQNIVNATANLGQSVTLVCDAEGFPEPTMSWTKDGEQIEQEEDDEKYIFSDDSSQLTIKKVDKNDEAEYICIAENKAGEQDATIHLKVFAKPKITYVENQTAMELEEQVTLTCEASGDPIPSITWRTSTRNISSEEKTLDGHMVVRSHARVSSLTLKSIQYTDAGEYICTASNTIGQDSQSMYLEVQYAPKLQGPVAVYTWEGNQVNITCEVFAYPSATISWFRDGQLLPSSNYSNIKIYNTPSASYLEVTPDSENDFGNYNCTAVNRIGQESLEFILVQADTPSSPSIDQVEPYSSTAQVQFDEPEATGGVPILKYKAEWRAVGEEVWHSKWYDAKEASMEGIVTIVGLKPETTYAVRLAALNGKGLGEISAASEFKTQPVQGEPSAPKLEGQMGEDGNSIKVNLIKQDDGGSPIRHYLVRYRALSSEWKPEIRLPSGSDHVMLKSLDWNAEYEVYVVAENQQGKSKAAHFVFRTSAQPTAIPANGSPTSGLSTGAIVGILIVIFVLLLVVVDITCYFLNKCGLFMCIAVNLCGKAGPGAKGKDMEEGKAAFSKDESKEPIVEVRTEEERTPNHDGGKHTEPNETTPLTEPEKGPVEAKPECQETETKPAPAEVKTVPNDATQTKENESKA

SEQ ID NO: 5321 - protein, 761 aa, Homo sapiens
MLQTKDLIWTLFFLGTAVSLQVDIVPSQGEISVGESKFFLCQVAGDAKDKDISWFSPNGEKLTPNQQRISVVWNDDSSSTLTIYNANIDDAGIYKCVVTGEDGSESEATVNVKIFQKLMFKNAPTPQEFREGEDAVIVCDVVSSLPPTIIWKHKGRDVILKKDVRFIVLSNNYLQIRGIKKTDEGTYRCEGRILARGEINFKDIQVIVNVPPTIQARQNIVNATANLGQSVTLVCDAEGFPEPTMSWTKDGEQIEQEEDDEKYIFSDDSSQLTIKKVDKNDEAEYICIAENKAGEQDATIHLKVFAKPKITYVENQTAMELEEQVTLTCEASGDPIPSITWRTSTRNISSEEKTLDGHMVVRSHARVSSLTLKSIQYTDAGEYICTASNTIGQDSQSMYLEVQYAPKLQGPVAVYTWEGNQVNITCEVFAYPSATISWFRDGQLLPSSNYSNIKIYNTPSASYLEVTPDSENDFGNYNCTAVNRIGQESLEFILVQADTPSSPSIDQVEPYSSTAQVQFDEPEATGGVPILKYKAEWRAVGEEVWHSKWYDAKEASMEGIVTIVGLKPETTYAVRLAALNGKGLGEISAASEFKTQPVHSPPPPASASSSTPVPLSPPDTTWPLPALATTEPAKGEPSAPKLEGQMGEDGNSIKVNLIKQDDGGSPIRHYLVRYRALSSEWKPEIRLPSGSDHVMLKSLDWNAEYEVYVVAENQQGKSKAAHFVFRTSAQPTAIPATLGGNSASYTFVSLLFSAVTLLLLC

SEQ ID NO: 5322 - protein, 726 aa, Homo sapiens
MLQTKDLIWTLFFLGTAVSLQVDIVPSQGEISVGESKFFLCQVAGDAKDKDISWFSPNGEKLTPNQQRISVVWNDDSSSTLTIYNANIDDAGIYKCVVTGEDGSESEATVNVKIFQKLMFKNAPTPQEFREGEDAVIVCDVVSSLPPTIIWKHKGRDVILKKDVRFIVLSNNYLQIRGIKKTDEGTYRCEGRILARGEINFKDIQVIVNVPPTIQARQNIVNATANLGQSVTLVCDAEGFPEPTMSWTKDGEQIEQEEDDEKYIFSDDSSQLTIKKVDKNDEAEYICIAENKAGEQDATIHLKVFAKPKITYVENQTAMELEEQVTLTCEASGDPIPSITWRTSTRNISSEEKTLDGHMVVRSHARVSSLTLKSIQYTDAGEYICTASNTIGQDSQSMYLEVQYAPKLQGPVAVYTWEGNQVNITCEVFAYPSATISWFRDGQLLPSSNYSNIKIYNTPSASYLEVTPDSENDFGNYNCTAVNRIGQESLEFILVQADTPSSPSIDQVEPYSSTAQVQFDEPEATGGVPILKYKAEWRAVGEEVWHSKWYDAKEASMEGIVTIVGLKPETTYAVRLAALNGKGLGEISAASEFKTQPVQGEPSAPKLEGQMGEDGNSIKVNLIKQDDGGSPIRHYLVRYRALSSEWKPEIRLPSGSDHVMLKSLDWNAEYEVYVVAENQQGKSKAAHFVFRTSAQPTAIPATLGGNSASYTFVSLLFSAVTLLLLC

SEQ ID NO: 5323 - protein, 665 aa, Homo sapiens
MLQTKDLIWTLFFLGTAVSLQVDIVPSQGEISVGESKFFLCQVAGDAKDKDISWFSPNGEKLTPNQQRISVVWNDDSSSTLTIYNANIDDAGIYKCVVTGEDGSESEATVNVKIFQKLMFKNAPTPQEFREGEDAVIVCDVVSSLPPTIIWKHKGRDVILKKDVRFIVLSNNYLQIRGIKKTDEGTYRCEGRILARGEINFKDIQVIVNVPPTIQARQNIVNATANLGQSVTLVCDAEGFPEPTMSWTKDGEQIEQEEDDEKYIFSDDSSQLTIKKVDKNDEAEYICIAENKAGEQDATIHLKVFAKPKITYVENQTAMELEEQVTLTCEASGDPIPSITWRTSTRNISSEEKASWTRPEKQETLDGHMVVRSHARVSSLTLKSIQYTDAGEYICTASNTIGQDSQSMYLEVQYAPKLQGPVAVYTWEGNQVNITCEVFAYPSATISWFRDGQLLPSSNYSNIKIYNTPSASYLEVTPDSENDFGNYNCTAVNRIGQESLEFILVQADTPSSPSIDQVEPYSSTAQVQFDEPEATGGVPILKYKAEWRAVGEEVWHSKWYDAKEASMEGIVTIVGLKPETTYAVRLAALNGKGLGEISAASEFKTQPVHSPPPPASASSSTPVPLSPPDTTWPLPALATTEPAKNIAQNHCCNMFQAGLHNALMK

SEQ ID NO: 5324 - protein, 364 aa, Homo sapiens
MLQTKDLIWTLFFLGTAVSLQVDIVPSQGEISVGESKFFLCQVAGDAKDKDISWFSPNGEKLTPNQQRISVVWNDDSSSTLTIYNANIDDAGIYKCVVTGEDGSESEATVNVKIFQKLMFKNAPTPQEFREGEDAVIVCDVVSSLPPTIIWKHKGRDVILKKDVRFIVLSNNYLQIRGIKKTDEGTYRCEGRILARGEINFKDIQVIVNVPPTIQARQNIVNATANLGQSVTLVCDAEGFPEPTMSWTKDGEQIEQEEDDEKYIFSDDSSQLTIKKVDKNDEAEYICIAENKAGEQDATIHLKVFAKPKITYVENQTAMELEEQVTLTCEASGDPIPSITWRTSTRNISSEEKASWTRPEKQEV

SEQ ID NO: 5325 - protein, 525 aa, Homo sapiens
MHRAPSPTAEQPPGGGDSARRTLQPRLKPSARAMALPRTLGELQLYRVLQRANLLSYYETFIQQGGDDVQQLCEAGEEEFLEIMALVGMATKPLHVRRLQKALREWATNPGLFSQPVPAVPVSSIPLFKISETAGTRKGSMSNGHGSPGEKAGSARSFSPKSPLELGEKLSPLPGGPGAGDPRIWPGRSTPESDVGAGGEEEAGSPPFSPPAGGGVPEGTGAGGLAAGGTGGGPDRLEPEMVRMVVESVERIFRSFPRGDAGEVTSLLKLNKKLARSVGHIFEMDDNDSQKEEEIRKYSIIYGRFDSKRREGKQLSLHELTINEAAAQFCMRDNTLLLRRVELFSLSRQVARESTYLSSLKGSRLHPEELGGPPLKKLKQEVGEQSHPEIQQPPPGPESYVPPYRPSLEEDSASLSGESLDGHLQAVGSCPRLTPPPADLPLALPAHGLWSRHILQQTLMDEGLRLARLVSHDRVGRLSPCVPAKPPLAEFEEGLLDRCPAPGPHPALVEGRRSSVKVEAEASRQ

SEQ ID NO: 5326 - protein, 322 aa, Homo sapiens
MHRAPSPTAEQPPGGGDSARRTLQPRLKPSARAMALPRTLGELQLYRVLQRANLLSYYETFIQQGGDDVQQLCEAGEEEFLEIMALVGMATKPLHVRRLQKALREWATNPGLFSQPVPAVPVSSIPLFKISETAGTRKGSMSNGHGSPGEKAGSARSFSPKSPLELGEKLSPLPGGPGAGDPRIWPGRSTPESDVGAGGEEEAGSPPFSPPAGGGVPEGTGAGGLAAGGTGGGPDRLEPEMVRMVVESVERIFRSFPRGDAGEVTSLLKLNKKLARSVGHIFEMDDNDSQKEEEIRKYSIIYGRFDSKRREGKQLSLHEASP

SEQ ID NO: 5327 - protein, 461 aa, Homo sapiens
MHRAPSPTAEQPPGGGDSARRTLQPRLKPSARAMALPRTLGELQLYRVLQRANLLSYYETFIQQGGDDVQQLCEAGEEEFLEIMALVGMATKPLHVRRLQKALREWATNPGLFSQPVPAVPVSSIPLFKISETAGTRKGSMSNGHGSPGEKAGSARSFSPKSPLELGEKLSPLPGGPGAGDPRIWPGRSTPESDVGAGGEEEAGSPPFSPPAGGGVPEGTGAGGLAAGGTGGGPDRLEPEMVRMVVESVERIFRSFPRGDAGEVTSLLKLNKKLARSVGHIFEMDDNDSQKEEEIRKYSIIYGRFDSKRREGKQLSLHELTINEAAAQFCMRDNTLLLRRVELFSLSRQVARESTYLSSLKGSRLHPEELGGPPLKKLKQEVGEQSHPEIQQPPPGPESYVPPYRPSLEEDSASLSGESLDGHLQEFEEGLLDRCPAPGPHPALVEGRRSSVKVEAEASRQ

SEQ ID NO: 5328 - protein, 255 aa, Homo sapiens
MDVMDGCQFSPSEYFYDGSCIPSPEGEFGDEFVPRVAAFGAHKAELQGSDEDEHVRAPTGHHQAGHCLMWACKACKRKSTTMDRRKAATMRERRRLKKVNQAFETLKRCTTTNPNQRLPKVEILRNAIRYIESLQELLREQVENYYSLPGQSCSEPTSPTSNCSDGMPECNSPVWSRKSSTFDSIYCPDVSNVYATDKNSLSSLDCLSNIVDRITSSEQPGLPLQDLASLSPVASTDSQPATPGASSSRLIYHVL

SEQ ID NO: 5329 - protein, 1935 aa, Homo sapiens
MGDSEMAVFGAAAPYLRKSEKERLEAQTRPFDLKKDVFVPDDKQEFVKAKIVSREGGKVTAETEYGKTVTVKEDQVMQQNPPKFDKIEDMAMLTFLHEPAVLYNLKDRYGSWMIYTYSGLFCVTVNPYKWLPVYTPEVVAAYRGKKRSEAPPHIFSISDNAYQYMLTDRENQSILITGESGAGKTVNTKRVIQYFAVIAAIGDRSKKDQSPGKGTLEDQIIQANPALEAFGNAKTVRNDNSSRFGKFIRIHFGATGKLASADIETYLLEKSRVIFQLKAERDYHIFYQILSNKKPELLDMLLITNNPYDYAFISQGETTVASIDDAEELMATDNAFDVLGFTSEEKNSMYKLTGAIMHFGNMKFKLKQREEQAEPDGTEEADKSAYLMGLNSADLLKGLCHPRVKVGNEYVTKGQNVQQVIYATGALAKAVYERMFNWMVTRINATLETKQPRQYFIGVLDIAGFEIFDFNSFEQLCINFTNEKLQQFFNHHMFVLEQEEYKKEGIEWTFIDFGMDLQACIDLIEKPMGIMSILEEECMFPKATDMTFKAKLFDNHLGKSANFQKPRNIKGKPEAHFSLIHYAGIVDYNIIGWLQKNKDPLNETVVGLYQKSSLKLLSTLFANYAGADAPIEKGKGKAKKGSSFQTVSALHRENLNKLMTNLRSTHPHFVRCIIPNETKSPGVMDNPLVMHQLRCNGVLEGIRICRKGFPNRILYGDFRQRYRILNPAAIPEGQFIDSRKGAEKLLSSLDIDHNQYKFGHTKVFFKAGLLGLLEEMRDERLSRIITRIQAQSRGVLARMEYKKLLERRDSLLVIQWNIRAFMGVKNWPWMKLYFKIKPLLKSAEREKEMASMKEEFTRLKEALEKSEARRKELEEKMVSLLQEKNDLQLQVQAEQDNLADAEERCDQLIKNKIQLEAKVKEMNERLEDEEEMNAELTAKKRKLEDECSELKRDIDDLELTLAKVEKEKHATENKVKNLTEEMAGLDEIIAKLTKEKKALQEAHQQALDDLQAEEDKVNTLTKAKVKLEQQVDDLEGSLEQEKKVRMDLERAKRKLEGDLKLTQESIMDLENDKQQLDERLKKKDFELNALNARIEDEQALGSQLQKKLKELQARIEELEEELEAERTARAKVEKLRSDLSRELEEISERLEEAGGATSVQIEMNKKREAEFQKMRRDLEEATLQHEATAAALRKKHADSVAELGEQIDNLQRVKQKLEKEKSEFKLELDDVTSNMEQIIKAKANLEKMCRTLEDQMNEHRSKAEETQRSVNDLTSQRAKLQTENGELSRQLDEKEALISQLTRGKLTYTQQLEDLKRQLEEEVKAKNALAHALQSARHDCDLLREQYEEETEAKAELQRVLSKANSEVAQWRTKYETDAIQRTEELEEAKKKLAQRLQEAEEAVEAVNAKCSSLEKTKHRLQNEIEDLMVDVERSNAAAAALDKKQRNFDKILAEWKQKYEESQSELESSQKEARSLSTELFKLKNAYEESLEHLETFKRENKNLQEEISDLTEQLGSSGKTIHELEKVRKQLEAEKMELQSALEEAEASLEHEEGKILRAQLEFNQIKAEIERKLAEKDEEMEQAKRNHLRVVDSLQTSLDAETRSRNEALRVKKKMEGDLNEMEIQLSHANRMAAEAQKQVKSLQSLLKDTQIQLDDAVRANDDLKENIAIVERRNNLLQAELEELRAVVEQTERSRKLAEQELIETSERVQLLHSQNTSLINQKKKMDADLSQLQTEVEEAVQECRNAEEKAKKAITDAAMMAEELKKEQDTSAHLERMKKNMEQTIKDLQHRLDEAEQIALKGGKKQLQKLEARVRELENELEAEQKRNAESVKGMRKSERRIKELTYQTEEDRKNLLRLQDLVDKLQLKVKAYKRQAEEAEEQANTNLSKFRKVQHELDEAEERADIAESQVNKLRAKSRDIGTKGLNEE

SEQ ID NO: 5330 - protein, 700 aa, Homo sapiens
MSRRTRCEDLDELHYQDTDSDVPEQRDSKCKVKWTHEEDEQLRALVRQFGQQDWKFLASHFPNRTDQQCQYRWLRVLNPDLVKGPWTKEEDQKVIELVKKYGTKQWTLIAKHLKGRLGKQCRERWHNHLNPEVKKSCWTEEEDRIICEAHKVLGNRWAEIAKMLPGRTDNAVKNHWNSTIKRKVDTGGFLSESKDCKPPVYLLLELEDKDGLQSAQPTEGQGSLLTNWPSVPPTIKEEENSEEELAAATTSKEQEPIGTDLDAVRTPEPLEEFPKREDQEGSPPETSLPYKWVVEAANLLIPAVGSSLSEALDLIESDPDAWCDLSKFDLPEEPSAEDSINNSLVQLQASHQQQVLPPRQPSALVPSVTEYRLDGHTISDLSRSSRGELIPISPSTEVGGSGIGTPPSVLKRQRKRRVALSPVTENSTSLSFLDSCNSLTPKSTPVKTLPFSPSQFLNFWNKQDTLELESPSLTSTPVCSQKVVVTTPLHRDKTPLHQKHAAFVTPDQKYSMDNTPHTPTPFKNALEKYGPLKPLPQTPHLEEDLKEVLRSEAGIELIIEDDIRPEKQKRKPGLRRSPIKKVRKSLALDIVDEDVKLMMSTLPKSLSLPTTAPSNSSSLTLSGIKEDNSLLNQGFLQAKPEKAAVAQKPRSHFTTPAPMSSAWKTVACGGTRDQLFMQEKARQLLGRLKPSHTSRTLILS

SEQ ID NO: 5331 - protein, 676 aa, Homo sapiens
MSRRTRCEDLDELHYQDTDSDVPEQRDSKCKVKWTHEENRTDQQCQYRWLRVLNPDLVKGPWTKEEDQKVIELVKKYGTKQWTLIAKHLKGRLGKQCRERWHNHLNPEVKKSCWTEEEDRIICEAHKVLGNRWAEIAKMLPGRTDNAVKNHWNSTIKRKVDTGGFLSESKDCKPPVYLLLELEDKDGLQSAQPTEGQGSLLTNWPSVPPTIKEEENSEEELAAATTSKEQEPIGTDLDAVRTPEPLEEFPKREDQEGSPPETSLPYKWVVEAANLLIPAVGSSLSEALDLIESDPDAWCDLSKFDLPEEPSAEDSINNSLVQLQASHQQQVLPPRQPSALVPSVTEYRLDGHTISDLSRSSRGELIPISPSTEVGGSGIGTPPSVLKRQRKRRVALSPVTENSTSLSFLDSCNSLTPKSTPVKTLPFSPSQFLNFWNKQDTLELESPSLTSTPVCSQKVVVTTPLHRDKTPLHQKHAAFVTPDQKYSMDNTPHTPTPFKNALEKYGPLKPLPQTPHLEEDLKEVLRSEAGIELIIEDDIRPEKQKRKPGLRRSPIKKVRKSLALDIVDEDVKLMMSTLPKSLSLPTTAPSNSSSLTLSGIKEDNSLLNQGFLQAKPEKAAVAQKPRSHFTTPAPMSSAWKTVACGGTRDQLFMQEKARQLLGRLKPSHTSRTLILS

SEQ ID NO: 5332 - protein, 1938 aa, Homo sapiens
MSSDAEMAIFGEAAPYLRKPEKERIEAQNRPFDSKKACFVADNKEMYVKGMIQTRENDKVIVKTLDDRMLTLNNDQVFPMNPPKFDKIEDMAMMTHLHEPAVLYNLKERYAAWMIYTYSGLFCVTVNPYKWLPVYKPEVVAAYRGKKRQEAPPHIFSISDNAYQFMLTDRDNQSILITGESGAGKTVNTKRVIQYFATIAVTGDKKKETQPGKMQGTLEDQIIQANPLLEAFGNAKTVRNDNSSRFGKFIRIHFGATGKLASADIETYLLEKSRVTFQLSSERSYHIFYQIMSNKKPELIDLLLISTNPFDFPFVSQGEVTVASIDDSEELLATDNAIDILGFSSEEKVGIYKLTGAVMHYGNMKFKQKQREEQAEPDGTEVADKAGYLMGLNSAEMLKGLCCPRVKVGNEYVTKGQNVQQVTNSVGALAKAVYEKMFLWMVTRINQQLDTKQPRQYFIGVLDIAGFEIFDFNSLEQLCINFTNEKLQQFFNHHMFVLEQEEYKKEGIEWEFIDFGMDLAACIELIEKPMGIFSILEEECMFPKATDTSFKNKLYDQHLGKSNNFQKPKPAKGKAEAHFSLVHYAGTVDYNIAGWLDKNKDPLNETVVGLYQKSSLKLLSFLFSNYAGAETGDSGGSKKGGKKKGSSFQTVSAVFRENLNKLMTNLRSTHPHFVRCLIPNETKTPGVMDHYLVMHQLRCNGVLEGIRICRKGFPSRILYADFKQRYRILNASAIPEGQFIDSKNASEKLLNSIDVDREQFRFGNTKVFFKAGLLGLLEEMRDEKLVTLMTSTQAVCRGYLMRVEFKKMMERRDSIFCIQYNIRSFMNVKHWPWMNLFFKIKPLLKSAEAEKEMATMKEDFERTKEELARSEARRKELEEKMVSLLQEKNDLQLQVQSETENLMDAEERCEGLIKSKILLEAKVKELTERLEEEEEMNSELVAKKRNLEDKCSSLKRDIDDLELTLTKVEKEKHATENKVKNLSEEMTALEENISKLTKEKKSLQEAHQQTLDDLQVEEDKVNGLIKINAKLEQQTDDLEGSLEQEKKLRADLERAKRKLEGDLKMSQESIMDLENDKQQIEEKLKKKEFELSQLQAKIDDEQVHSLQFQKKIKELQARIEELEEEIEAEHTLRAKIEKQRSDLARELEEISERLEEASGATSAQIEMNKKREAEFQKMRRDLEEATLQHEATAATLRKKQADSVAELGEQIDNLQRVKQKLEKEKSELKMEIDDMASNIEALSKSKSNIERTCRTVEDQFSEIKAKDEQQTQLIHDLNMQKARLQTQNGELSHRVEEKESLISQLTKSKQALTQQLEELKRQMEEETKAKNAMAHALQSSRHDCDLLREQYEEEQEAKAELQRALSKANSEVAQWRTKYETDAIQRTEELEEAKKKLAQRLQEAEENTETANSKCASLEKTKQRLQGEVEDLMRDLERSHTACATLDKKQRNFDKVLAEWKQKLDESQAELEAAQKESRSLSTELFKMRNAYEEVVDQLETLRRENKNLQEEISDLTEQIAETGKNLQEAEKTKKLVEQEKSDLQVALEEVEGSLEHEESKILRVQLELSQVKSELDRKVIEKDEEIEQLKRNSQRAAEALQSVLDAEIRSRNDALRLKKKMEGDLNEMEIQLGHSNRQMAETQKHLRTVQGQLKDSQLHLDDALRSNEDLKEQLAIVERRNGLLLEELEEMKVALEQTERTRRLSEQELLDASDRVQLLHSQNTSLINTKKKLEADIAQCQAEVENSIQESRNAEEKAKKAITDAAMMAEELKKEQDTSAHLERMKKNLEQTVKDLQHRLDEAEQLALKGGKKQIQKLENRVRELENELDVEQKRGAEALKGAHKYERKVKEMTYQAEEDHKNILRLQDLVDKLQAKVKSYKRQAEEAEEQANTQLSRCRRVQHELEEAAERADIAESQVNKLRAKSRDVGSQKMEE

SEQ ID NO: 5333 - protein, 596 aa, Homo sapiens
MATENGAVELGIQNPSTDKAPKGPTGERPLAAGKDPGPPDPKKAPDPPTLKKDAKAPASEKGDGTLAQPSTSSQGPKGEGDRGGGPAEGSAGPPAALPQQTATPETSVKKPKAEQGASGSQDPGKPRVGKKAAEGQAAARRGSPAFLHSPSCPAIISSSEKLLAKKPPSEASELTFEGVPMTHSPTDPRPAKAEEGKNILAESQKEVGEKTPGQAGQAKMQGDTSRGIEFQAVPSEKSEVGQALCLTAREEDCFQILDDCPPPPAPFPHRMVELRTGNVSSEFSMNSKEALGGGKFGAVCTCMEKATGLKLAAKVIKKQTPKDKEMVLLEIEVMNQLNHRNLIQLYAAIETPHEIVLFMEYIEGGELFERIVDEDYHLTEVDTMVFVRQICDGILFMHKMRVLHLDLKPENILCVNTTGHLVKIIDFGLARRYNPNEKLKVNFGTPEFLSPEVVNYDQISDKTDMWSMGVITYMLLSGLSPFLGDDDTETLNNVLSGNWYFDEETFEAVSDEAKDFVSNLIVKDQRARMNAAQCLAHPWLNNLAEKAKRCNRRLKSQILLKKYLMKRRWKKNFIAVSAANRFKKISSSGALMALGV

SEQ ID NO: 5334 - protein, 170 aa, Homo sapiens
MKTLFLGVTLGLAAALSFTLEEEDITGTWYVKAMVVDKDFPEDRRPRKVSPVKVTALGGGKLEATFTFMREDRCIQKKILMRKTEEPGKYSAYGGRKLMYLQELPRRDHYIFYCKDQHHGGLLHMGKLVGRNSDTNREALEEFKKLVQRKGLSEEDIFTPLQTGSCVPEH

SEQ ID NO: 5335 - protein, 165 aa, Homo sapiens
MKTLFLGVTLGLAAALSFTLEEEDITGTWYVKAMVVDKDFPEDRRPRKVSPVKVTALGGGKLEATFTFMREDRCIQKKILMRKTEEPGKYSACLSAVEMDQITPALWEALAIDTLRKLRIGTRRPRIRWGQEAHVPAGAAQEGPLHLLLQRPAPWGPAPHGKACG

SEQ ID NO: 5336 - protein, 85 aa, Homo sapiens
MKTLFLGVTLGLAAALSFTLEEEDEGGSVHPEENPDAEDGGAWQIQRLWGQEAHIPAGAAQEGPLHLLLQRPAPWGPAPHGKACG

SEQ ID NO: 5337 - protein, 311 aa, Homo sapiens
MATSNHSSGAEFILAGLTQRPELQLPLFLLFLGIYVVTVVGNLGMIFLIALSSQLYPPVYYFLSHLSFIDLCYSSVITPKMLVNFVPEENIISFLECITQLYFFLIFVIAEGYLLTAMEYDRYVAICRPLLYNIVMSHRVCSIMMAVVYSLGFLWATVHTTRMSVLSFCRSHTVSHYFCDILPLLTLSCSSTHINEILLFIIGGVNTLATTLAVLISYAFIFSSILGIHSTEGQSKAFGTCSSHLLAVGIFFGSITFMYFKPPSSTTMEKEKVSSVFYITIIPMLNPLIYSLRNKDVKNALKKMTRGRQSS

SEQ ID NO: 5338 - protein, 312 aa, Homo sapiens
MKAGNFSDTPEFFLLGLSGDPELQPILFMLFLSMYLATMLGNLLIILAVNSDSHLHTPMYFLLSILSLVDICFTSTTMPKMLVNIQAQAQSINYTGCLTQICFVLVFVGLENGILVMMAYDRFVAICHPLRYNVIMNPKLCGLLLLLSFIVSVLDALLHTLMVLQLTFCIDLEIPHFFCELAHILKLACSDVLINNILVYLVTSLLGVVPLSGIIFSYTRIVSSVMKIPSAGGKYKAFSICGSHLIVVSLFYGTGFGVYLSSGATHSSRKGAIASVMYTVVTPMLNPLIYSLRNKDMLKALRKLISRIPSFH

SEQ ID NO: 5339 - protein, 299 aa, Homo sapiens
MSAKPEVSLVREASRQIVAGGSAGLVEICLMHPLDVVKTRFQIQRCATDPNSYKSLVDSFRMIFQMEGLFGFYKGILPPILAETPKRAVKFFTFEQYKKLLGYVSLSPALTFAIAGLGSGLTEAIVVNPFEVVKVGLQANRNTFAEQPSTVGYARQIIKKEGWGLQGLNKGLTATLGRHGVFNMVYFGFYYNVKNMIPVNKDPILEFWRKFGIGLLSGTIASVINIPFDVAKSRIQGPQPVPGEIKYRTCFKTMATVYQEEGILALYKGLLPKIMRLGPGGAVMLLVYEYTYSWLQENW

SEQ ID NO: 5340 - protein, 298 aa, Homo sapiens
MSAKPEVSLVREASRQIVAGGSAGLVEICLMHPLDVVKTRFQIQRCATDPNSYKSLVDSFRMIFQMEGLFGFYKGILPPILAETPKRAVKFFTFEQYKKLLGYVSLSPALTFAIAGLGSGLTEAIVVNPFEVVKVGLQANRNTFAEQPSTVGYARQIIKKEGWGLQGLNKGLTATLGRHGVFNMVYFGFYYNVKNMIPVNKDPILEFWRKFGIGLLSGTIASVINIPFDVAKSRIQGPQPVPGEIKYRTCFKTMATVYQEEGILALYKGLLPKIMRLGPGGAVMLLVYEYTYSWLQEN

SEQ ID NO: 5341 - protein, 305 aa, Homo sapiens
MEFVFLAYPSCPELHILSFLGVSLVYGLIITGNILIVVSIHTETCLCTSMYYFLGSLSGIEICYTAVVVPHILANTLQSEKTITLLGCATQMAFFIALGSADCFLLAAMAYDRYVAICHPLQYPLLMTLTLCVHLVVASVISGLFLSLQLVAFIFSLPFCQAQGIEHFFCDVPPVMHVVCAQSHIHEQSVLVAAILAIAVPFFLITTSYTFIVAALLKIHSAAGRHRAFSTCSSHLTVVLLQYGCCAFMYLCPSSSYNPKQDRFISLVYTLGTPLLNPLIYALRNSEMKGAVGRVLTRNCLSQNS

SEQ ID NO: 5342 - protein, 273 aa, Homo sapiens
MAFLAGPRLLDWASSPPHLQFNKFVLTGYRPASSGSGCLRSLFYLHNELGNIYTHGLALLGFLVLVPMTMPWGQLGKDGWLGGTHCVACLAPPAGSVLYHLFMCHQGGSAVYARLLALDMCGVCLVNTLGALPIIHCTLACRPWLRPAALVGYTVLSGVAGWRALTAPSTSARLRAFGWQAAARLLVFGARGVGLGSGAPGSLPCYLRMDALALLGGLVNVARLPERWGPGRFDYWGNSHQIMHLLSVGSILQLHAGVVPDLLWAAHHACPRD

SEQ ID NO: 5343 - protein, 234 aa, Homo sapiens
MAFLAGPRLLDWASSPPHLQFNKFVLTGYRPASSGSGCLRSLFYLHNELGNIYTHGSVLYHLFMCHQGGSAVYARLLALDMCGVCLVNTLGALPIIHCTLACRPWLRPAALVGYTVLSGVAGWRALTAPSTSARLRAFGWQAAARLLVFGARGVGLGSGAPGSLPCYLRMDALALLGGLVNVARLPERWGPGRFDYWGNSHQIMHLLSVGSILQLHAGVVPDLLWAAHHACPRD

SEQ ID NO: 5344 - protein, 198 aa, Homo sapiens
MAFLAGPRLLDWASSPPHLQFNKFVLTGYRPASSGSGCLRSLFYLHNELGNIYTHALPIIHCTLACRPWLRPAALVGYTVLSGVAGWRALTAPSTSARLRAFGWQAAARLLVFGARGVGLGSGAPGSLPCYLRMDALALLGGLVNVARLPERWGPGRFDYWGNSHQIMHLLSVGSILQLHAGVVPDLLWAAHHACPRD

SEQ ID NO: 5345 - protein, 316 aa, Homo sapiens
MQNQSFVTEFVLLGLSQNPNVQEIVFVVFLFVYIATVGGNMLIVVTILSSPALLVSPMYFFLGFLSFLDACFSSVITPKMIVDSLYVTKTISFEGCMMQLFAEHFFAGVEVIVLTAMAYDRYVAICKPLHYSSIMNRRLCGILMGVAWTGGLLHSMIQILFTFQLPFCGPNVINHFMCDLYPLLELACTDTHIFGLMVVINSGFICIINFSLLLVSYAVILLSLRTHSSEGRWKALSTCGSHIAVVILFFVPCIFVYTRPPSAFSLDKMAAIFYIILNPLLNPLIYTFRNKEVKQAMRRIWNRLMVVSDEKENIKL

SEQ ID NO: 5346 - protein, 277 aa, Homo sapiens
MAAVSVYAPPVGGFSFDNCRRNAVLEADFAKRGYKLPKVRKTGTTIAGVVYKDGIVLGADTRATEGMVVADKNCSKIHFISPNIYCCGAGTAADTDMTTQLISSNLELHSLSTGRLPRVVTANRMLKQMLFRYQGYIGAALVLGGVDVTGPHLYSIYPHGSTDKLPYVTMGSGSLAAMAVFEDKFRPDMEEEEAKNLVSEAIAAGIFNDLGSGSNIDLCVISKNKLDFLRPYTVPNKKGTRLGRYRCEKGTTAVLTEKITPLEIEVLEETVQTMDTS

SEQ ID NO: 5347 - protein, 142 aa, Homo sapiens
MAAVSVYAPPVGGFSFDNCRRNAVLEADFAKRGYKLPKVRKTGTTIAGVVYKDGIVLGADTRATEGMVVADKNCSKIHFISPNIYCCGAGTAADTDMTTQLISSNLELHSLSTGRLPRVVTANRMLKQMLFRFWLLGSNGCI

SEQ ID NO: 5348 - protein, 335 aa, Homo sapiens
MGPLSAPPCTEHIKWKGLLLTALLLNFWNLPTTAQVMIEAQPPKVSEGKDVLLLVHNLPQNLTGYIWYKGQIRDLYHYITSYVVDGQIIIYGPAYSGRETVYSNASLLIQNVTREDAGSYTLHIIKRGDGTRGVTGYFTFTLYLETPKPSISSSNLNPREAMETVILTCNPETPDASYLWWMNGQSLPMTHRMQLSETNRTLFLFGVTKYTAGPYECEIWNSGSASRSDPVTLNLLHGPDLPRIFPSVTSYYSGENLDLSCFANSNPPAQYSWTINGKFQLSGQKLFIPQITPKHNGLYACSARNSATGEESSTSLTIRVIAPPGLGTFAFNNPT

SEQ ID NO: 5349 - protein, 213 aa, Homo sapiens
MGPLSAPPCTEHIKWKGLLLTVETPKPSISSSNLNPREAMETVILTCNPETPDASYLWWMNGQSLPMTHRMQLSETNRTLFLFGVTKYTAGPYECEIWNSGSASRSDPVTLNLLHGPDLPRIFPSVTSYYSGENLDLSCFANSNPPAQYSWTINGKFQLSGQKLFIPQITPKHNGLYACSARNSATGEESSTSLTIRVIAPPGLGTFAFNNPT

SEQ ID NO: 5350 - protein, 73 aa, Homo sapiens
MGVKLEIFRMIIYLTFPVAMFWVSNQAEWFEDDVIQRKRELWPPEKLQEIEEFKERLRKRREEKLLRDAQQNS

SEQ ID NO: 5351 - protein, 419 aa, Homo sapiens
MELKVWVDGVQRIVCGVTEVTTCQEVVIALAQAIGRTGRYTLIEKWRDTERHLAPHENPIISLNKWGQYASDVQLILRRTGPSLSERPTSDSVARIPERTLYRQSLPPLAKLRPQIDKSIKRREPKRKSLTFTGGAKGLMDIFGKGKETEFKQKVLNNCKTTADELKKLIRLQTEKLQSIEKQLESNEIEIRFWEQKYNSNLEEEIVRLEQKIKRNDVEIEEEEFWENELQIEQENEKQLKDQLQEIRQKITECENKLKDYLAQIRTMESGLEAEKLQREVQEAQVNEEEVKGKIGKVKGEIDIQGQQSLRLENGIKAVERSLGQATKRLQDKEQELEQLTKELRQVNLQQFIQQTGTKVTVLPAEPIEIEASHADIEREAPFQSGSLKRPGSSRQLPSNLRILQNPISSGFNPEGIYV

SEQ ID NO: 5352 - protein, 392 aa, Homo sapiens
MELKVWVDGVQRIVCGVTEVTTCQEVVIALAQAIGRTGRYTLIEKWRDTERHLAPHENPIISLNKWGQYASDVQLILRRTGPSLSERPTSDSVARIPERTLYRQSLPPLAKLRPQIDKSIKRREPKRKSLTFTGGAKGLMDIFGKGKETEFKQKVLNNCKTTADELKKLIRLQTEKLQSIEKQLESNEIEIRFWEQKYNSNLEEEIVRLEQKIKRNDVEIEEEEFWENELQIEQENEKQLKDQLQEIRQKITECENKLKDYLAQIRTMESGLEAEKLQREVQEAQVNEEEVKGKIGKVKGEIDIQGQQSLRLENGIKAVERSLGQATKRLQDKEQELEQLTKELRQVNLQQFIQQTGTKVTVLPAEPIEIEASHADIERGIIILSDKQECKD

SEQ ID NO: 5353 - protein, 163 aa, Homo sapiens
MRRLLIPLALWLGAVGVGVAELTEAQRRGLQVALEEFHKHPPVQWAFQETSVESAVDTPFPAGIFVRLEFKLQQTSCRKRDWKKPECKVRPNGRKRKCLACIKLGSEDKVLGRLVHCPIETQVLREAEEHQETQCLRVQRAGEDPHSFYFPGQFAFSKALPRS

SEQ ID NO: 5354 - protein, 189 aa, Homo sapiens
MTEYKLVVVGAGGVGKSALTIQLIQNHFVDEYDPTIEDSYRKQVVIDGETCLLDILDTAGQEEYSAMRDQYMRTGEGFLCVFAINNTKSFEDIHQYREQIKRVKDSDDVPMVLVGNKCDLAARTVESRQAQDLARSYGIPYIETSAKTRQGVEDAFYTLVREIRQHKLRKLNPPDESGPGCMSCKCVLS

SEQ ID NO: 5355 - protein, 170 aa, Homo sapiens
MTEYKLVVVGAGGVGKSALTIQLIQNHFVDEYDPTIEDSYRKQVVIDGETCLLDILDTAGQEEYSAMRDQYMRTGEGFLCVFAINNTKSFEDIHQYREQIKRVKDSDDVPMVLVGNKCDLAARTVESRQAQDLARSYGIPYIETSAKTRQGSRSGSSSSSGTLWDPPGPM

SEQ ID NO: 5356 - protein, 241 aa, Homo sapiens
MLRDTMKSWNDSQSDLCSTDQEEEEEMIFGENEDDLDEMMDLSDLPTSLFACSVHEAVFEAREQKERFEALFTIYDDQVTFQLFKSFRRVRINFSKPEAAARARIELHETDFNGQKLKLYFAQVQMSGEVRDKSYLLPPQPVKQFLISPPASPPVGWKQSEDAMPVINYDLLCAVSKLGPGEKYELHAGTESTPSVVVHVCESETEEEEETKNPKQKIAQTRRPDPPTAALNEPQTFDCAL

SEQ ID NO: 5357 - protein, 231 aa, Homo sapiens
MLRDTMKSWNDSQSDLCSTDQEEEEEMIFGENEDDLDEMMDLSDLPTSLFACSVHEAVFEAREQKERFEALFTIYDDQVTFQLFKSFRRVRINFSKPEAAARARIELHETDFNGQKLKLYFAQSYLLPPQPVKQFLISPPASPPVGWKQSEDAMPVINYDLLCAVSKLGPGEKYELHAGTESTPSVVVHVCESETEEEEETKNPKQKIAQTRRPDPPTAALNEPQTFDCAL

SEQ ID NO: 5358 - protein, 173 aa, Homo sapiens
MLRDTMKSWNDSQSDLCSTDQEEEEEMIFGENEDDLDEMMDLSDLPTSLFACSVHEAVFEAREQKERFEALFTIYDDQVTFQLFKSFRRVRINFSKPEAAARARIELHETDFNGQKLKLYFAQERNMNFTREQSRHPAWWFMSVKVKLKRKKRQKTPNRKLPRRGAPTLRPQR

SEQ ID NO: 5359 - protein, 115 aa, Homo sapiens
MLRDTMKSWNDSQSDLCSTDQEEEEEMIFGENEDDLDEMMDLSDLPTSLFACSVHEAVFEAREQKERNMNFTREQSRHPAWWFMSVKVKLKRKKRQKTPNRKLPRRGAPTLRPQR

SEQ ID NO: 5360 - protein, 183 aa, Homo sapiens
MLRDTMKSWNDSQSDLCSTDQEEEEEMIFGENEDDLDEMMDLSDLPTSLFACSVHEAVFEAREQKVQMSGEVRDKSYLLPPQPVKQFLISPPASPPVGWKQSEDAMPVINYDLLCAVSKLGPGEKYELHAGTESTPSVVVHVCESETEEEEETKNPKQKIAQTRRPDPPTAALNEPQTFDCAL

SEQ ID NO: 5361 - protein, 116 aa, Homo sapiens
MSGEVRDKSYLLPPQPVKQFLISPPASPPVGWKQSEDAMPVINYDLLCAVSKLGPGEKYELHAGTESTPSVVVHVCESETEEEEETKNPKQKIAQTRRPDPPTAALNEPQTFDCAL

SEQ ID NO: 5362 - protein, 215 aa, Homo sapiens
MASRGATRPNGPNTGNKICQFKLVLLGESAVGKSSLVLRFVKGQFHEFQESTIGAAFLTQTVCLDDTTVKFEIWDTAGQERYHSLAPMYYRGAQAAIVVYDITNEESFARAKNWVKELQRQASPNIVIALSGNKADLANKRAVDFQEAQSYADDNSLLFMETSAKTSMNVNEIFMAIAKKLPKNEPQNPGANSARGRGVDLTEPTQPTRNQCCSN

SEQ ID NO: 5363 - protein, 201 aa, Homo sapiens
MASRGATRPNGPNTGNKICQFKLVLLGESAVGKSSLVLRFVKGQFHEFQESTIGVKFEIWDTAGQERYHSLAPMYYRGAQAAIVVYDITNEESFARAKNWVKELQRQASPNIVIALSGNKADLANKRAVDFQEAQSYADDNSLLFMETSAKTSMNVNEIFMAIAKKLPKNEPQNPGANSARGRGVDLTEPTQPTRNQCCSN

SEQ ID NO: 5364 - protein, 464 aa, Homo sapiens
MALVALVAGARLGRRLSGPGLGRGHWTAARRSRSRREAAEAEAEVPVVQYVGERAARADRVFVWGFSFSGALGVPSFVVPSSGPGPRAGARPRRRIQPVPYRLELDQKISSAACGYGFTLLSSKTADVTKVWGMGLNKDSQLGFHRSRKDKTRGYEYVLEPSPVSLPLDRPQETRVLQVSCGRAHSLVLTDREGVFSMGNNSYGQCGRKVVENEIYSESHRVHRMQDFDGQVVQVACGQDHSLFLTDKGEVYSCGWGADGQTGLGHYNITSSPTKLGGDLAGVNVIQVATYGDCCLAVSADGGLFGWGNSEYLQLASVTDSTQVNVPRCLHFSGVGKVRQAACGGTGCAVLNGEGHVFVWGYGILGKGPNLVESAVPEMIPPTLFGLTEFNPEIQVSRIRCGLSHFAALTNKGELFVWGKNIRGCLGIGRLEDQYFPWRVTMPGEPVDVACGVDHMVTLAKSFI

SEQ ID NO: 5365 - protein, 358 aa, Homo sapiens [sequence omitted]

SEQ ID NO: 5366 - protein, 454 aa, Homo sapiens [sequence omitted]

SEQ ID NO: 5367 - protein, 278 aa, Homo sapiens
MSALGSPVRAYDFLLKFLLVGDSDVGKGEILASLQDGAAESPYGHPAGIDYKTTTILLDGRRVKLQLWDTSGQGRFCTIFRSYSRGAQGVILVYDIANRWSFDGIDRWIKEIDEHAPGVPKILVGNRLHLAFKRQVPTEQAQAYAERLGVTFFEVSPLCNFNITESFTELARIVLLRHGMDRLWRPSKVLSLQDLCCRAVVSCTPVHLVDKLPLPIALRSHLKSFSMANGLNARMMHGGSYSLTTSSTHKRSSLRKVKLVRPPQSPPKNCTRNSCKIS

SEQ ID NO: 5368 - protein, 928 aa, Homo sapiens
MPPKTPRKTAATAAAAAAEPPAPPPPPPPEEDPEQDSGPEDLPLVRLEFEETEEPDFTALCQKLKIPDHVRERAWLTWEKVSSVDGVLGGYIQKKKELWGICIFIAAVDLDEMSFTFTELQKNIEISVHKFFNLLKEIDTSTKVDNAMSRLLKKYDVLFALFSKLERTCELIYLTQPSSSISTEINSALVLKVSWITFLLAKGEVLQMEDDLVISFQLMLCVLDYFIKLSPPMLLKEPYKTAVIPINGSPRTPRRGQNRSARIAKQLENDTRIIEVLCKEHECNIDEVKNVYFKNFIPFMNSLGLVTSNGLPEVENLSKRYEEIYLKNKDLDARLFLDHDKTLQTDSIDSFETQRTPRKSNLDEEVNVIPPHTPVRTVMNTIQQLMMILNSASDQPSENLISYFNNCTVNPKESILKRVKDIGYIFKEKFAKAVGQGCVEIGSQRYKLGVRLYYRVMESMLKSEEERLSIQNFSKLLNDNIFHMSLLACALEVVMATYSRSTSQNLDSGTDLSFPWILNVLNLKAFDFYKVIESFIKAEGNLTREMIKHLERCEHRIMESLAWLSDSPLFDLIKQSKDREGPTDHLESACPLNLPLQNNHTAADMYLSPVRSPKKKGSTTRVNSTANAETQATSAFQTQKPLKSTSLSLFYKKVYRLAYLRLNTLCERLLSEHPELEHIIWTLFQHTLQNEYELMRDRHLDQIMMCSMYGICKVKNIDLKFKIIVTAYKDLPHAVQETFKRVLIKEEEYDSIIVFYNSVFMQRLKTNILQYASTRPPTLSPIPHIPRSPYKFPSSPLRIPGGNIYISPLKSPYKISEGLPTPTKMTPRSRILVSIGESFGTSEKFQKINQMVCNSDRVLKRSAEGSNPPKPLKKLRFDIEGSDEADGSKHLPGESKFQQKLAEMTSTRTRMQKQKMNDSMDTSNKEEK

SEQ ID NO: 5369 - protein, 278 aa, Homo sapiens
MSAPGSPDQAYDFLLKFLLVGDRDVGKSEILESLQDGTAESPYSHLGGIDYKTTTILLDGQRVKLKLWDTSGQGRFCTIFRSYSRGAQGVILVYDIANRWSFEGMDRWIKKIEEHAPGVPKILVGNRLHLAFKRQVPREQAQAYAERLGVTFFEVSPLCNFNIIESFTELARIVLLRHRLNWLGRPSKVLSLQDLCCRTIVSCTPVHLVDKLPLPIALRSHLKSFSMAKGLNARMMRGLSYSLTTSSTHKRSSLCKVKIVCPPQSPPKNCTRNSCKIS

SEQ ID NO: 5370 - protein, 212 aa, Homo sapiens
MAQAHRTPQPRAAPSQPRVFKLVLLGSGSVGKSSLALRYVKNDFKSILPTVGCAFFTKVVDVGATSLKLEIWDTAGQEKYHSVCHLYFRGANAALLVYDITRKDSFLKAQQWLKDLEEELHPGEVLVMLVGNKTDLSQEREVTFQEGKEFADSQKLLFMETSAKLNHQVSEVFNTVAQELLQRSDEEGQALRGDAAVALNKGPARQAKCCAH

SEQ ID NO: 5371 - protein, 85 aa, Homo sapiens
MLVGNKTDLSQEREVTFQEGKEFADSQKLLFMETSAKLNHQVSEVFNTVAQELLQRSDEEGQALRGDAAVALNKGPARQAKCCAH

SEQ ID NO: 5372 - protein, 236 aa, Homo sapiens
MASLDRVKVLVLGDSGVGKSSLVHLLCQNQVLGNPSWTVGCSVDVRVHDYKEGTPEEKTYYIELWDVGGSVGSASSVKSTRAVFYNSVNGIIFVHDLTNKKSSQNLRRWSLEALNRDLVPTGVLVTNGDYDQEQFADNQIPLLVIGTKLDQIHETKRHEVLTRTAFLAEDFNPEEINLDCTNPRYLAAGSSNAVKLSRFFDKVIEKRYFLREGNQIPGFPDRKRFGAGTLKSLHYD

SEQ ID NO: 5373 - protein, 145 aa, Homo sapiens [sequence omitted]

SEQ ID NO: 5374 - protein, 469 aa, Homo sapiens
MQMADAATIATMNKAAGGDKLAELFSLVPDLLEAANTSGNASLQLPDLWWELGLELPDGAPPGHPPGSGGAESADTEARVRILISVVYWVVCALGLAGNLLVLYLMKSMQGWRKSSINLFVTNLALTDFQFVLTLPFWAVENALDFKWPFGKAMCKIVSMVTSMNMYASVFFLTAMSVTRYHSVASALKSHRTRGHGRGDCCGRSLGDSCCFSAKALCVWIWALAALASLPSAIFSTTVKVMGEELCLVRFPDKLLGRDRQFWLGLYHSQKVLLGFVLPLGIIILCYLLLVRFIADRRAAGTKGGAAVAGGRPTGASARRLSKVTKSVTIVVLSFFLCWLPNQALTTWSILIKFNAVPFSQEYFLCQVYAFPVSVCLAHSNSCLNPVLYCLVRREFRKALKSLLWRIASPSITSMRPFTATTKPEHEDQGLQAPAPPHAAAEPDLLYYPPGVVVYSGGRYDLLPSSSAY

SEQ ID NO: 5375 - protein, 263 aa, Homo sapiens
MARGPKKHLKRVAAPKHWMLDKLTGVFAPRPSTGPHKLRECLPLIVFLRNRLKYALTGDEVKKICMQRFIKIDGKVRVDVTYPAGFMDVISIEKTGEHFRLVYDTKGRFAVHRITVEEAKYKLCKVRKITVGVKGIPHLVTHDARTIRYPDPVIKVNDTVQIDLGTGKIINFIKFDTGNLCMVIGGANLGRVGVITNRERHPGSFDVVHVKDANGNSFATRLSNIFVIGNGNKPWISLPRGKGIRLTVAEERDKRLATKQSSG

SEQ ID NO: 5376 - protein, 427 aa, Homo sapiens [sequence omitted]

SEQ ID NO: 5377 - protein, 392 aa, Homo sapiens
MVEADRPGKLFIGGLNLETDEKALEAEFGKYGRIVEVLLMKDRETNKSRGFAFVTFESPADAKAAARDMNGKSLDGKAIKVAQATKPAFESSRRGPPPPRSRGRPRFLRGTRGGGGGPRRSPSRGGPDDDGGYTADFDLRPSRAPMPMKRGPPPRRVGPPPKRAAPSGPARSSGGGMRGRALAVRGRDGYSGPPRREPLPPRRDPYLGPRDEGYSSRDGYSSRDYREPRGFAPSPGEYTHRDYGHSSVRDDCPLRGYSDRDGYGGRDRDYGDHLSRGSHREPFESYGELRGAAPGRGTPPSYGGGGRYEEYRGYSPDAYSGGRDSYSSSYGRSDRYSRGRHRVGRPDRGLSLSMERGCPPQRDSYSRSGCRVPRGGGRLGGRLERGGGRSRY

SEQ ID NO: 5378 - protein, 215 aa, Homo sapiens
MTARGTPSRFLASVLHNGLGRYVQQLQRLSFSVSRDGASSRGAREFVEREVIDFARRNPGVVIYVNSRPCCVPRVVAEYLNGAVREESIHCKSVEEISTLVQKLADQSGLDVIRIRKPFHTDNPSIQGQWHPFTNKPTTFRGLRPREVQDPAPAQDTGLRLSAVAPQILLPGWPDPPDLPTVDPISSSLTSAPAPMLSAVSCLPIVPALTTVCSA

SEQ ID NO: 5379 - protein, 202 aa, Homo sapiens
MTARGTPSRFLASVLHNGLGRYVQQLQRLSFSVSRDGASSRGAREFVEREVIDFARRNPGVVIYVNSRPCCVPRVVAEYLNGAVREESIHCKSVEEISTLVQKLADQSGLDVIRIRKPFHTDNPSIQGQWHPFTNKPTTFRGLRPREVQDPAPAQDTGLRLSAVAPQILLPGWPDPISVQSSDLPWGNTHYRPEPLSSTTWL

SEQ ID NO: 5380 - protein, 164 aa, Homo sapiens
MTARGTPSRFLASVLHNGLGRYVQQLQRLSFSVSRDGASSRGAREFVEREVIDFARRNPGVVIYVNSRPCCVPRVVAEYLNGAVREESIHCKSVEEISTLVQKLADQSGLDVIRIRKPFHTDNPSIQGQWHPFTNKPTTFRGLRPREVQDPAPAQCLLLGAVTL

SEQ ID NO: 5381 - protein, 159 aa, Homo sapiens
MTARGTPSRFLASVLHNGLGRYVQQLQRLSFSVSRDGASSRGAREFVEREVIDFARRNPGVVIYVNSRPCCVPRVVAEYLNGAVREESIHCKSVEEISTLVQKLADQSGLDVIRIRKPFHTDNPSIQGQWHPFTNKPTTFRGLRPREVQDPAPAQVQAQ

SEQ ID NO: 5382 - protein, 235 aa, Homo sapiens
MTARGTPSRFLASVLHNGLGRYVQQLQRLSFSVSRDGASSRGAREFVEREVIDFARRNPGVVIYVNSRPCCVPRVVAEYLNGAVREESIHCKSVEEISTLVQKLADQSGLDVIRIRKPFHTDNPSIQGQWHPFTNKPTTFRGLRPREVQDPAPAQDAAEFLGEGAGPCWYSIVALPQKHIAIAIHPPQPAGQCHQAIGHWPETVCSCTADPPARLARPNISSVIRSSLGKYPLPS

SEQ ID NO: 5383 - protein, 261 aa, Homo sapiens
MTARGTPSRFLASVLHNGLGRYVQQLQRLSFSVSRDGASSRGAREFVEREVIDFARRNPGVVIYVNSRPCCVPRVVAEYLNGAVREESIHCKSVEEISTLVQKLADQSGLDVIRIRKPFHTDNPSIQGQWHPFTNKPTTFRGLRPREVQDPAPAQDAAEFLGEGAGPCWYSIVALPQKHIAIAIHPPQPAGQCHQAIGHWPETVCSCTADPPARLARPTRPPHSGSYLILIDLCSSPYAVRSFLPPDCPCTDHCVLSVKAA

SEQ ID NO: 5384 - protein, 1388 aa, Homo sapiens
MSRPPPTGKMPGAPETAPGDGAGASRQRKLEALIRDPRSPINVESLLDGLNSLVLDLDFPALRKNKNIDNFLNRYEKIVKKIRGLQMKAEDYDVVKVIGRGAFGEVQLVRHKASQKVYAMKLLSKFEMIKRSDSAFFWEERDIMAFANSPWVVQLFYAFQDDRYLYMVMEYMPGGDLVNLMSNYDVPEKWAKFYTAEVVLALDAIHSMGLIHRDVKPDNMLLDKHGHLKLADFGTCMKMDETGMVHCDTAVGTPDYISPEVLKSQGGDGFYGRECDWWSVGVFLYEMLVGDTPFYADSLVGTYSKIMDHKNSLCFPEDAEISKHAKNLICAFLTDREVRLGRNGVEEIRQHPFFKNDQWHWDNIRETAAPVVPELSSDIDSSNFDDIEDDKGDVETFPIPKAFVGNQLPFIGFTYYRENLLLSDSPSCRETDSIQSRKNEESQEIQKKLYTLEEHLSNEMQAKEELEQKCKSVNTRLEKTAKELEEEITLRKSVESALRQLEREKALLQHKNAEYQRKADHEADKKRNLENDVNSLKDQLEDLKKRNQNSQISTEKVNQLQRQLDETNALLRTESDTAARLRKTQAESSKQIQQLESNNRDLQDKNCLLETAKLKLEKEFINLQSALESERRDRTHGSEIINDLQGRICGLEEDLKNGKILLAKVELEKRQLQERFTDLEKEKSNMEIDMTYQLKVIQQSLEQEEAEHKATKARLADKNKIYESIEEAKSEAMKEMEKKLLEERTLKQKVENLLLEAEKRCSLLDCDLKQSQQKINELLKQKDVLNEDVRNLTLKIEQETQKRCLTQNDLKMQTQQVNTLKMSEKQLKQENNHLMEMKMNLEKQNAELRKERQDADGQMKELQDQLEAEQYFSTLYKTQVRELKEECEEKTKLGKELQQKKQELQDERDSLAAQLEITLTKADSEQLARSIAEEQYSDLEKEKIMKELEIKEMMARHKQELTEKDATIASLEETNRTLTSDVANLANEKEELNNKLKDVQEQLSRLKDEEISAAAIKAQFEKQLLTERTLKTQAVNKLAEIMNRKEPVKRGNDTDVRRKEKENRKLHMELKSEREKLTQQMIKYQKELNEMQAQIAEESQIRIELQMTLDSKDSDIEQLRSQLQALHIGLDSSSIGSGPGDAEADDGFPESRLEGWLSLPVRNNTKKFGWVKKYVIVSSKKILFYDSEQDKEQSNPYMVLDIDKLFHVRPVTQTDVYRADAKEIPRIFQILYANEGESKKEQEFPVEPVGEKSNYICHKGHEFIPTLYHFPTNCEACMKPLWHMFKPPPALECRRCHIKCHKDHMDKKEEIIAPCKVYYDISTAKNLLLLANSTEEQQKWVSRLVKKIPKKPPAPDPFARSSPRTSMKIQQNQSIRRPSRQLAPNKPS

SEQ ID NO: 5385 - protein, 247 aa, Homo sapiens
MASQPPEDTAESQASDELECKICYNRYNLKQRKPKVLECCHRVCAKCLYKIIDFGDSPQGVIVCPFCRFETCLPDDEVSSLPDDNNILVNLTCGGKGKKCLPENPTELLLTPKRLASLVSPSHTSSNCLVITIMEVQRESSPSLSSTPVVEFYRPASFDSVTTVSHNWTVWNCTSLLFQTSIRVLVWLLGLLYFSSLPLGIYLLVSKKVTLGVVFVSLVPSSLVILMVYGFCQCVCHEFLDCMAPPS

SEQ ID NO: 5386 - protein, 192 aa, Homo sapiens
MAEQQGRELEAECPVCWNPFNNTFHTPKMLDCCHSFCVECLAHLSLVTPARRRLLCPLCRQPTVLASGQPVTDLPTDTAMLALLRLEPHHVILEGHQLCLKDQPKSRYFLRQPQVYTLDLGPQPGGQTGPPPDTASATVSTPILIPSHHSLRECFRNPQFRIFAYLMAVILSVTLLLIFSIFWTKQFLWGVG

SEQ ID NO: 5387 - protein, 538 aa, Homo sapiens
MEESVNQMQPLNEKQIANSQDGYVWQVTDMNRLHRFLCFGSEGGTYYIKEQKLGLENAEALIRLIEDGRGCEVIQEIKSFSQEGRTTKQEPMLFALAICSQCSDISTKQAAFKAVSEVCRIPTHLFTFIQFKKDLKESMKCGMWGRALRKAIADWYNEKGGMALALAVTKYKQRNGWSHKDLLRLSHLKPSSEGLAIVTKYITKGWKEVHELYKEKALSVETEKLLKYLEAVEKVKRTRDELEVIHLIEEHRLVREHLLTNHLKSKEVWKALLQEMPLTALLRNLGKMTANSVLEPGNSEVSLVCEKLCNEKLLKKARIHPFHILIALETYKTGHGLRGKLKWRPDEEILKALDAAFYKTFKTVEPTGKRFLLAVDVSASMNQRVLGSILNASTVAAAMCMVVTRTEKDSYVVAFSDEMVPCPVTTDMTLQQVLMAMSQIPAGGTDCSLPMIWAQKTNTPADVFIVFTDNETFAGGVHPAIALREYRKKMDIPAKLIVCGMTSNGFTIADPDDRGMLDMCGFDTGALDVIRNFTLDMI

SEQ ID NO: 5388 - protein, 205 aa, Homo sapiens
MEESVNQMQPLNEKQIANSQDGYVWQVTDMNRLHRFLCFGSEGGTYYIKEQKLGLENAEALIRLIEDGRGCEVIQEIKSFSQEGRTTKQEPMLFALAICSQCSDISTKQAAFKAVSEVCRIPTHLFTFIQFKKDLKESMKCGMWGRALRKAIADWYNEKGGMALALAVTKYKQRNGWSHKDLLRLSHLKPSSEGKHKIFIGKKGG

SEQ ID NO: 5389 - protein, 518 aa, Homo sapiens
MEESVNQMQPLNEKQIANSQDGYVWQVTDMNRLHRFLCFGSEGGTYYIKEQKLGLENAEALIRLIEDGRGCEVIQEIKSFSQEGRTTKQEPMLFALAICSQCSDISTKQAAFKAVSEVCRIPTHLFTFIQFKKDLKESMKCGMWGRALRKAIADWYNEKGGMALALAVTKYKQRNGWSHKDLLRLSHLKPSSEGLAIVTKYITKGWKEVHELYKEKALSVETEKLLKYLEAVEKVKRTRDELEVIHLIEEHRLVREHLLTNHLKSKEVWKALLQEMPLTALLRNLGKMTANSVLEPGNSEVSLVCEKLCNEKLLKKARIHPFHILIALETYKTGHGLRGKLKWRPDEEILKALDAAFYKTFKTVEPTGKRFLLAVDVSASMNQRVLGSILNASTVAAAMCMVVTRTEKDSYVVAFSDEMVPCPVTTDMTLQQVLMAMSQIPAGGTDCSLPMIWAQKTNTPADVFIVFTDNETFAGGVHPAIALREYRKKMDIPAKLIVCGMTSNGFTIADPDDRDTVK

SEQ ID NO: 5390 - protein, 534 aa, Homo sapiens
MEESVNQMQPLNEKQIANSQDGYVWQVTDMNRLHRFLCFGSEGGTYYIKEQKLGLENAEALIRLIEDGRGCEVIQEIKSFSQEGRTTKQEPMLFALAICSQCSDISTKQAAFKAVSEVCRIPTHLFTFIQFKKDLKESMKCGMWGRALRKAIADWYNEKGGMALALAVTKYKQRNGWSHKDLLRLSHLKPSSEGLAIVTKYITKGWKEVHELYKEKALSVETEKLLKYLEAVEKVKRTRDELEVIHLIEEHRLVREHLLTNHLKSKEVWKALLQEMPLTALLRNLGKMTANSVLEPGNSEVSLVCEKLCNEKLLKKARIHPFHILIALETYKTGHGLRGKLKWRPDEEILKALDAAFYKTFKTVEPTGKRFLLAVDVSASMNQRVLGSILNASTVAAAMCMVVTRTEKDSYVVAFSDEMVPCPVTTDMTLQQVLMAMSQIPAGGTDCSLPMIWAQKTNTPADVFIVFTDNETFAGGVHPAIALREYRKKMDIPAKLIVCGMTSNGFTIADPDDRGMLDMCGFDTGALDPCKIPY

SEQ ID NO: 5391 - protein, 525 aa, Homo sapiens
MEESVNQMQPLNEKQIANSQDGYVWQVTDMNRLHRFLCFGSEGGTYYIKEQKLGLENAEALIRLIEDGRGCEVIQEIKSFSQEGRTTKQEPMLFALAICSQCSDISTKQAAFKAVSEVCRIPTHLFTFIQFKKDLKESMKCGMWGRALRKAIADWYNEKGGMALALAVTKYKQRNGWSHKDLLRLSHLKPSSEGLAIVTKYITKGWKEVHELYKEKALSVETEKLLKYLEAVEKVKRTRDELEVIHLIEEHRLVREHLLTNHLKSKEVWKALLQEMPLTALLRNLGKMTANSVLEPGNSEVSLVCEKLCNEKLLKKARIHPFHILIALETYKTGHGLRGKLKWRPDEEILKALDAAFYKTFKTVEPTGKRFLLAVDVSASMNQRVLGSILNASTVAAAMCMVVTRTEKDSYVVAFSDEMVPCPVTTDMTLQQVLMAMSQIPAGGTDCSLPMIWAQKTNTPADVFIVFTDNETFAGGVHPAIALREYRKKMDIPAKLIVCGMTSNGFTIADPDDRALQNTLLNKSF

SEQ ID NO: 5392 - protein, 470 aa, Homo sapiens
MCENQLKTKADATAQIEVIPCKICGDKSSGIHYGVITCEGCKGFFRRSQQNNASYSCPRQRNCLIDRTNRNRCQHCRLQKCLALGMSRDAVKFGRMSKKQRDSLYAEVQKHQQRLQEQRQQQSGEAEALARVYSSSISNGLSNLNNETSGTYANGHVIDLPKSEGYYNVDSGQPSPDQSGLDMTGIKQIKQEPIYDLTSVPNLFTYSSFNNGQLAPGITMTEIDRIAQNIIKSHLETCQYTMEELHQLAWQTHTYEEIKAYQSKSREALWQQCAIQITHAIQYVVEFAKRITGFMELCQNDQILLLKSGCLEVVLVRMCRAFNPLNNTVLFEGKYGGMQMFKALGSDDLVNEAFDFAKNLCSLQLTEEEIALFSSAVLISPDRAWLIEPRKVQKLQEKIYFALQHVIQKNHLDDETLAKLIAKIPTITAVCNLHGEKLQVFKQSHPEIVNTLFPPLYKELFNPDCATGCK

SEQ ID NO: 5393 - protein, 459 aa, Homo sapiens
MRAQIEVIPCKICGDKSSGIHYGVITCEGCKGFFRRSQQNNASYSCPRQRNCLIDRTNRNRCQHCRLQKCLALGMSRDAVKFGRMSKKQRDSLYAEVQKHQQRLQEQRQQQSGEAEALARVYSSSISNGLSNLNNETSGTYANGHVIDLPKSEGYYNVDSGQPSPDQSGLDMTGIKQIKQEPIYDLTSVPNLFTYSSFNNGQLAPGITMTEIDRIAQNIIKSHLETCQYTMEELHQLAWQTHTYEEIKAYQSKSREALWQQCAIQITHAIQYVVEFAKRITGFMELCQNDQILLLKSGCLEVVLVRMCRAFNPLNNTVLFEGKYGGMQMFKALGSDDLVNEAFDFAKNLCSLQLTEEEIALFSSAVLISPDRAWLIEPRKVQKLQEKIYFALQHVIQKNHLDDETLAKLIAKIPTITAVCNLHGEKLQVFKQSHPEIVNTLFPPLYKELFNPDCATGCK

SEQ ID NO: 5394 - protein, 305 aa, Homo sapiens
MSFLRITPSTHSSVSSGLLRLSIFLLLSFPDSNGKAIWTAHLNITFQVGNEITSELGESGVFGNHSPLERVSGVVALPEGWNQNACHPLTNFSRPKQADSWLALIERGGCTFTHKINVAAEKGANGVIIYNYQGTGSKVFPMSHQGTENIVAVMISNLKGMEILHSIQKGVYVTVIIEVGRMHMQWVSHYIMYLFTFLAATIAYFYLDCVWRLTPRVPNSFTRRRSQIKTDVKKAIDQLQLRVLKEGDEELDLNEDNCVVCFDTYKPQDVVRILTCKHFFHKACIDPWLLAHRTCPMCKCDILKT

SEQ ID NO: 5395 - protein, 1386 aa, Homo sapiens
MLRYLLKTLLQMNLFADSLAGDISNSSELLLGFNSSLAALNHTLLPPGDPSLNGSRVGPEDAMPRIVEQPPDLLVSRGEPATLPCRAEGRPRPNIEWYKNGARVATVREDPRAHRLLLPSGALFFPRIVHGRRARPDEGVYTCVARNYLGAAASRNASLEVAVLRDDFRQSPGNVVVAVGEPAVLECVPPRGHPEPSVSWRKDGARLKEEEGRITIRGGKLMMSHTLKSDAGMYVCVASNMAGERESAAAEVMVLERPSFLRRPVNQVVLADAPVTFLCEVKGDPPPRLRWRKEDGELPTGRYEIRSDHSLWIGHVSAEDEGTYTCVAENSVGRAEASGSLSVHVPPQLVTQPQDQMAAPGESVAFQCETKGNPPPAIFWQKEGSQVLLFPSQSLQPTGRFSVSPRGQLNITAVQRGDAGYYVCQAVSVAGSILAKALLEIKGASLDGLPPVILQGPANQTLVLGSSVWLPCRVTGNPQPSVRWKKDGQWLQGDDLQFKTMANGTLYIANVQEMDMGFYSCVAKSSTGEATWSGWLKMREDWGVSPDPPTEPSSPPGAPSQPVVTEITKNSITLTWKPNPQTGAAVTSYVIEAFSPAAGNTWRTVADGVQLETHTVSGLQPNTIYLFLVRAVGAWGLSEPSPVSEPVRTQDSSPSRPVEDPWRGQQGLAEVAVRLQEPIVLGPRTLQVSWTVDGPVQLVQGFRVSWRVAGPEGGSWTMLDLQSPSQQSTVLRGLPPGTQIQIKVQAQGQEGLGAESLSVTRSIPEEAPSGPPQGVAVALGGDGNSSITVSWEPPLPSQQNGVITEYQIWCLGNESRFHLNRSAAGWARSAMLRGLVPGLLYRTLVAAATSAGVGVPSAPVLVQLPSPPDLEPGLEVGAGLAVRLARVLREPAFLAGSGAACGALLLGLCAALYWRRKQRKELSHYTASFAYTPAVSFPHSEGLSGASSRPPMGLGPAPYSWLADSWPHPSRSPSAQEPRGSCCPSNPDPDDRYYNEAGISLYLAQTARGTAAPGEGPVYSTIDPAGEELQTFHGGFPQHPSGDLGPWSQYAPPEWSQGDSGAKGGKVKLLGKPVQMPSLNWPEALPPPPPSCELSCLEGPEEELEGSSEPEEWCPPMPERSHLTEPSSSGGCLVTPSRRETPSPTPSYGQQSTATLTPSPPDPPQPPTDMPHLHQMPRRVPLGPSSPLSVSQPMLGIREARPAGLGAGPAASPHLSPSPAPSTASSAPGRTWQGNGEMTPPLQGPRARFRKKPKALPYRRENSPGDLPPPPLPPPEEEASWALELRAAGSMSSLERERSGERKAVQAVPLAAQRVLHPDEEAWLPYSRPSFLSRGQGTSTCSTAGSNSSRGSSSSRGSRGPGRSRSRSQSRSQSQRPGQKRREEPR

SEQ ID NO: 5396 - protein, 1034 aa, Homo sapiens
MLRYLLKTLLQMNLFADSLAGDISNSSELLLGFNSSLAALNHTLLPPGDPSLNGSRVGPEDAMPRIVEQPPDLLVSRGEPATLPCRAEGRPRPNIEWYKNGARVATVREDPRAHRLLLPSGALFFPRIVHGRRARPDEGVYTCVARNYLGAAASRNASLEVAVLRDDFRQSPGNVVVAVGEPAVLECVPPRGHPEPSVSWRKDGARLKEEEGRITIRGGKLMMSHTLKSDAGMYVCVASNMAGERESAAAEVMVLERPSFLRRPVNQVVLADAPVTFLCEVKGDPPPRLRWRKEDGELPTGRYEIRSDHSLWIGHVSAEDEGTYTCVAENSVGRAEASGSLSVHVPPQLVTQPQDQMAAPGESVAFQCETKGNPPPAIFWQKEGSQVLLFPSQSLQPTGRFSVSPRGQLNITAVQRGDAGYYVCQAVSVAGSILAKALLEIKGASLDGLPPVILQGPANQTLVLGSSVWLPCRVTGNPQPSVRWKKDGQWLQGDDLQFKTMANGTLYIANVQEMDMGFYSCVAKSSTGEATWSGWLKMREDWGVSPDPPTEPSSPPGAPSQPVVTEITKNSITLTWKPNPQTGAAVTSYVIEAFSPAAGNTWRTVADGVQLETHTVSGLQPNTIYLFLVRAVGAWGLSEPSPVSEPVRTQDSSPSRPVEDPWRGQQGLAEVAVRLQEPIVLGPRTLQVSWTVDGPVQLVQGFRVSWRVAGPEGGSWTMLDLQSPSQQSTVLRGLPPGTQIQIKVQAQGQEGLGAESLSVTRSIPEEAPSGPPQGVAVALGGDGNSSITVSWEPPLPSQQNGVITEYQIWCLGNESRFHLNRSAAGWARSAMLRGLVPGLLYRTLVAAATSAGVGVPSAPVLVQLPSPPDLEPGLEVGAGLAVRLARVLREPAFLAGSGAACGALLLGLCAALYWRRKQRKELSHYTASFAYTPAVSFPHSEGLSGASSRPPMGLGPAPYSWLADSWPHPSRSPSAQEPRGSCCPSNPDPDDRYYNEAGISLYLAQTARGTAAPGEGPVYSTIDPLTTPLLILTT

SEQ ID NO: 5397 - protein, 937 aa, Homo sapiens
MHRPRRRGTRPPLLALLAALLLAARGAAAQETELSVSAELVPTSSWNISSELNKDSYLTLDEPMNNITTSLGQTAELHCKVSGNPPPTIRWFKNDAPVVQEPRRLSFRSTIYGSRLRIRNLDTTDTGYFQCVATNGKEVVSSTGVLFVKFGPPPTASPGYSDEYEEDGFCQPYRGIACARFIGNRTVYMESLHMQGEIENQITAAFTMIGTSSHLSDKCSQFAIPSLCHYAFPYCDETSSVPKPRDLCRDECEILENVLCQTEYIFARSNPMILMRLKLPNCEDLPQPESPEAANCIRIGIPMADPINKNHKCYNSTGVDYRGTVSVTKSGRQCQPWNSQYPHTHTFTALRFPELNGGHSYCRNPGNQKEAPWCFTLDENFKSDLCDIPACDSKDSKEKNKMEILYILVPSVAIPLAIALLFFFICVCRNNQKSSSAPVQRQPKHVRGQNVEMSMLNAYKPKSKAKELPLSAVRFMEELGECAFGKIYKGHLYLPGMDHAQLVAIKTLKDYNNPQQWTEFQQEASLMAELHHPNIVCLLGAVTQEQPVCMLFEYINQGDLHEFLIMRSPHSDVGCSSDEDGTVKSSLDHGDFLHIAIQIAAGMEYLSSHFFVHKDLAARNILIGEQLHVKISDLGLSREIYSADYYRVQSKSLLPIRWMPPEAIMYGKFSSDSDIWSFGVVLWEIFSFGLQPYYGFSNQEVIEMVRKRQLLPCSEDCPPRMYSLMTECWNEIPSRRPRFKDIHVRLRSWEGLSSHTSSTTPSGGNATTQTTSLSASPVSNLSNPRYPNYMFPSQGITPQGQIAGFIGPPIPQNQRFIPINGYPIPPGYAAFPAAHYQPTGPPRVIQHCPPPKSRSPSSASGSTSTGHVTSLPSSGSNQEANIPLLPHMSIPNHPGGMGITVFGNKSQKPYKIDSKQASLLGDANIHGHTESMISAEL

SEQ ID NO: 5398 - protein, 388 aa, Homo sapiens
MLFEYINQGDLHEFLIMRSPHSDVGCSSDEDGTVKSSLDHGDFLHIAIQIAAGMEYLSSHFFVHKDLAARNILIGEQLHVKISDLGLSREIYSADYYRVQSKSLLPIRWMPPEAIMYGKFSSDSDIWSFGVVLWEIFSFGLQPYYGFSNQEVIEMVRKRQLLPCSEDCPPRMYSLMTECWNEIPSRRPRFKDIHVRLRSWEGLSSHTSSTTPSGGNATTQTTSLSASPVSNLSNPRYPNYMFPSQGITPQGQIAGFIGPPIPQNQRFIPINGYPIPPGYAAFPAAHYQPTGPPRVIQHCPPPKSRSPSSASGSTSTGHVTSLPSSGSNQEANIPLLPHMSIPNHPGGMGITVFGNKSQKPYKIDSKQASLLGDANIHGHTESMISAEL

SEQ ID NO: 5399 - protein, 393 aa, Homo sapiens
MHRPRRRGTRPPLLALLAALLLAARGAAAQETELSVSAELVPTSSWNISSELNKDSYLTLDEPMNNITTSLGQTAELHCKVSGNPPPTIRWFKNDAPVVQEPRRLSFRSTIYGSRLRIRNLDTTDTGYFQCVATNGKEVVSSTGVLFVKFGPPPTASPGYSDEYEEDGFCQPYRGIACARFIGNRTVYMESLHMQGEIENQITAAFTMIGTSSHLSDKCSQFAIPSLCHYAFPYCDETSSVPKPRDLCRDECEILENVLCQTEYIFARSNPMILMRLKLPNCEDLPQPESPEAANCIRIGIPMADPINKNHKCYNSTGVDYRGTVSVTKSGRQCQPWNSQYPHTHTFTALRFPELNGGHSYCRNPGNQKEAPWCFTLDENFKSDLCDIPACGK

SEQ ID NO: 5400 - protein, 749 aa, Homo sapiens
MSGSHTPACGPFSALTPSIWPQEILAKYTQKEESAEQPEFYYDEFGFRVYKEEGDEPGSSLLANSPLMEDAPQRLRWQAHLEFTHNHDVGDLTWDKIAVSLPRSEKLRSLVLAGIPHGMRPQLWMRLSGALQKKRNSELSYREIVKNSSNDETIAAKQIEKDLLRTMPSNACFASMGSIGVPRLRRVLRALAWLYPEIGYCQGTGMVAACLLLFLEEEDAFWMMSAIIEDLLPASYFSTTLLGVQTDQRVLRHLIVQYLPRLDKLLQEHDIELSLITLHWFLTAFASVVDIKLLLRIWDLFFYEGSRVLFQLTLGMLHLKEEELIQSENSASIFNTLSDIPSQMEDAELLLGVAMRLAGSLTDVAVETQRRKHLAYLIADQGQLLGAGTLTNLSQVVRRRTQRRKSTITALLFGEDDLEALKAKNIKQTELVADLREAILRVARHFQCTDPKNCSVELTPDYSMESHQRDHENYVACSRSHRRRAKALLDFERHDDDELGFRKNDIITIVSQKDEHCWVGELNGLRGWFPAKFVEVLDERSKEYSIAGDDSVTEGVTDLVRGTLCPALKALFEHGLKKPSLLGGACHPWLFIEEAAGREVERDFASVYSRLVLCKTFRLDEDGKVLTPEELLYRAVQSVNVTHDAVHAQMDVKLRSLICVGLNEQVLHLWLEVLCSSLPTVEKWYQPWSFLRSPGWVQIKCELRVLCCFAFSLSQDWELPAKREAQQPLKEGVRDMLVKHHLFSWDVDG

SEQ ID NO: 5401 - protein, 777 aa, Homo sapiens
MSGSHTPACGPFSALTPSIWPQEILAKYTQKEESAEQPEFYYDEFGFRVYKEEGDEPGSSLLANSPLMEDAPQRLRWQAHLEFTHNHDVGDLTWDKIAVSLPRSEKLRSLVLAGIPHGMRPQLWMRLSGALQKKRNSELSYREIVKNSSNDETIAAKQIEKDLLRTMPSNACFASMGSIGVPRLRRVLRALAWLYPEIGYCQGTGMVAACLLLFLEEEDAFWMMSAIIEDLLPASYFSTTLLGVQTDQRVLRHLIVQYLPRLDKLLQEHDIELSLITLHWFLTAFASVVDIKLLLRIWDLFFYEGSRVLFQLTLGMLHLKEEELIQSENSASIFNTLSDIPSQMEDAELLLGVAMRLAGSLTDVAVETQRRKHLAYLIADQGQLLGAGTLTNLSQVVRRRTQRRKSTITALLFGEDDLEALKAKNIKQTELVADLREAILRVARHFQCTDPKNCSVVSRQLPGLLPNTALTPPTPLVGLCSLWQELTPDYSMESHQRDHENYVACSRSHRRRAKALLDFERHDDDELGFRKNDIITIVSQKDEHCWVGELNGLRGWFPAKFVEVLDERSKEYSIAGDDSVTEGVTDLVRGTLCPALKALFEHGLKKPSLLGGACHPWLFIEEAAGREVERDFASVYSRLVLCKTFRLDEDGKVLTPEELLYRAVQSVNVTHDAVHAQMDVKLRSLICVGLNEQVLHLWLEVLCSSLPTVEKWYQPWSFLRSPGWVQIKCELRVLCCFAFSLSQDWELPAKREAQQPLKEGVRDMLVKHHLFSWDVDG

SEQ ID NO: 5402 - protein, 684 aa, Homo sapiens
MENLQTNFSLVQGSTKKLNGMGDDGSPPAKKMITDIHANGKTINKVPTVKKEHLDDYGEAPVETDGEHVKRTCTSVPETLHLNPSLKHTLAQFHLSSQSSLGGPAAFSARHSQESMSPTVFLPLPSPQVLPGPLLIPSDSSTELTQTVLEGESISCFQVGGEKRLCLPQVLNSVLREFTLQQINTVCDELYIYCSRCTSDQLHILKVLGILPFNAPSCGLITLTDAQRLCNALLRPRTFPQNGSVLPAKSSLAQLKETGSAFEVEHECLGKCQGLFAPQFYVQPDAPCIQCLECCGMFAPQTFVMHSHRSPDKRTCHWGFESAKWHCYLHVNQKYLGTPEEKKLKIILEEMKEKFSMRSGKRNQSKTDAPSGMELQSWYPVIKQEGDHVSQTHSFLHPSYYLYMCDKVVAPNVSLTSAVSQSKELTKTEASKSISRQSEKAHSSGKLQKTVSYPDVSLEEQEKMDLKTSRELCSRLDASISNNSTSKRKSESATCNLVRDINKVGIGLVAAASSPLLVKDVICEDDKGKIMEEVMRTYLKQQEKLNLILQKKQQLQMEVKMLSSSKSMKELTEEQQNLQKELESLQNEHAQRMEEFYVEQKDLEKKLEQIMKQKCTCDSNLEKDKEAEYAGQLAELRQRLDHAEADRQELQDELRQEREARQKLEMMIKELKLQILKSSKTAKE

SEQ ID NO: 5403 - protein, 415 aa, Homo sapiens
MENLQTNFSLVQGSTKKLNGMGDDGSPPAKKMITDIHANGKTINKVPTVKKEHLDDYGEAPVETDGEHVKRTCTSVPETLHLNPSLKHTLAQFHLSSQSSLGGPAAFSARHSQESMSPTVFLPLPSPQVLPGPLLIPSDSSTELTQTVLEGESISCFQVGGEKRLCLPQVLNSVLREFTLQQINTVCDELYIYCSRCTSDQLHILKVLGILPFNAPSCGLITLTDAQRLCNALLRPRTFPQNGSVLPAKSSLAQLKETGSAFEVEHECLGKCQGLFAPQFYVQPDAPCIQCLECCGMFAPQTFVMHSHRSPDKRTCHWGFESAKWHCYLHVNQKYLGTPEEKKLKIILEEMKEKFSMRSGKRNQSKASFLYQFLIMVMVYFEMKILCLVCNLTCMLNIAHATTTKYRLIYLYCSF

SEQ ID NO: 5404 - protein, 638 aa, Homo sapiens
MENLQTNFSLVQGSTKKLNGMGDDGSPPAKKMITDIHANGKTINKVPTVKKEHLDDYGEAPVETDGEHVKRTCTSVPETLHLNPSLKHTLAQFHLSSQSSLGGPAAFSARHSQESMSPTVFLPLPSPQVLPGPLLIPSDSSTELTQTVLEGESISCFQVGGEKRLCLPQVLNSVLREFTLQQINTVCDELYIYCSRCTSDQLHILKVLGILPFNAPSCGLITLTDAQRLCNALLRPRTFPQNGSVLPAKSSLAQLKETGSAFEVEHECLGKCQGLFAPQFYVQPDAPCIQCLECCGMFAPQTFVMHSHRSPDKRTCHWGFESAKWHCYLHVNQKYLGTPEEKKLKIILEEMKEKFSMRSGKRNQSKTDAPSGMELQSWYPVIKQEGDHVSQTHSFLHPSYYLYMCDKVVAPNVSLTSAVSQSKELTKTEANASISNNSTSKRKSESATCNLVRDINKVGIGLVAAASSPLLVKDVICEDDKGKIMEEVMRTYLKQQEKLNLILQKKQQLQMEVKMLSSSKSMKELTEEQQNLQKELESLQNEHAQRMEEFYVEQKDLEKKLEQIMKQKCTCDSNLEKDKEAEYAGQLAELRQRLDHAEADRQELQDELRQEREARQKLEMMIKELKLQILKSSKTAKE

SEQ ID NO: 5405 - protein, 399 aa, Homo sapiens
MENLQTNFSLVQGSTKKLNGMGDDGSPPAKKMITDIHANGKTINKVPTVKKEHLDDYGEAPVETDGEHVKRTCTSVPETLHLNPSLKHTLAQFHLSSQSSLGGPAAFSARHSQESMSPTVFLPLPSPQVLPGPLLIPSDSSTELTQTVLEGESISCFQVGGEKRLCLPQVLNSVLREFTLQQINTVCDELYIYCSRCTSDQLHILKVLGILPFNAPSCGLITLTDAQRLCNALLRPRTFPQNGSVLPAKSSLAQLKETGSAFEVEHECLGKCQGLFAPQFYVQPDAPCIQCLECCGMFAPQTFVMHSHRSPDKRTCHWGFESAKWHCYLHVNQKYLGTPEEKKLKIILEEMKEKFSMRSGKRNQSKTDAPSGMELQSWYPVIKQEGDHVSQTHSFLHPS

SEQ ID NO: 5406 - protein, 664 aa, Homo sapiens
MGDDGSPPAKKMITDIHANGKTINKVPTVKKEHLDDYGEAPVETDGEHVKRTCTSVPETLHLNPSLKHTLAQFHLSSQSSLGGPAAFSARHSQESMSPTVFLPLPSPQVLPGPLLIPSDSSTELTQTVLEGESISCFQVGGEKRLCLPQVLNSVLREFTLQQINTVCDELYIYCSRCTSDQLHILKVLGILPFNAPSCGLITLTDAQRLCNALLRPRTFPQNGSVLPAKSSLAQLKETGSAFEVEHECLGKCQGLFAPQFYVQPDAPCIQCLECCGMFAPQTFVMHSHRSPDKRTCHWGFESAKWHCYLHVNQKYLGTPEEKKLKIILEEMKEKFSMRSGKRNQSKTDAPSGMELQSWYPVIKQEGDHVSQTHSFLHPSYYLYMCDKVVAPNVSLTSAVSQSKELTKTEASKSISRQSEKAHSSGKLQKTVSYPDVSLEEQEKMDLKTSRELCSRLDASISNNSTSKRKSESATCNLVRDINKVGIGLVAAASSPLLVKDVICEDDKGKIMEEVMRTYLKQQEKLNLILQKKQQLQMEVKMLSSSKSMKELTEEQQNLQKELESLQNEHAQRMEEFYVEQKDLEKKLEQIMKQKCTCDSNLEKDKEAEYAGQLAELRQRLDHAEADRQELQDELRQEREARQKLEMMIKELKLQILKSSKTAKE

SEQ ID NO: 5407 - protein, 176 aa, Homo sapiens
MLMPKKNRIAIHELLFKEGVMVAKKDVHMPKHPELADKNVPNLHVMKAMQSLKSRGCVKEQFAWRHFYWYLTNEGSQYLRDYLHLPPEIVPATLHLPPEIVPATLHRSRPETGRPRPKGLEGKRPARLTRREADRDTYRRCSVPPGADKKAEAGAGSATEFQFRGRCGRGRGQPPQ

SEQ ID NO: 5408 - protein, 450 aa, Homo sapiens
MSDFSEELKGPVTDDEEVETSVLSGAGMHFPWLQTYVETVAIGGKRRKDFAQTTSACLSFIQEALLKHQWQQAAEYMYSYFQTLEDSDSYKRQAAPEIIWKLGSEILFYHPKSNMESFNTFANRMKNIGVMNYLKISLQHALYLLHHGMLKDAKRNLSEAETWRHGENTSSREILINLIQAYKGLLQYYTWSEKKMELSKLDKDDYAYNAVAQDVFNHSWKTSANISALIKIPGVWDPFVKSYVEMLEFYGDRDGAQEVLTNYAYDEKFPSNPNAHIYLYNFLKRQKAPRSKLISVLKILYQIVPSHKLMLEFHTLLRKSEKEEHRKLGLEVLFGVLDFAGCTKNITAWKYLAKYLKNILMGNHLAWVQEEWNSRKNWWPGFHFSYFWAKSDWKEDTALACEKAFVAGLLLGKGCRYFRYILKQDHQILGKKIKRMKRSVKKYSIVNPRL

SEQ ID NO: 5409 - protein, 336 aa, Homo sapiens
MESFNTFANRMKNIGVMNYLKISLQHALYLLHHGMLKDAKRNLSEAETWRHGENTSSREILINLIQAYKGLLQYYTWSEKKMELSKLDKDDYAYNAVAQDVFNHSWKTSANISALIKIPGVWDPFVKSYVEMLEFYGDRDGAQEVLTNYAYDEKFPSNPNAHIYLYNFLKRQKAPRSKLISVLKILYQIVPSHKLMLEFHTLLRKSEKEEHRKLGLEVLFGVLDFAGCTKNITAWKYLAKYLKNILMGNHLAWVQEEWNSRKNWWPGFHFSYFWAKSDWKEDTALACEKAFVAGLLLGKGCRYFRYILKQDHQILGKKIKRMKRSVKKYSIVNPRL

SEQ ID NO: 5410 - protein, 519 aa, Homo sapiens
MPFNGEKQCVGEDQPSDSDSSRFSESMASLSDYECSRQSFASDSSSKSSSPASTSPPRVVTFDEVMATARNLSNLTLAHEIAVNENFQLKQEALPEKSLAGRVKHIVHQAFWDVLDSELNADPPEFEHAIKLFEEIREILLSFLTPGGNRLRNQICEVLDTDLIRQQAEHSAVDIQGLANYVISTMGKLCAPVRDNDIRELKATGNIVEVLRQIFHVLDLMQMDMANFTIMSLRPHLQRQLVEYERTKFQEILEETPSALDQTTEWIKESVNEELFSLSESALTPGAENTSKPSLSPTLVLNNSYLKLLQWDYQKKELPETLMTDGARLQELTEKLNQLKIIACLSLITNNMVGAITGGLPELASRLTRISAVLLEGMNKETFNLKEVLNSIGIQTCVEVNKTLMERGLPTLNAEIQANLIGQFSSIEEEDNPIWSLIDKRIKLYMRRLLCLPSPQKCMPPMPGGLAVIQQELEALGSQYANIVNLNKQVYGPFYANILRKLLFNEEAMGKVDASPPTN

SEQ ID NO: 5411 - protein, 266 aa, Homo sapiens
MPFNGEKQCVGEDQPSDSDSSRFSESMASLSDYECSRQSFASDSSSKSSSPASTSPPRVVTFDEVMATARNLSNLTLAHEIAVNENFQLKQEALPEKSLAGRVKHIVHQAFWDVLDSELNADPPEFEHAIKLFEEIREILLSFLTPGGNRLRNQICEVLDTDLIRQQAEHSAVDIQGLANYVISTMGKLCAPVRDNDIRELKATGNIVEVLRQIFHVLDLMQMDMANFTIMSLRPHLQRQLVEYERTKFQEILEETPRKAEVAGAS

SEQ ID NO: 5412 - protein, 313 aa, Homo sapiens
MLLLADMDVVNQLVAGGQFRVVKEPLGFVKVLQWVFAIFAFATCGSYSGELQLSVDCANKTESDLSIEVEFEYPFRLHQVYFDAPTCRGGTTKVFLVGDYSSSAEFFVTVAVFAFLYSMGALATYIFLQNKYRENNKGPMLDFLATAVFAFMWLVSSSAWAKGLSDVKMATDPENIIKEMPVCRQTGNTCKELRDPVTSGLNTSVVFGFLNLVLWVGNLWFVFKETGWAAPFLRAPPGAPEKQPAPGDAYGDAGYGQGPGGYGPQDSYGPQGGYQPDYGQPAGSGGSGYGPQGDYGQQGYGPQGAPTSFSNQM

SEQ ID NO: 5413 - protein, 195 aa, Homo sapiens
MGALATYIFLQNKYRENNKGPMLDFLATAVFAFMWLVSSSAWAKGLSDVKMATDPENIIKEMPVCRQTGNTCKELRDPVTSGLNTSVVFGFLNLVLWVGNLWFVFKETGWAAPFLRAPPGAPEKQPAPGDAYGDAGYGQGPGGYGPQDSYGPQGGYQPDYGQPAGSGGSGYGPQGDYGQQGYGPQGAPTSFSNQM

SEQ ID NO: 5414 - protein, 1023 aa, Homo sapiens
MCARMAGRTTAAPRGPYGPWLCLLVALALDVVRVDCGQAPLDPVYLPAALELLDAPEHFRVQQVGHYPPANSSLSSRSETFLLLQPWPRAQPLLRASYPPFATQQVVPPRVTEPHQRPVPWDVRAVSVEAAVTPAEPYARVLFHLKGQDWPPGSGSLPCARLHATHPAGTAHQACRFQPSLGACVVELELPSHWFSQASTTRAELAYTLEPAAEGPGGCGSGEENDPGEQALPVGGVELRPADPPQYQEVPLDEAVTLRVPDMPVRPGQLFSATLLLRHNFTASLLTLRIKVKKGLHVTAARPAQPTLWTAKLDRFKGSRHHTTLITCHRAGLTEPDSSPLELSEFLWVDFVVENSTGGGVAVTRPVTWQLEYPGQAPEAEKDKMVWEILVSERDIRALIPLAKAEELVNTAPLTGVPQHVPVRLVTVDGGGALVEVTEHVGCESANTQVLQVSEACDAVFVAGKESRGARGVRVDFWWRRLRASLRLTVWAPLLPLRIELTDTTLEQVRGWRVPGPAEGPAEPAAEASDEAERRARGCHLQYQRAGVRFLAPFAAHPLDGGRRLTHLLGPDWLLDVSHLVAPHARVLDSRVASLEGGRVVVGREPGVTSIEVRSPLSDSILGEQALAVTDDKVSVLELRVQPVMGISLTLSRGTAHPGEVTATCWAQSALPAPKQEVALSLWLSFSDHTVAPAELYDRRDLGLSVSAEEPGAILPAEEQGAQLGVVVSGAGAEGLPLHVALHPPEPCRRGRHRVPLASGTAWLGLPPASTPAPALPSSPAWSPPATEATMGGKRQVAGSVGGNTGVRGKFERAEEEARKEETEAREEEEEEEEEMVPAPQHVTELELGMYALLGVFCVAIFIFLVNGVVFVLRYQRKEPPDSATDPTSPQPHNWVWLGTDQEELSRQLDRQSPGPPKGEGSCPCESGGGGEAPTLAPGPPGGTTSSSSTLARKEAGGRRKRVEFVTFAPAPPAQSPEEPVGAPAVQSILVAGEEDIRWVCEDMGLKDPEELRNYMERIRGSS

SEQ ID NO: 5415 - protein, 1024 aa, Homo sapiens
MCARMAGRTTAAPRGPYGPWLCLLVALALDVVRVDCGQAPLDPVYLPAALELLDAPEHFRVQQVGHYPPANSSLSSRSETFLLLQPWPRAQPLLRASYPPFATQQVVPPRVTEPHQRPVPWDVRAVSVEAAVTPAEPYARVLFHLKGQDWPPGSGSLPCARLHATHPAGTAHQACRFQPSLGACVVELELPSHWFSQASTTRAELAYTLEPAAEGPGGCGSGEENDPGEQALPVGGVELRPADPPQYQEVPLDEAVTLRVPDMPVRPGQLFSATLLLRHNFTASLLTLRIKVKKGLHVTAARPAQPTLWTAKLDRFKGSRHHTTLITCHRAGLTEPDSSSPLELSEFLWVDFVVENSTGGGVAVTRPVTWQLEYPGQAPEAEKDKMVWEILVSERDIRALIPLAKAEELVNTAPLTGVPQHVPVRLVTVDGGGALVEVTEHVGCESANTQVLQVSEACDAVFVAGKESRGARGVRVDFWWRRLRASLRLTVWAPLLPLRIELTDTTLEQVRGWRVPGPAEGPAEPAAEASDEAERRARGCHLQYQRAGVRFLAPFAAHPLDGGRRLTHLLGPDWLLDVSHLVAPHARVLDSRVASLEGGRVVVGREPGVTSIEVRSPLSDSILGEQALAVTDDKVSVLELRVQPVMGISLTLSRGTAHPGEVTATCWAQSALPAPKQEVALSLWLSFSDHTVAPAELYDRRDLGLSVSAEEPGAILPAEEQGAQLGVVVSGAGAEGLPLHVALHPPEPCRRGRHRVPLASGTAWLGLPPASTPAPALPSSPAWSPPATEATMGGKRQVAGSVGGNTGVRGKFERAEEEARKEETEAREEEEEEEEEMVPAPQHVTELELGMYALLGVFCVAIFIFLVNGVVFVLRYQRKEPPDSATDPTSPQPHNWVWLGTDQEELSRQLDRQSPGPPKGEGSCPCESGGGGEAPTLAPGPPGGTTSSSSTLARKEAGGRRKRVEFVTFAPAPPAQSPEEPVGAPAVQSILVAGEEDIRWVCEDMGLKDPEELRNYMERIRGSS

SEQ ID NO: 5416 - protein, 412 aa, Homo sapiens
MAPGSAPASSGAVIISPSYASSVDCGQAPLDPVYLPAALELLDAPEHFRVQQVGHYPPANSSLSSRSETFLLLQPWPRAQPLLRASYPPFATQQVVPPRVTEPHQRPVPWDVRAVSVEAAVTPAEPYARVLFHLKGQDWPPGSGSLPCARLHATHPAGTAHQACRFQPSLGACVVELELPSHWFSQASTTRAELAYTLEPAAEGPGGCGSGEENDPGEQALPVGGVELRPADPPQYQEVPLDEAVTLRVPDMPVRPGQLFSATLLLRHNFTASLLTLRIKVKKGLHVTAARPAQPTLWTAKLDRFKGSRHHTTLITCHRAGLTEPDSSPLELSEFLWVDFVVENSTGGGVAVTRPVTWQLEYPGQAPEAEKDKMVWEILVSERDIRALIPLAKVRRPPSLPGKAGGQVPGAP

SEQ ID NO: 5417 - protein, 774 aa, Homo sapiens
MCARMAGRTTAAPRGPYGPWLCLLVALALDVVRVDCGQAPLDPVYLHVTAARPAQPTLWTAKLDRFKGSRHHTTLITCHRAGLTEPDSSSPLELSEFLWVDFVVENSTGGGVAVTRPVTWQLEYPGQAPEAEKDKMVWEILVSERDIRALIPLAKAEELVNTAPLTGVPQHVPVRLVTVDGGGALVEVTEHVGCESANTQVLQVSEACDAVFVAGKESRGARGVRVDFWWRRLRASLRLTVWAPLLPLRIELTDTTLEQVRGWRVPGPAEGPAEPAAEASDEAERRARGCHLQYQRAGVRFLAPFAAHPLDGGRRLTHLLGPDWLLDVSHLVAPHARVLDSRVASLEGGRVVVGREPGVTSIEVRSPLSDSILGEQALAVTDDKVSVLELRVQPVMGISLTLSRGTAHPGEVTATCWAQSALPAPKQEVALSLWLSFSDHTVAPAELYDRRDLGLSVSAEEPGAILPAEEQGAQLGVVVSGAGAEGLPLHVALHPPEPCRRGRHRVPLASGTAWLGLPPASTPAPALPSSPAWSPPATEATMGGKRQVAGSVGGNTGVRGKFERAEEEARKEETEAREEEEEEEEEMVPAPQHVTELELGMYALLGVFCVAIFIFLVNGVVFVLRYQRKEPPDSATDPTSPQPHNWVWLGTDQEELSRQLDRQSPGPPKGEGSCPCESGGGGEAPTLAPGPPGGTTSSSSTLARKEAGGRRKRVEFVTFAPAPPAQSPEEPVGAPAVQSILVAGEEDIRWVCEDMGLKDPEELRNYMERIRGSS

SEQ ID NO: 5418 - protein, 1861 aa, Homo sapiens
MLKAVLKKSREGGKGGKKEAGSDFGPETSPVLHLDHSADSPVSSLPTAEDTYRVSLAKGVSMSLPSSPLLPRQSHLVQSRVNKKSPGPVRKPKYVESPRVPGDAVIMPFREVAKPTEPDEHEAKADNEPSCSPAAQELLTRLGFLLGEGIPSATHITIEDKNETMCTALSQGISPCSTLTSSTASPSTDSPCSTLNSCVSKTAANKSPCETISSPSSTLESKDSGIIATITSSSENDDRSGSSLEWNKDGNLRLGVQKGVLHDRRADNCSPVAEEETTGSAESTLPKAESSAGDGPVPYSQGSSSLIMPRPNSVAATSSTKLEDLSYLDGQRNAPLRTSIRLPWHNTAGGRAQEVKARFAPYKPQDILLKPLLFEVPSITTDSVFVGRDWLFHQIEENLRNTELAENRGAVVVGNVGFGKTAIISKLVALSCHGSRMRQIASNSPGSSPKTSDPTQDLHFTPLLSPSSSTSASSTAKTPLGSISAENQRPREDAVKYLASKVVAYHYCQADNTYTCLVPEFVHSIAALLCRSHQLAAYRDLLIKEPQLQSMLSLRSCVQDPVAAFKRGVLEPLTNLRNEQKIPEEEYIILIDGLNEAEFHKPDYGDTLSSFITKIISKFPAWLKLIVTVRANFQEIISALPFVKLSLDDFPDNKDIHSDLHAYVQHRVHSSQDILSNISLNGKADATLIGKVSSHLVLRSLGSYLYLKLTLDLFQRGHLVIKSASYKVVPVSLSELYLLQCNMKFMTQSAFERALPILNVALASLHPMTDEQIFQAINAGHIQGEQGWEDFQQRMDALSCFLIKRRDKTRMFCHPSFREWLVWRADGENTAFLCEPRNGHALLAFMFSRQEGKLNRQQTMELGHHILKAHIFKGLSKKTGISSSHLQALWIGYSTEGLSAALASLRNLYTPNVKVSRLLILGGANVNYRTEVLNNAPILCVQSHLGHEEVVTLLLEFGACLDGTSENGMTALCYAAAAGHMKLVCLLTKKGVRVDHLDKKGQCALVHSALRGHGDILQYLLTCEWSPGPPQPGTLRKSHALQQALTAAASMGHSSVVQCLLGMEKEHEVEVNGTDTLWGETALTAAAGRGKLEVCELLLGHGAAVSRTNRRGVPPLFCAARQGHWQIVRLLLERGCDVNLSDKQGRTPLMVAACEGHLSTVEFLLSKGAALSSLDKEGLSALSWACLKGHRAVVQYLVEEGAAIDQTDKNGRTPLDLAAFYGDAETVLYLVEKGAVIEHVDHSGMRPLDRAIGCRNTSVVVALLRKGAKLGNAAWAMATSKPDILIILLQKLMEEGNVMYKKGKMKEAAQRYQYALRKFPREGFGEDMRPFNELRVSLYLNLSRCRRKTNDFGMAEEFASKALELKPKSYEAFYARARAKRNSRQFVAALADLQEAVKLCPTNQEVKRLLARVEEECKQLQRSQQQKQQGPLPAPLNDSENEEDTPTPGLSDHFHSEETEEEETSPQEESVSPTPRSQPSSSVPSSYIRNLQEGLQSKGRPVSPQSRAGIGKSLREPVAQPGLLLQPSKQAQIVKTSQHLGSGQSAVRNGSMKVQISSQNPPPSPMPGRIAATPAGSRTQHLEGTGTFTTRAGCGHFGDRLGPSQNVRLQCGENGPAHPLPSKTKTTERLLSHSSVAVDAAPPNQGGLATCSDVRHPASLTSSGSSGSPSSSIKMSSSTSSLTSSSSFSDGFKVQGPDTRIKDKVVTHVQSGTAEHRPRNTPFMGIMDKTARFQQQSNPPSRSWHCPAPEGLLTNTSSAAGLQSANTEKPSLMQVGGYNNQAKTCSVSTLSASVHNGAQVKELEESKCQIPVHSQENRITKTVSHLYQESISKQQPHISNEAHRSHLTAAKPKRSFIESNV

SEQ ID NO: 5419 - protein, 1755 aa, Homo sapiens
MLKAVLKKSREGGKGGKKEAGSDFGPETSPVLHLDHSADSPVSSLPTAEDTYRVSLAKGVSMSLPSSPLLPRQSHLVQSRVNKKSPGPVRKPKYVESPRVPGDAVIMPFREVAKPTEPDEHATITSSSENDDRSGSSLEWNKDGNLRLGVQKGVLHDRRADNCSPVAEEETTGSAESTLPKAESSAGDGPVPYSQGSSSLIMPRPNSVAATSSTKLEDLSYLDGQRNAPLRTSIRLPWHNTAGGRAQEVKARFAPYKPQDILLKPLLFEVPSITTDSVFVGRDWLFHQIEENLRNTELAENRGAVVVGNVGFGKTAIISKLVALSCHGSRMRQIASNSPGSSPKTSDPTQDLHFTPLLSPSSSTSASSTAKTPLGSISAENQRPREDAVKYLASKVVAYHYCQADNTYTCLVPEFVHSIAALLCRSHQLAAYRDLLIKEPQLQSMLSLRSCVQDPVAAFKRGVLEPLTNLRNEQKIPEEEYIILIDGLNEAEFHKPDYGDTLSSFITKIISKFPAWLKLIVTVRANFQEIISALPFVKLSLDDFPDNKDIHSDLHAYVQHRVHSSQDILSNISLNGKADATLIGKVSSHLVLRSLGSYLYLKLTLDLFQRGHLVIKSASYKVVPVSLSELYLLQCNMKFMTQSAFERALPILNVALASLHPMTDEQIFQAINAGHIQGEQGWEDFQQRMDALSCFLIKRRDKTRMFCHPSFREWLVWRADGENTAFLCEPRNGHALLAFMFSRQEGKLNRQQTMELGHHILKAHIFKGLSKKTGISSSHLQALWIGYSTEGLSAALASLRNLYTPNVKVSRLLILGGANVNYRTEVLNNAPILCVQSHLGHEEVVTLLLEFGACLDGTSENGMTALCYAAAAGHMKLVCLLTKKGVRVDHLDKKGQCALVHSALRGHGDILQYLLTCEWSPGPPQPGTLRKSHALQQALTAAASMGHSSVVQCLLGMEKEHEVEVNGTDTLWGETALTAAAGRGKLEVCELLLGHGAAVSRTNRRGVPPLFCAARQGHWQIVRLLLERGCDVNLSDKQGRTPLMVAACEGHLSTVEFLLSKGAALSSLDKEGLSALSWACLKGHRAVVQYLVEEGAAIDQTDKNGRTPLDLAAFYGDAETVLYLVEKGAVIEHVDHSGMRPLDRAIGCRNTSVVVALLRKGAKLGNAAWAMATSKPDILIILLQKLMEEGNVMYKKGKMKEAAQRYQYALRKFPREGFGEDMRPFNELRVSLYLNLSRCRRKTNDFGMAEEFASKALELKPKSYEAFYARARAKRNSRQFVAALADLQEAVKLCPTNQEVKRLLARVEEECKQLQRSQQQKQQGPLPAPLNDSENEEDTPTPGLSDHFHSEETEEEETSPQEESVSPTPRSQPSSSVPSSYIRNLQEGLQSKGRPVSPQSRAGIGKSLREPVAQPGLLLQPSKQAQIVKTSQHLGSGQSAVRNGSMKVQISSQNPPPSPMPGRIAATPAGSRTQHLEGTGTFTTRAGCGHFGDRLGPSQNVRLQCGENGPAHPLPSKTKTTERLLSHSSVAVDAAPPNQGGLATCSDVRHPASLTSSGSSGSPSSSIKMSSSTSSLTSSSSFSDGFKVQGPDTRIKDKVVTHVQSGTAEHRPRNTPFMGIMDKTARFQQQSNPPSRSWHCPAPEGLLTNTSSAAGLQSANTEKPSLMQVGGYNNQAKTCSVSTLSASVHNGAQVKELEESKCQIPVHSQENRITKTVSHLYQESISKQQPHISNEAHRSHLTAAKPKRSFIESNV

SEQ ID NO: 5420 - protein, 705 aa, Homo sapiens
MNYLRRRLSDSNFMANLPNGYMTDLQRPQPPPPPPGAHSPGATPGPGTATAERSSGVAPAASPAAPSPGSSGGGGFFSSLSNAVKQTTAAAAATFSEQVGGGSGGAGRGGAASRVLLVIDEPHTDWAKYFKGKKIHGEIDIKVEQAEFSDLNLVAHANGGFSVDMEVLRNGVKVVRSLKPDFVLIRQHAFSMARNGDYRSLVIGLQYAGIPSVNSLHSVYNFCDKPWVFAQMVRLHKKLGTEEFPLIDQTFYPNHKEMLSSTTYPVVVKMGHAHSGMGKVKVDNQHDFQDIASVVALTKTYATAEPFIDAKYDVRVQKIGQNYKAYMRTSVSGNWKTNTGSAMLEQIAMSDRYKLWVDTCSEIFGGLDICAVEALHGKDGRDHIIEVVGSSMPLIGDHQDEDKQLIVELVVNKMAQALPRQRQRDASPGRGSHGQTPSPGALPLGRQTSQQPAGPPAQQRPPPQGGPPQPGPGPQRQGPPLQQRPPPQGQQHLSGLGPPAGSPLPQRLPSPTSAPQQPASQAAPPTQGQGRQSRPVAGGPGAPPAARPPASPSPQRQAGPPQATRQTSVSGPAPPKASGAPPGGQQRQGPPQKPPGPAGPTRQASQAGPVPRTGPPTTQQPRPSGPGPAGRPKPQLAQKPSQDVPPPATAAAGGPPHPQLNKSQSLTNAFNLPEPAPPRPSLSQDEVKAETIRSLRKSFASLFSD

SEQ ID NO: 5421 - protein, 669 aa, Homo sapiens
MNYLRRRLSDSNFMANLPNGYMTDLQRPQPPPPPPGAHSPGATPGPGTATAERSSGVAPAASPAAPSPGSSGGGGFFSSLSNAVKQTTAAAAATFSEQVGGGSGGAGRGGAASRVLLVIDEPHTDWAKYFKGKKIHGEIDIKVEQAEFSDLNLVAHANGGFSVDMEVLRNGVKVVRSLKPDFVLIRQHAFSMARNGDYRSLVIGLQYAGIPSVNSLHSVYNFCDKPWVFAQMVRLHKKLGTEEFPLIDQTFYPNHKEMLSSTTYPVVVKMGHAHSGMGKVKVDNQHDFQDIASVVALTKTYATAEPFIDAKYDVRVQKIGQNYKAYMRTSVSGNWKTNTGSAMLEQIAMSDRYKLWVDTCSEIFGGLDICAVEALHGKDGRDHIIEVVGSSMPLIGDHQDEDKQLIVELVVNKMAQALPRQRQRDASPGRGSHGQTPSPGALPLGRQTSQQPAGPPAQQRPPPQGGPPQPGPGPQRQGPPLQQRPPPQGQQHLSGLGPPAGSPLPQRLPSPTSAPQQPASQAAPPTQGQGRQSRPVAGGPGAPPAARPPASPSPQRQAGPPQATRQTSVSGPAPPKASGAPPGGQQRQGPPQKPPGPAGPTRQASQAGPVPRTGPPTTQQPRPSGPGPAGRPKPQLAQKPSQDVPPPATAAAGGPPHPQLKASPAQAQP

SEQ ID NO: 5422 - protein, 201 aa, Homo sapiens
MANKGPSYGMSREVQSKIEKKYDEELEERLVEWIIVQCGPDVGRPDRGRLGFQVWLKNGVILSKLVNSLYPDGSKPVKVPENPPSMVFKQMEQVAQFLKAAEDYGVIKTDMFQTVDLFEGKDMAAVQRTLMALGSLAVTKNDGHYRGDPNWFMKKAQEHKREFTESQLQEGKHVIGLQMGSNRGASQAGMTGYGRPRQIIS

SEQ ID NO: 5423 - protein, 309 aa, Homo sapiens
MTTFIPIIFSSVVVVLFVIGNFANGFIALVNSIERVKRQKISFADQILTALAVSRVGLLWVLLLNWYSTVFNPAFYSVEVRTTAYNVWAVTGHFSNWLATSLSIFYLLKIANFSNLIFLHLKRRVKSVILVMLLGPLLFLACQLFVINMKEIVRTKEYEGNLTWKIKLRSAVYLSDATVTTLGNLVPFTLTLLCFLLLICSLCKHLKKMQLHGKGSQDPSTKVHIKALQTVIFFLLLCAVYFLSIMISVWSFGSLENKPVFMFCKAIRFSYPSIHPFILIWGNKKLKQTFLSVLRQVRYWVKGEKPSSP

SEQ ID NO: 5424 - protein, 420 aa, Homo sapiens
MAELGKKYCVYCLAEVSPLRFRCTECQDIELCPECFSAGAEIGHHRRYHGYQLVDGGRFTLWGPEAEGGWTSREEQLLLDAIEQFGFGNWEDMAAHVGASRTPQEVMEHYVSMYIHGNLGKACIPDTIPNRVTDHTCPSGGPLSPSLTTPLPPLDISVAEQQQLGYMPLRDDYEIEYDQDAETLISGLSVNYDDDDVEIELKRAHVDMYVRKLKERQRRKNIARDYNLVPAFLGKDKKEKEKALKRKITKEEKELRLKLRPLYQFMSCKEFDDLFENMHKEKMLRAKIRELQRYRRNGITKMEESAEYEAARHKREKRKENKNLAGSKRGKEDGKDSEFAAIENLPGFELLSDREKVLCSSLNLSPARYVTVKTIIIKDHLQKRQGIPSKSRLPSYLDKVLKKRILNFLTESGWISRDAS

SEQ ID NO: 5425 - protein, 345 aa, Homo sapiens
MAELGKKYCVYCLAEEDMAAHVGASRTPQEVMEHYVSMYIHGNLGKACIPDTIPNRVTDHTCPSGGPLSPSLTTPLPPLDISVAEQQQLGYMPLRDDYEIEYDQDAETLISGLSVNYDDDDVEIELKRAHVDMYVRKLKERQRRKNIARDYNLVPAFLGKDKKEKEKALKRKITKEEKELRLKLRPLYQFMSCKEFDDLFENMHKEKMLRAKIRELQRYRRNGITKMEESAEYEAARHKREKRKENKNLAGSKRGKEDGKDSEFAAIENLPGFELLSDREKVLCSSLNLSPARYVTVKTIIIKDHLQKRQGIPSKSRLPSYLDKVLKKRILNFLTESGWISRDAS

SEQ ID NO: 5426 - protein, 328 aa, Homo sapiens
MAAHVGASRTPQEVMEHYVSMYIHGNLGKACIPDTIPNRVTDHTCPSGGPLSPSLTTPLPPLDISVAEQQQLGYMPLRDDYEIEYDQDAETLISGLSVNYDDDDVEIELKRAHVDMYVRKLKERQRRKNIARDYNLVPAFLGKDKKEKEKALKRKITKEEKELRLKLRPLYQFMSCKEFDDLFENMHKEKMLRAKIRELQRYRRNGITKMEESAEYEAARHKREKRKENKNLAGSKRGKEDGKDSEFAAIENLPGFELLSDREKVLCSSLNLSPARYVTVKTIIIKDHLQKRQGIPSKSRLPSYLDKVLKKRILNFLTESGWISRDAS

SEQ ID NO: 5427 - protein, 338 aa, Homo sapiens
MLGRCFPPDTKEKQQLRMTKLCDPAESELSPFLITLILAVLLAEYLIGIIANGFIMAIHAAEWVQNKAVSTSGRILVFLSVSRIALQSLMMLEITISSTSLSFYSEDAVYYAFKISFIFLNFCSLWFAAWLSFFYFVKIANFSYPLFLKLRWRITGLIPWLLWLSVFISFSHSMFCINICTVYCNNSFPIHSSNSTKKTYLSEINVVGLAFFFNLGIVTPLIMFILTATLLILSLKRHTLHMGSNATGSNDPSMEAHMGAIKAISYFLILYIFNAVALFIYLSNMFDINSLWNNLCQIIMAAYPASHSILLIQDNPGLRRAWKRLQLRLHLYPKEWTL

SEQ ID NO: 5428 - protein, 443 aa, Homo sapiens
MDRLGPFSNDPSDKPPCRGCSSYLMEPYIKCAECGPPPFFLCLQCFTRGFEYKKHQSDHTYEIMTSDFPVLDPSWTAQEEMALLEAVMDCGFGNWQDVANQMCTKTKEECEKHYMKHFINNPLFASTLLNLKQAEEAKTADTAIPFHSTDDPPRPTFDSLLSRDMAGYMPARADFIEEFDNYAEWDLRDIDFVEDDSDILHALKMAVVDIYHSRLKERQRRKKIIRDHGLINLRKFQLMERRYPKEVQDLYETMRRFARIVGPVEHDKFIESHALEFELRREIKRLQEYRTAGITNFCSARTYDHLKKTREEERLKRTMLSEVLQYIQDSSACQQWLRRQADIDSGLSPSIPMASNSGRRSAPPLNLTGLPGTEKLNEKEKELCQMVRLVPGAYLEYKSALLNECNKQGGLRLAQARALIKIDVNKTRKIYDFLIREGYITKG

SEQ ID NO: 5429 - protein, 305 aa, Homo sapiens
MDRLGPFSNDPSDKPPCRGCSSYLMEPYIKCAECGPPPFFLCLQCFTRGFEYKKHQSDHTYEIMTSDFPVLDPSWTAQEEMALLEAVMDCGFGNWQDVANQMCTKTKEECEKHYMKHFINNPLFASTLLNLKQAEEAKTADTAIPFHSTDDPPRPTFDSLLSRDMAGYMPARADFIEEFDNYAEWDLRDIDFVEDDSDILHALKMAVVDIYHSRLKERQRRKKIIRDHGLINLRKFQLMERRYPKEVQDLYETMRRFARIVGPVEHDKFIESHACRWFLSLEQYLCVYIYINRRDNGVFYVKFYK

SEQ ID NO: 5430 - protein, 432 aa, Homo sapiens
MSELKDCPLQFHDFKSVDHLKVCPRYTAVLARSEDDGIGIEELDTLQLELETLLSSASRRLRVLEAETQILTDWQDKKGDRRFLKLGRDHELGAPPKHGKPKKQKLEGKAGHGPGPGPGRPKSKNLQPKIQEYEFTDDPIDVPRIPKNDAPNRFWASVEPYCADITSEEVRTLEELLKPPEDEAEHYKIPPLGKHYSQRWAQEDLLEEQKDGARAAAVADKKKGLMGPLTELDTKDVDALLKKSEAQHEQPEDGCPFGALTQRLLQALVEENIISPMEDSPIPDMSGKESGADGASTSPRNQNKPFSVPHTKSLESRIKEELIAQGLLESEDRPAEDSEDEVLAELRKRQAELKALSAHNRTKKHDLLRLAKEEVSRQELRQRVRMADNEVMDAFRKIMAARQKKRTPTKKEKDQAWKTLKERESILKLLDG

SEQ ID NO: 5431 - protein, 369 aa, Homo sapiens
MSELKDCPLQFHDFKSVDHLKVCPRYTAVLARSEDDGIGIEELDTLQLELETLLSSASRRLRVLEAETQILTDWQDKKGDRRFLKLGRDHELGAPPKHGKPKKQKLEGKAGHGPGPGPGRPKSKNLQPKIQEYEFTDDPIDVPRIPKNDAPNRFWASVEPYCADITSEEVRTLEELLKPPEDEAEHYKIPPLGKHYSQRWAQEDLLEEQKDGARAAAVADKKKGLMGPLTELDTKDVDALLKKSEAQHEQPEDGCPFGALTQRLLQALVEENIISPMEDSPIPDMSGKESGADGASTSPRNQNKPFSVPHTKSLESRIKEELIAQGLLESEDRPAEDSEDEVLAELRKRQAELKALSAHNRTKKHDLLR

SEQ ID NO: 5432 - protein, 756 aa, Homo sapiens
MGKRGSRSQSQLLNTLTKKQKKHLRDFGEEHPFYDRVSRKEAKPQICQLSESSDSSDSESDSESEPQQVSGYHRLLATLKNVSEEEEEDEEEEEEEDSIVDDAEMNDEDGGSDVSVEEEMAAESTESPENVALSADPEGKEDGEEPPGTSQTSPEEFTDAKHESLFSLETNFLEEESGDNSSLKASQDPFLQHVNKELKEKAIQAVATNPKTTHELKWPILGQLFFSSKFQKLETFKPPKDIDLKSLHLQKPLESTWTKTNSQFLSGPQKSSSPFTPLQKELFLIMNSYRDLFYPERTALKNGEEIRHVYCLHVINHILKANAQVLGNNSRRRSQKFGVGDDDDFRDQGLTRPKVLIVVPFREAALRVVQLFISLLEGDSKKKIIVSNKKRFQGEYGSDPEERPPNLKRPEDYEAVFVGNIDDHFRIGVAILQRSIRLYAPFYSSDILIASPLGLRTIIGGEGEKKRDFDFLSSIELLIIDQADIYLMQNWEHVLHLMNHMNLLPLDSHGVDFSRVRMWSLNNWSKYYRQTLLFGALQDAQINSVFNKYCVNMQGQVAVRNVPMTGSISHVLVQLPHVFQRMEAENLASVIDARFNFFVNKILPQYRDAVMSHTLIYIPSYFDFVRLRNYFKKEELNFTHICEYTQKSGVSRARHFFLQGEKQFLLFTERFHFYKRYTIKGIRNLIFYELPTYPHFYSEICNMLRATNRGEEATWTCTVLYSKYDAQRLAAVVGVERAAQMLQSNKNVHLFITGEK

SEQ ID NO: 5433 - protein, 207 aa, Homo sapiens
MMHQIYSCSDENIEVFTTVIPSKVSSPARRRAKSSQHLLTKNVVIESDLYTHQPLELLPHRGDRRDPGDRRRFGRLQTARPPTAHPAKASARPVGISEPKTSNLCGNRAYGKSLIPPVPRISVKTSASASLEATAMGTEKGAVLMRGSRHLKKMTEEYPALPQGAEASLPLTGSASCGVPGILRKMWTRHKKKSEYVGATNSAFEAD

SEQ ID NO: 5434 - protein, 134 aa, Homo sapiens
MMHQIYSCSDENIEVFTTVIPSKVSSPARRRAKSSQHLLTKNVVIESDLYTHQPLELLPHRGDRRDPGDRRRFGRLQTARPPTAHPAKASARPDTASAPDLSENFSLCLIGGDSHGHREGSCSDERIQTSQEDD

SEQ ID NO: 5435 - protein, 878 aa, Homo sapiens
MEQWRQCGRWLIDCKVLPPNHRVVWPSAVVFDLAQALRDGVLLCQLLHNLSPGSIDLKDINFRPQMSQFLCLKNIRTFLKVCHDKFGLRNSELFDPFDLFDVRDFGKVISAVSRLSLHSIAQNKGIRPFPSEETTENDDDVYRSLEELADEHDLGEDIYDCVPCEDGGDDIYEDIIKVEVQQPMIRYMQKMGMTEDDKRNCCLLEIQETEAKYYRTLEDIEKNYMSPLRLVLSPADMAAVFINLEDLIKVHHSFLRAIDVSVMVGGSTLAKVFLDFKERLLIYGEYCSHMEHAQNTLNQLLASREDFRQKVEECTLKVQDGKFKLQDLLVVPMQRVLKYHLLLKELLSHSAERPERQQLKEALEAMQDLAMYINEVKRDKETLRKISEFQSSIENLQVKLEEFGRPKIDGELKVRSIVNHTKQDRYLFLFDKVVIVCKRKGYSYELKEIIELLFHKMTDDPMNNKDVKKSHGKMWSYGFYLIHLQGKQGFQFFCKTEDMKRKWMEQFEMAMSNIKPDKANANHHSFQMYTFDKTTNCKACKMFLRGTFYQGYMCTKCGVGAHKECLEVIPPCKFTSPADLDASGAGPGPKMVAMQNYHGNPAPPGKPVLTFQTGDVLELLRGDPESPWWEGRLVQTRKSGYFPSSSVKPCPVDGRPPISRPPSREIDYTAYPWFAGNMERQQTDNLLKSHASGTYLIRERPAEAERFAISIKFNDEVKHIKVVEKDNWIHITEAKKFDSLLELVEYYQCHSLKESFKQLDTTLKYPYKSRERSASRASSRSPASCASYNFSFLSPQGLSFASQGPSAPFWSVFTPRVIGTAVARYNFAARDMRELSLREGDVVRIYSRIGGDQGWWKGETNGRIGWFPSTYVEEEGIQ

SEQ ID NO: 5436 - protein, 868 aa, Homo sapiens
MEQWRQCGRWLIDCKVLPPNHRVVWPSAVVFDLAQALRDGVLLCQLLHNLSPGSIDLKDINFRPQMSQFLCLKNIRTFLKVCHDKFGLRNSELFDPFDLFDVRDFGKVISAVSRLSLHSIAQNKGIRPFPSEETTENDDDVYRSLEELADEHDLGEDIYDCVPCEDGGDDIYEDIIKVEVQQPMKMGMTEDDKRNCCLLEIQETEAKYYRTLEDIEKNYMSPLRLVLSPADMAAVFINLEDLIKVHHSFLRAIDVSVMVGGSTLAKVFLDFKERLLIYGEYCSHMEHAQNTLNQLLASREDFRQKVEECTLKVQDGKFKLQDLLVVPMQRVLKYHLLLKELLSHSAERPERQQLKEALEAMQDLAMYINEVKRDKETLRKISEFQSSIENLQVKLEEFGRPKIDGELKVRSIVNHTKQDRYLFLFDKVVIVCKRKGYSYELKEIIELLFHKMTDDPMNNKDVKKWSYGFYLIHLQGKQGFQFFCKTEDMKRKWMEQFEMAMSNIKPDKANANHHSFQMYTFDKTTNCKACKMFLRGTFYQGYMCTKCGVGAHKECLEVIPPCKFTSPADLDASGAGPGPKMVAMQNYHGNPAPPGKPVLTFQTGDVLELLRGDPESPWWEGRLVQTRKSGYFPSSSVKPCPVDGRPPISRPPSREIDYTAYPWFAGNMERQQTDNLLKSHASGTYLIRERPAEAERFAISIKFNDEVKHIKVVEKDNWIHITEAKKFDSLLELVEYYQCHSLKESFKQLDTTLKYPYKSRERSASRASSRSPASCASYNFSFLSPQGLSFASQGPSAPFWSVFTPRVIGTAVARYNFAARDMRELSLREGDVVRIYSRIGGDQGWWKGETNGRIGWFPSTYVEEEGIQ

SEQ ID NO: 5437 - protein, 839 aa, Homo sapiens
MEQWRQCGRWLIDCKVLPPNHRVVWPSAVVFDLAQALRDGVLLCQLLHNLSPGSIDLKDINFRPQMSQFLCLKNIRTFLKVCHDKFGLRNSELFDPFDLFDVRDFGKVISAVSRLSLHSIAQNKGIRPFPSEETTENDDDVYRSLEELADEHDLGEDIYDCVPCEDGGDDIYEDIIKVEVQQPMKMGMTEDDKRNCCLLEIQETEAKYYRTLEDIEKNYMSPLRLVLSPADMAAVFINLEDLIKVHHSFLRAIDVSVMVGGSTLAKVFLDFKERLLIYGEYCSHMEHAQNTLNQLLASREDFRQKVEECTLKVQDGKFKLQDLLVVPMQRVLKYHLLLKELLSHSAERPERQQLKEALEAMQDLAMYINEVKRDKETLRKISEFQSSIENLQVKLEEFGRPKIDGELKVRSIVNHTKQDRYLFLFDKVVIVCKRKGYSYELKEIIELLFHKMTDDPMNNKDVKKWSYGFYLIHLQGKQGFQFFCKTEDMKRKWMEQFEMAMSNIKPDKANANHHSFQMYTFDKTTNCKACKMFLRGTFYQGYMCTKCGVGAHKECLEVIPPCKFTSPADLDASGAGPGPKMVAMQNYHGNPAPPGKPVLTFQTGDVLELLRGDPESPWWEGRLVQTRKSGYFPSSSVKPCPVDGRPPISRPPSREIDYTAYPWFAGNMERQQTDNLLKSHASGTYLIRERPAEAERFAISIKFNDEVKHIKVVEKDNWIHITEAKKFDSLLELVEYYQCHSLKESFKQLDTTLKYPYKSRERSASRASSRSPVFTPRVIGTAVARYNFAARDMRELSLREGDVVRIYSRIGGDQGWWKGETNGRIGWFPSTYVEEEGIQ

SEQ ID NO: 5438 - protein, 847 aa, Homo sapiens
MEPWKQCAQWLIHCKVLPTNHRVTWDSAQVFDLAQTLRDGVLLCQLLNNLRAHSINLKEINLRPQMSQFLCLKNIRTFLTACCETFGMRKSELFEAFDLFDVRDFGKVIETLSRLSRTPIALATGIRPFPTEESINDEDIYKGLPDLIDETLVEDEEDLYDCVYGEDEGGEVYEDLMKAEEAHQPKCPENDIRSCCLAEIKQTEEKYTETLESIEKYFMAPLKRFLTAAEFDSVFINIPELVKLHRNLMQEIHDSIVNKNDQNLYQVFINYKERLVIYGQYCSGVESAISSLDYISKTKEDVKLKLEECSKRANNGKFTLRDLLVVPMQRVLKYHLLLQELVKHTTDPTEKANLKLALDAMKDLAQYVNEVKRDNETLREIKQFQLSIENLNQPVLLFGRPQGDGEIRITTLDKHTKQERHIFLFDLAVIVCKRKGDNYEMKEIIDLQQYKIANNPTTDKENKKWSYGFYLIHTQGQNGLEFYCKTKDLKKKWLEQFEMALSNIRPDYADSNFHDFKMHTFTRVTSCKVCQMLLRGTFYQGYLCFKCGARAHKECLGRVDNCGRVNSGEQGTLKLPEKRTNGLRRTPKQVDPGLPKMQVIRNYSGTPPPALHEGPPLQLQAGDTVELLKGDAHSLFWQGRNLASGEVGFFPSDAVKPCPCVPKPVDYSCQPWYAGAMERLQAETELINRVNSTYLVRHRTKESGEYAISIKYNNEAKHIKILTRDGFFHIAENRKFKSLMELVEYYKHHSLKEGFRTLDTTLQFPYKEPEHSAGQRGNRAGNSLLSPKVLGIAIARYDFCARDMRELSLLKGDVVKIYTKMSANGWWRGEVNGRVGWFPSTYVEEDE

SEQ ID NO: 5439 - protein, 753 aa, Homo sapiens
MQLPDCPCRAHLPVIETLSRLSRTPIALATGIRPFPTEESINDEDIYKGLPDLIDETLVEDEEDLYDCVYGEDEGGEVYEDLMKAEEAHQPKCPENDIRSCCLAEIKQTEEKYTETLESIEKYFMAPLKRFLTAAEFDSVFINIPELVKLHRNLMQEIHDSIVNKNDQNLYQVFINYKERLVIYGQYCSGVESAISSLDYISKTKEDVKLKLEECSKRANNGKFTLRDLLVVPMQRVLKYHLLLQELVKHTTDPTEKANLKLALDAMKDLAQYVNEVKRDNETLREIKQFQLSIENLNQPVLLFGRPQGDGEIRITTLDKHTKQERHIFLFDLAVIVCKRKGDNYEMKEIIDLQQYKIANNPTTDKENKKWSYGFYLIHTQGQNGLEFYCKTKDLKKKWLEQFEMALSNIRPDYADSNFHDFKMHTFTRVTSCKVCQMLLRGTFYQGYLCFKCGARAHKECLGRVDNCGRVNSGEQGTLKLPEKRTNGLRRTPKQVDPGLPKMQVIRNYSGTPPPALHEGPPLQLQAGDTVELLKGDAHSLFWQGRNLASGEVGFFPSDAVKPCPCVPKPVDYSCQPWYAGAMERLQAETELINRVNSTYLVRHRTKESGEYAISIKYNNEAKHIKILTRDGFFHIAENRKFKSLMELVEYYKHHSLKEGFRTLDTTLQFPYKEPEHSAGQRGNRAGNSLLSPKVLGIAIARYDFCARDMRELSLLKGDVVKIYTKMSANGWWRGEVNGRVGWFPSTYVEEDE

SEQ ID NO: 5440 - protein, 287 aa, Homo sapiens
MPIFTFLSEQGTLKLPEKRTNGLRRTPKQVDPGLPKMQVIRNYSGTPPPALHEGPPLQLQAGDTVELLKGDAHSLFWQGRNLASGEVGFFPSDAVKPCPCVPKPVDYSCQPWYAGAMERLQAETELINRVNSTYLVRHRTKESGEYAISIKYNNEAKHIKILTRDGFFHIAENRKFKSLMELVEYYKHHSLKEGFRTLDTTLQFPYKEPEHSAGQRGNRAGNSLLSPKVLGIAIARYDFCARDMRELSLLKGDVVKIYTKMSANGWWRGEVNGRVGWFPSTYVEEDE

SEQ ID NO: 5441 - protein, 875 aa, Homo sapiens
MEPWKQCAQWLIHCKVLPTNHRVTWDSAQVFDLAQTLRDGVLLCQLLNNLRAHSINLKEINLRPQMSQFLCLKNIRTFLTACCETFGMRKSELFEAFDLFDVRDFGKVIETLSRLSRTPIALATGIRPFPTEESINDEDIYKGLPDLIDETLVEDEEDLYDCVYGEDEGGEVYEDLMKAEEAHQPKCPENDIRSCCLAEIKQTEEKYTETLESIEKYFMAPLKRFLTAAEFDSVFINIPELVKLHRNLMQEIHDSIVNKNDQNLYQVFINYKERLVIYGQYCSGVESAISSLDYISKTKEDVKLKLEECSKRANNGKFTLRDLLVVPMQRVLKYHLLLQELVKHTTDPTEKANLKLALDAMKDLAQYVNEVKRDNETLREIKQFQLSIENLNQPVLLFGRPQGDGEIRITTLDKHTKQERHIFLFDLAVIVCKRKGDNYEMKEIIDLQQYKIANNPTTDKENKKWSYGFYLIHTQGQNGLEFYCKTKDLKKKWLEQFEMALSNIRPDYADSNFHDFKMHTFTRVTSCKVCQMLLRGTFYQGYLCFKCGARAHKECLGRVDNCGRVNSGEQGTLKLPEKRTNGLRRTPKQVDPGLPKMQVIRNYSGTPPPALHEGPPLQLQAGDTVELLKGDAHSLFWQGRNLASGEVGFFPSDAVKPCPCVPKPVDYSCQPWYAGAMERLQAETELINRVNSTYLVRHRTKESGEYAISIKYNNEAKHIKILTRDGFFHIAENRKFKSLMELVEYYKHHSLKEGFRTLDTTLQFPYKEPEHSAGQRGNRAGNSSPSLFCGFSFVTPPDYSFVPPSSTPFWSVLSPKVLGIAIARYDFCARDMRELSLLKGDVVKIYTKMSANGWWRGEVNGRVGWFPSTYVEEDE

SEQ ID NO: 5442 - protein, 686 aa, Homo sapiens
MGEFKVHRVRFFNYVPSGIRCVAYNNQSNRLAVSRTDGTVEIYNLSANYFQEKFFPGHESRATEALCWAEGQRLFSAGLNGEIMEYDLQALNIKYAMDAFGGPIWSMAASPSGSQLLVGCEDGSVKLFQITPDKIQFERNFDRQKSRILSLSWHPSGTHIAAGSIDYISVFDVKSGSAVHKMIVDRQYMGVSKRKCIVWGVAFLSDGTIISVDSAGKVQFWDSATGTLVKSHLIANADVQSIAVADQEDSFVVGTAEGTVFHFQLVPVTSNSSEKQWVRTKPFQHHTHDVRTVAHSPTALISGGTDTHLVFRPLMEKVEVKNYDAALRKITFPHRCLISCSKKRQLLLFQFAHHLELWRLGSTVATGKNGDTLPLSKNADHLLHLKTKGPENIICSCISPCGSWIAYSTVSRFFLYRLNYEHDNISLKRVSKMPAFLRSALQILFSEDSTKLFVASNQGALHIVQLSGGSFKHLHAFQPQSGTVEAMCLLAVSPDGNWLAASGTSAGVHVYNVKQLKLHCTVPAYNFPVTAMAIAPNTNNLVIAHSDQQVFEYSIPDKQYTDWSRTVQKQGFHHLWLQRDTPITHISFHPKRPMHILLHDAYMFCIIDKSLPLPNDKTLLYNPFPPTNESDVIRRRTAHAFKISKIYKPLLFMDLLDERTLVAVERPLDDIIAQLPPPIKKKKFGT

SEQ ID NO: 5443 - protein, 571 aa, Homo sapiens
MGEFKVHRVRFFNYVPSGIRCVAYNNQSNRLAVSRTDGTVEIYNLSANYFQEKFFPGHESRATEALCWAEGQRLFSAGLNGEIMEYDLQALNIKYAMDAFGGPIWSMAASPSGSQLLVGCEDGSVKLFQITPDKIQFERNFDRQKSRILSLSWHPSGTHIAAGSIDYISVFDVKSGSAVHKMIVDRQYMGVSKRKCIVWGVAFLSDGTIISVDSAGKVQFWDSATGTLVKSHLIANADVQSIAVADQEDSFVVGTAEGTVFHFQLVPVTSNSSEKQWVRTKPFQHHTHDVRTVAHSPTALISGGTDTHLVFRPLMEKVEVKNYDAALRKITFPHRCLISCSKKRQLLLFQFAHHLELWRLGSTVATGTVEAMCLLAVSPDGNWLAASGTSAGVHVYNVKQLKLHCTVPAYNFPVTAMAIAPNTNNLVIAHSDQQVFEYSIPDKQYTDWSRTVQKQGFHHLWLQRDTPITHISFHPKRPMHILLHDAYMFCIIDKSLPLPNDKTLLYNPFPPTNESDVIRRRTAHAFKISKIYKPLLFMDLLDERTLVAVERPLDDIIAQLPPPIKKKKFGT

SEQ ID NO: 5444 - protein, 625 aa, Homo sapiens
MGEFKVHRVRFFNYVPSGIRCVAYNNQSNRLAVSRTDGTVEIYNLSANYFQEKFFPGHESRATEALCWAEGQRLFSAGLNGEIMEYDLQALNIKYAMDAFGGPIWSMAASPSGSQLLVGCEDGSVKLFQITPDKIQFERNFDRQKSRILSLSWHPSGTHIAAGSIDYISVFDVKSGSAVHKMIVDRQYMGVSKRKCIVWGVAFLSDGTIISVDSAGKVQFWDSATGTLVKSHLIANADVQSIAVADQEDSFVVGTAEGTVFHFQLVPVTSNSSEKQWVRTKPFQHHTHDVRTVAHSPTALISGGTDTHLVFRPLMEKVEVKNYDAALRKITFPHRCLISCSKKRQLLLFQFAHHLELWRLGSTVATGKNGDTLPLSKNADHLLHLKTKGPENIICSCISPCGSWIAYSTVSRFFLYRLNYEHDNISLKRVSKMPAFLRSALQILFSEDSTKLFVASNQGALHIVQLSGGSFKHLHAFQPQSGTVEAMCLLAVSPDGNWLAASGTSAGVHVYNVKQLKLHCTVPAYNFPVTAMAIAPNTNNLVIAHSDQQVFEYSIPDKQYTDWSRTVQKQGFHHLWLQRDTPITHISFHPKRPMHILLHDAYMFCIIDKSLVSSSLLPPKSSSES

SEQ ID NO: 5445 - protein, 389 aa, Homo sapiens
MALTPESPSSFPGLAATGSSVPEPPGGPNATLNSSWASPTEPSSLEDLVATGTIGTLLSAMGVVGVVGNAYTLVVTCRSLRAVASMYVYVVNLALADLLYLLSIPFIVATYVTKEWHFGDVGCRVLFGLDFLTMHASIFTLTVMSSERYAAVLRPLDTVQRPKGYRKLLALGTWLLALLLTLPVMLAMRLVRRGPKSLCLPAWGPRAHRAYLTLLFATSIAGPGLLIGLLYARLARAYRRSQRASFKRARRPGARALRLVLGIVLLFWACFLPFWLWQLLAQYHQAPLAPRTARIVNYLTTCLTYGNSCANPFLYTLLTRNYRDHLRGRVRGPGSGGGRGPVPSLQPRARFQRCSGRSLSSCSPQPTDSLVLAPAAPARPAPEGPRAPA

SEQ ID NO: 5446 - protein, 334 aa, Homo sapiens
MFGKPDKMDVRCHSDAEAARVSKNAHKESRESKGAEGNLPAAFLKEPQGAFSASGAAEDCNKSKSNSAADPDYCRRILVRDAKGSIREIILPKGLDLDRPKRTRTSFTAEQLYRLEMEFQRCQYVVGRERTELARQLNLSETQVKVWFQNRRTKQKKDQGKDSELRSVVSETAATCSVLRLLEQGRLLSPPGLPALLPPCATGALGSALRGPSLPALGAGAAAGSAAAAAAAAPGPAGAASPHPPAVGGAPGPGPAGPGGLHAGAPAAGHSLFSLPVPSLLGSVASRLSSAPLTMAGSLAGNLQELSARYLSSSAFEPYSRTNNKEGAEKKALD

SEQ ID NO: 5447 - protein, 186 aa, Homo sapiens
MFGKPDKMDVRCHSDAEAARVSKNAHKESRESKGAEGNLPAAFLKEPQGAFSASGAAEDCNKSKSNSAADPDYCRRILVRDAKGSIREIILPKGLDLDRPKRTRTSFTAEQLYRLEMEFQRCQYVVGRERTELARQLNLSETQANSEENNERFKRGIKKQKKKRKKEPANDESRRGDSGGRGWQPL

SEQ ID NO: 5448 - protein, 290 aa, Homo sapiens
MGDGGAERDRGPARRAESGGGGGRCGDRSGAGDLRADGGGHSPTEVAGTSASSPAGSRESGADSDGQPGPGEADHCRRILVRDAKGTIREIVLPKGLDLDRPKRTRTSFTAEQLYRLEMEFQRCQYVVGRERTELARQLNLSETQVKVWFQNRRTKQKKDQSRDLEKRASSSASEAFATSNILRLLEQGRLLSVPRAPSLLALTPSLPGLPASHRGTSLGDPRNSSPRLNPLSSASASPPLPPPLPAVCFSSAPLLDLPAGYELGSSAFEPYSWLERKVGSASSCKKANT

SEQ ID NO: 5449 - protein, 173 aa, Homo sapiens
MDIEKVNSMDLGEFVDVFGNATERCPLIAAAVWSQRPFSDLEDLEKHFFAFIDALAQSGQEGILRCHPDLAGSELQRGTLTAESQREQSGAGLRSLGADERLRLAELNAQYRARFGFPFVLAARFSDRTAVPRELARRLLCPSAQELRTALGEVKKIGSLRLADLLRADPAKL

SEQ ID NO: 5450 - protein, 61 aa, Homo sapiens
MGRADTPRHPPPPAAGFGVHRGAFLIPVALRVLLAGRTPRPFTPGLADPRRLGPRRVQAAQ

SEQ ID NO: 5451 - protein, 121 aa, Homo sapiens
MEEVIQAGLAQWSRQKGLALPWDRTRGHPDVPWRNLTSSPTRPLAQPAGSCMPAEPSPAAHYHQLHVHLQLLPSDLSERPGLRLAPLALVEVGMTLPVPQTPLPHVTQQQKLAPGRQLCPW

SEQ ID NO: 5452 - protein, 3433 aa, Homo sapiens
MAKYGEHEASPDNGQNEFSDIIKSRSDEHNDVQKKTFTKWINARFSKSGKPPINDMFTDLKDGRKLLDLLEGLTGTSLPKERGSTRVHALNNVNRVLQVLHQNNVELVNIGGTDIVDGNHKLTLGLLWSIILHWQVKDVMKDVMSDLQQTNSEKILLSWVRQTTRPYSQVNVLNFTTSWTDGLAFNAVLHRHKPDLFSWDKVVKMSPIERLEHAFSKAQTYLGIEKLLDPEDVAVQLPDKKSIIMYLTSLFEVLPQQVTIDAIREVETLPRKYKKECEEEAINIQSTAPEEEHESPRAETPSTVTEVDMDLDSYQIALEEVLTWLLSAEDTFQEQDDISDDVEEVKDQFATHEAFMMELTAHQSSVGSVLQAGNQLITQGTLSDEEEFEIQEQMTLLNARWEALRVESMDRQSRLHDVLMELQKKQLQQLSAWLTLTEERIQKMETCPLDDDVKSLQKLLEEHKSLQSDLEAEQVKVNSLTHMVVIVDENSGESATAILEDQLQKLGERWTAVCRWTEERWNRLQEINILWQELLEEQCLLKAWLTEKEEALNKVQTSNFKDQKELSVSVRRLAILKEDMEMKRQTLDQLSEIGQDVGQLLDNSKASKKINSDSEELTQRWDSLVQRLEDSSNQVTQAVAKLGMSQIPQKDLLETVRVREQAITKKSKQELPPPPPPKKRQIHVDIEAKKKFDAISAELLNWILKWKTAIQTTEIKEYMKMQDTSEMKKKLKALEKEQRERIPRADELNQTGQILVEQMGKEGLPTEEIKNVLEKVSSEWKNVSQHLEDLERKIQLQEDINAYFKQLDELEKVIKTKEEWVKHTSISESSRQSLPSLKDSCQRELTNLLGLHPKIEMARASCSALMSQPSAPDFVQRGFDSFLGRYQAVQEAVEDRQQHLENELKGQPGHAYLETLKTLKDVLNDSENKAQVSLNVLNDLAKVEKALQEKKTLDEILENQKPALHKLAEETKALEKNVHPDVEKLYKQEFDDVQGKWNKLKVLVSKDLHLLEEIALTLRAFEADSTVIEKWMDGVKDFLMKQQAAQGDDAGLQRQLDQCSAFVNEIETIESSLKNMKEIETNLRSGPVAGIKTWVQTRLGDYQTQLEKLSKEIATQKSRLSESQEKAANLKKDLAEMQEWMTQAEEEYLERDFEYKSPEELESAVEEMKRAKEDVLQKEVRVKILKDNIKLLAAKVPSGGQELTSELNVVLENYQLLCNRIRGKCHTLEEVWSCWIELLHYLDLETTWLNTLEERMKSTEVLPEKTDAVNEALESLESVLRHPADNRTQIRELGQTLIDGGILDDIISEKLEAFNSRYEDLSHLAESKQISLEKQLQVLRETDQMLQVLQESLGELDKQLTTYLTDRIDAFQVPQEAQKIQAEISAHELTLEELRRNMRSQPLTSPESRTARGGSQMDVLQRKLREVSTKFQLFQKPANFEQRMLDCKRVLDGVKAELHVLDVKDVDPDVIQTHLDKCMKLYKTLSEVKLEVETVIKTGRHIVQKQQTDNPKGMDEQLTSLKVLYNDLGAQVTEGKQDLERASQLARKMKKEAASLSEWLSATETELVQKSTSEGLLGDLDTEISWAKNVLKDLEKRKADLNTITESSAALQNLIEGSEPILEERLCVLNAGWSRVRTWTEDWCNTLMNHQNQLEIFDGNVAHISTWLYQAEALLDEIEKKPTSKQEEIVKRLVSELDDANLQVENVRDQALILMNARGSSSRELVEPKLAELNRNFEKVSQHIKSAKLLIAQEPLYQCLVTTETFETGVPFSDLEKLENDIENMLKFVEKHLESSDEDEKMDEESAQIEEVLQRGEEMLHQPMEDNKKEKIRLQLLLLHTRYNKIKAIPIQQRKMGQLASGIRSSLLPTDYLVEINKILLCMDDVELSLNVPELNTAIYEDFSFQEDSLKNIKDQLDKLGEQIAVIHEKQPDVILEASGPEAIQIRDTLTQLNAKWDRINRMYSDRKGCFDRAMEEWRQFHCDLNDLTQWITEAEELLVDTCAPGGSLDLEKARIHQQELEVGISSHQPSFAALNRTGDGIVQKLSQADGSFLKEKLAGLNQRWDAIVAEVKDRQPRLKGESKQVMKYRHQLDEIICWLTKAEHAMQKRSTTELGENLQELRDLTQEMEVHAEKLKWLNRTELEMLSDKSLSLPERDKISESLRTVNMTWNKICREVPTTLKECIQEPSSVSQTRIAAHPNVQKVVLVSSASDIPVQSHRTSEISIPADLDKTITELADWLVLIDQMLKSNIVTVGDVEEINKTVSRMKITKADLEQRHPQLDYVFTLAQNLKNKASSSDMRTAITEKLERVKNQWDGTQHGVELRQQQLEDMIIDSLQWDDHREETEELMRKYEARLYILQQARRDPLTKQISDNQILLQELGPGDGIVMAFDNVLQKLLEEYGSDDTRNVKETTEYLKTSWINLKQSIADRQNALEAEWRTVQASRRDLENFLKWIQEAETTVNVLVDASHRENALQDSILARELKQQMQDIQAEIDAHNDIFKSIDGNRQKMVKALGNSEEATMLQHRLDDMNQRWNDLKAKSASIRAHLEASAEKWNRLLMSLEELIKWLNMKDEELKKQMPIGGDVPALQLQYDHCKALRRELKEKEYSVLNAVDQARVFLADQPIEAPEEPRRNLQSKTELTPEERAQKIAKAMRKQSSEVKEKWESLNAVTSNWQKQVDKALEKLRDLQGAMDDLDADMKEAESVRNGWKPVGDLLIDSLQDHIEKIMAFREEIAPINFKVKTVNDLSSQLSPLDLHPSLKMSRQLDDLNMRWKLLQVSVDDRLKQLQEAHRDFGPSSQHFLSTSVQLPWQRSISHNKVPYYINHQTQTTCWDHPKMTELFQSLADLNNVRFSAYRTAIKIRRLQKALCLDLLELSTTNEIFKQHKLNQNDQLLSVPDVINCLTTTYDGLEQMHKDLVNVPLCVDMCLNWLLNVYDTGRTGKIRVQSLKIGLMSLSKGLLEEKYRYLFKEVAGPTEMCDQRQLGLLLHDAIQIPRQLGEVAAFGGSNIEPSVRSCFQQNNNKPEISVKEFIDWMHLEPQSMVWLPVLHRVAAAETAKHQAKCNICKECPIVGFRYRSLKHFNYDVCQSCFFSGRTAKGHKLHYPMVEYCIPTTSGEDVRDFTKVLKNKFRSKKYFAKHPRLGYLPVQTVLEGDNLETPITLISMWPEHYDPSQSPQLFHDDTHSRIEQYATRLAQMERTNGSFLTDSSSTTGSVEDEHALIQQYCQTLGGESPVSQPQSPAQILKSVEREERGELERIIADLEEEQRNLQVEYEQLKDQHLRRGLPVGSPPESIISPHHTSEDSELIAEAKLLRQHKGRLEARMQILEDHNKQLESQLHRLRQLLEQPESDSRINGVSPWASPQHSALSYSLDPDASGPQFHQAAGEDLLAPPHDTSTDLTEVMEQIHSTFPSCCPNVPSRPQAM

SEQ ID NO: 5453 - protein, 3438 aa, Homo sapiens
MSGLAATTFHWKKCRLDLPGHVALQACKSRSDEHNDVQKKTFTKWINARFSKSGKPPINDMFTDLKDGRKLLDLLEGLTGTSLPKERGSTRVHALNNVNRVLQVLHQNNVELVNIGGTDIVDGNHKLTLGLLWSIILHWQVKDVMKDVMSDLQQTNSEKILLSWVRQTTRPYSQVNVLNFTTSWTDGLAFNAVLHRHKPDLFSWDKVVKMSPIERLEHAFSKAQTYLGIEKLLDPEDVAVQLPDKKSIIMYLTSLFEVLPQQVTIDAIREVETLPRKYKKECEEEAINIQSTAPEEEHESPRAETPSTVTEVDMDLDSYQIALEEVLTWLLSAEDTFQEQDDISDDVEEVKDQFATHEAFMMELTAHQSSVGSVLQAGNQLITQGTLSDEEEFEIQEQMTLLNARWEALRVESMDRQSRLHDVLMELQKKQLQQLSAWLTLTEERIQKMETCPLDDDVKSLQKLLEEHKSLQSDLEAEQVKVNSLTHMVVIVDENSGESATAILEDQLQKLGERWTAVCRWTEERWNRLQEINILWQELLEEQCLLKAWLTEKEEALNKVQTSNFKDQKELSVSVRRLAILKEDMEMKRQTLDQLSEIGQDVGQLLDNSKASKKINSDSEELTQRWDSLVQRLEDSSNQVTQAVAKLGMSQIPQKDLLETVRVREQAITKKSKQELPPPPPPKKRQIHVDIEAKKKFDAISAELLNWILKWKTAIQTTEIKEYMKMQDTSEMKKKLKALEKEQRERIPRADELNQTGQILVEQMGKEGLPTEEIKNVLEKVSSEWKNVSQHLEDLERKIQLQEDINAYFKQLDELEKVIKTKEEWVKHTSISESSRQSLPSLKDSCQRELTNLLGLHPKIEMARASCSALMSQPSAPDFVQRGFDSFLGRYQAVQEAVEDRQQHLENELKGQPGHAYLETLKTLKDVLNDSENKAQVSLNVLNDLAKVEKALQEKKTLDEILENQKPALHKLAEETKALEKNVHPDVEKLYKQEFDDVQGKWNKLKVLVSKDLHLLEEIALTLRAFEADSTVIEKWMDGVKDFLMKQQAAQGDDAGLQRQLDQCSAFVNEIETIESSLKNMKEIETNLRSGPVAGIKTWVQTRLGDYQTQLEKLSKEIATQKSRLSESQEKAANLKKDLAEMQEWMTQAEEEYLERDFEYKSPEELESAVEEMKRAKEDVLQKEVRVKILKDNIKLLAAKVPSGGQELTSELNVVLENYQLLCNRIRGKCHTLEEVWSCWIELLHYLDLETTWLNTLEERMKSTEVLPEKTDAVNEALESLESVLRHPADNRTQIRELGQTLIDGGILDDIISEKLEAFNSRYEDLSHLAESKQISLEKQLQVLRETDQMLQVLQESLGELDKQLTTYLTDRIDAFQVPQEAQKIQAEISAHELTLEELRRNMRSQPLTSPESRTARGGSQMDVLQRKLREVSTKFQLFQKPANFEQRMLDCKRVLDGVKAELHVLDVKDVDPDVIQTHLDKCMKLYKTLSEVKLEVETVIKTGRHIVQKQQTDNPKGMDEQLTSLKVLYNDLGAQVTEGKQDLERASQLARKMKKEAASLSEWLSATETELVQKSTSEGLLGDLDTEISWAKNVLKDLEKRKADLNTITESSAALQNLIEGSEPILEERLCVLNAGWSRVRTWTEDWCNTLMNHQNQLEIFDGNVAHISTWLYQAEALLDEIEKKPTSKQEEIVKRLVSELDDANLQVENVRDQALILMNARGSSSRELVEPKLAELNRNFEKVSQHIKSAKLLIAQEPLYQCLVTTETFETGVPFSDLEKLENDIENMLKFVEKHLESSDEDEKMDEESAQIEEVLQRGEEMLHQPMEDNKKEKIRLQLLLLHTRYNKIKAIPIQQRKMGQLASGIRSSLLPTDYLVEINKILLCMDDVELSLNVPELNTAIYEDFSFQEDSLKNIKDQLDKLGEQIAVIHEKQPDVILEASGPEAIQIRDTLTQLNAKWDRINRMYSDRKGCFDRAMEEWRQFHCDLNDLTQWITEAEELLVDTCAPGGSLDLEKARIHQQELEVGISSHQPSFAALNRTGDGIVQKLSQADGSFLKEKLAGLNQRWDAIVAEVKDRQPRLKGESKQVMKYRHQLDEIICWLTKAEHAMQKRSTTELGENLQELRDLTQEMEVHAEKLKWLNRTELEMLSDKSLSLPERDKISESLRTVNMTWNKICREVPTTLKECIQEPSSVSQTRIAAHPNVQKVVLVSSASDIPVQSHRTSEISIPADLDKTITELADWLVLIDQMLKSNIVTVGDVEEINKTVSRMKITKADLEQRHPQLDYVFTLAQNLKNKASSSDMRTAITEKLERVKNQWDGTQHGVELRQQQLEDMIIDSLQWDDHREETEELMRKYEARLYILQQARRDPLTKQISDNQILLQELGPGDGIVMAFDNVLQKLLEEYGSDDTRNVKETTEYLKTSWINLKQSIADRQNALEAEWRTVQASRRDLENFLKWIQEAETTVNVLVDASHRENALQDSILARELKQQMQDIQAEIDAHNDIFKSIDGNRQKMVKALGNSEEATMLQHRLDDMNQRWNDLKAKSASIRAHLEASAEKWNRLLMSLEELIKWLNMKDEELKKQMPIGGDVPALQLQYDHCKALRRELKEKEYSVLNAVDQARVFLADQPIEAPEEPRRNLQSKTELTPEERAQKIAKAMRKQSSEVKEKWESLNAVTSNWQKQVDKALEKLRDLQGAMDDLDADMKEAESVRNGWKPVGDLLIDSLQDHIEKIMAFREEIAPINFKVKTVNDLSSQLSPLDLHPSLKMSRQLDDLNMRWKLLQVSVDDRLKQLQEAHRDFGPSSQHFLSTSVQLPWQRSISHNKVPYYINHQTQTTCWDHPKMTELFQSLADLNNVRFSAYRTAIKIRRLQKALCLDLLELSTTNEIFKQHKLNQNDQLLSVPDVINCLTTTYDGLEQMHKDLVNVPLCVDMCLNWLLNVYDTGRTGKIRVQSLKIGLMSLSKGLLEEKYRYLFKEVAGPTEMCDQRQLGLLLHDAIQIPRQLGEVAAFGGSNIEPSVRSCFQQNNNKPEISVKEFIDWMHLEPQSMVWLPVLHRVAAAETAKHQAKCNICKECPIVGFRYRSLKHFNYDVCQSCFFSGRTAKGHKLHYPMVEYCIPTTSGEDVRDFTKVLKNKFRSKKYFAKHPRLGYLPVQTVLEGDNLETPITLISMWPEHYDPSQSPQLFHDDTHSRIEQYATRLAQMERTNGSFLTDSSSTTGSVEDEHALIQQYCQTLGGESPVSQPQSPAQILKSVEREERGELERIIADLEEEQRNLQVEYEQLKDQHLRRGLPVGSPPESIISPHHTSEDSELIAEAKLLRQHKGRLEARMQILEDHNKQLESQLHRLRQLLEQPESDSRINGVSPWASPQHSALSYSLDPDASGPQFHQAAGEDLLAPPHDTSTDLTEVMEQIHSTFPSCCPNVPSRPQAM

SEQ ID NO: 5454 - protein, 624 aa, Homo sapiens
MKFFDFLFIFKILPPYYINFFSSHQTQTTCWDHPKMTELFQSLADLNNVRFSAYRTAIKIRRLQKALCLDLLELSTTNEIFKQHKLNQNDQLLSVPDVINCLTTTYDGLEQMHKDLVNVPLCVDMCLNWLLNVYDTGRTGKIRVQSLKIGLMSLSKGLLEEKYRYLFKEVAGPTEMCDQRQLGLLLHDAIQIPRQLGEVAAFGGSNIEPSVRSCFQQNNNKPEISVKEFIDWMHLEPQSMVWLPVLHRVAAAETAKHQAKCNICKECPIVGFRYRSLKHFNYDVCQSCFFSGRTAKGHKLHYPMVEYCIPTTSGEDVRDFTKVLKNKFRSKKYFAKHPRLGYLPVQTVLEGDNLETPITLISMWPEHYDPSQSPQLFHDDTHSRIEQYATRLAQMERTNGSFLTDSSSTTGSVEDEHALIQQYCQTLGGESPVSQPQSPAQILKSVEREERGELERIIADLEEEQRNLQVEYEQLKDQHLRRGLPVGSPPESIISPHHTSEDSELIAEAKLLRQHKGRLEARMQILEDHNKQLESQLHRLRQLLEQPESDSRINGVSPWASPQHSALSYSLDPDASGPQFHQAAGEDLLAPPHDTSTDLTEVMEQIHSTFPSCCPNVPSRPQAM

SEQ ID NO: 5455 - protein, 1347 aa, Homo sapiens
MKYRHQLDEIICWLTKAEHAMQKRSTTELGENLQELRDLTQEMEVHAEKLKWLNRTELEMLSDKSLSLPERDKISESLRTVNMTWNKICREVPTTLKECIQEPSSVSQTRIAAHPNVQKVVLVSSASDIPVQSHRTSEISIPADLDKTITELADWLVLIDQMLKSNIVTVGDVEEINKTVSRMKITKADLEQRHPQLDYVFTLAQNLKNKASSSDMRTAITEKLERVKNQWDGTQHGVELRQQQLEDMIIDSLQWDDHREETEELMRKYEARLYILQQARRDPLTKQISDNQILLQELGPGDGIVMAFDNVLQKLLEEYGSDDTRNVKETTEYLKTSWINLKQSIADRQNALEAEWRTVQASRRDLENFLKWIQEAETTVNVLVDASHRENALQDSILARELKQQMQDIQAEIDAHNDIFKSIDGNRQKMVKALGNSEEATMLQHRLDDMNQRWNDLKAKSASIRAHLEASAEKWNRLLMSLEELIKWLNMKDEELKKQMPIGGDVPALQLQYDHCKALRRELKEKEYSVLNAVDQARVFLADQPIEAPEEPRRNLQSKTELTPEERAQKIAKAMRKQSSEVKEKWESLNAVTSNWQKQVDKALEKLRDLQGAMDDLDADMKEAESVRNGWKPVGDLLIDSLQDHIEKIMAFREEIAPINFKVKTVNDLSSQLSPLDLHPSLKMSRQLDDLNMRWKLLQVSVDDRLKQLQEAHRDFGPSSQHFLSTSVQLPWQRSISHNKVPYYINHQTQTTCWDHPKMTELFQSLADLNNVRFSAYRTAIKIRRLQKALCLDLLELSTTNEIFKQHKLNQNDQLLSVPDVINCLTTTYDGLEQMHKDLVNVPLCVDMCLNWLLNVYDTGRTGKIRVQSLKIGLMSLSKGLLEEKYRYLFKEVAGPTEMCDQRQLGLLLHDAIQIPRQLGEVAAFGGSNIEPSVRSCFQQNNNKPEISVKEFIDWMHLEPQSMVWLPVLHRVAAAETAKHQAKCNICKECPIVGFRYRSLKHFNYDVCQSCFFSGRTAKGHKLHYPMVEYCIPTTSGEDVRDFTKVLKNKFRSKKYFAKHPRLGYLPVQTVLEGDNLETPITLISMWPEHYDPSQSPQLFHDDTHSRIEQYATRLAQMERTNGSFLTDSSSTTGSVEDEHALIQQYCQTLGGESPVSQPQSPAQILKSVEREERGELERIIADLEEEQRNLQVEYEQLKDQHLRRGLPVGSPPESIISPHHTSEDSELIAEAKLLRQHKGRLEARMQILEDHNKQLESQLHRLRQLLEQPESDSRINGVSPWASPQHSALSYSLDPDASGPQFHQAAGEDLLAPPHDTSTDLTEVMEQIHSTFPSCCPNVPSRPQAM

SEQ ID NO: 5456 - protein, 309 aa, Homo sapiens
MATELQCPDSMPCHNQQVNSASTPSPEQLRPGDLILDHAGGNRASRAKVILLTGYAHSSLPAELDSGACGGSSLNSEGNSGSGDSSSYDAPAGNSFLEDCELSRQIGAQLKLLPMNDQIRELQTIIRDKTASRGDFMFSADRLIRLVVEEGLNQLPYKECMVTTPTGYKYEGVKFEKGNCGVSIMRSGEAMEQGLRDCCRSIRIGKILIQSDEETQRAKVYYAKFPPDIYRRKVLLMYPILSTGNTVIEAVKVLIEHGVQPSVIILLSLFSTPHGAKSIIQEFPEITILTTEVHPVAPTHFGQKYFGTD

SEQ ID NO: 5457 - protein, 176 aa, Homo sapiens
MATELQCPDSMPCHNQQVNSASTPSPEQLRPGDLILDHAGGNRASRAKVILLTGYAHSSLPAELDSGACGGSSLNSEGNSGSGDSSSYDAPAGNSFLEDCELSRQIGAQLKLLPMNDQIRELQTIIRDKTASRGDFMFSADRLVLPEDLFQKSIDNSCSAFHHQTCCGRGIESAAI

SEQ ID NO: 5458 - protein, 167 aa, Homo sapiens
MNDQIRELQTIIRDKTASRGDFMFSADRLIRLVVEEGLNQLPYKECMVTTPTGYKYEGVKFEKGNCGVSIMRSGEAMEQGLRDCCRSIRIGKILIQSDEETQRAKVYYAKFPPDIYRRKVLLMYPILSTGNTVIEAVKVLIEHGVQPSVIILLSLFSTPHGEFSMRQ

SEQ ID NO: 5459 - protein, 119 aa, Homo sapiens
MNKILSSTVCFGLLTLLSVLSFLQSVHGRPYLTQGNEIFPDKKYTNREELLLALLNKNFDFQRPFNTDLALPNKLEELNQLEKLKEQLVEEKDSETSYAVDGLFSSHPSKRACFWKYCV

SEQ ID NO: 5460 - protein, 739 aa, Homo sapiens
MPGKMVVILGASNILWIMFAASQAFKIETTPESRYLAQIGDSVSLTCSTTGCESPFFSWRTQIDSPLNGKVTNEGTTSTLTMNPVSFGNEHSYLCTATCESRKLEKGIQVEIYSFPKDPEIHLSGPLEAGKPITVKCSVADVYPFDRLEIDLLKGDHLMKSQEFLEDADRKSLETKSLEVTFTPVIEDIGKVLVCRAKLHIDEMDSVPTVRQAVKELQVYISPKNTVISVNPSTKLQEGGSVTMTCSSEGLPAPEIFWSKKLDNGNLQHLSGNATLTLIAMRMEDSGIYVCEGVNLIGKNRKEVELIVQEKPFTVEISPGPRIAAQIGDSVMLTCSVMGCESPSFSWRTQIDSPLSGKVRSEGTNSTLTLSPVSFENEHSYLCTVTCGHKKLEKGIQVELYSFPRDPEIEMSGGLVNGSSVTVSCKVPSVYPLDRLEIELLKGETILENIEFLEDTDMKSLENKSLEMTFIPTIEDTGKALVCQAKLHIDDMEFEPKQRQSTQTLYVNVAPRDTTVLVSPSSILEEGSSVNMTCLSQGFPAPKILWSRQLPNGELQPLSENATLTLISTKMEDSGVYLCEGINQAGRSRKEVELIIQVTPKDIKLTAFPSESVKEGDTVIISCTCGNVPETWIILKKKAETGDTVLKSIDGAYTIRKAQLKDAGVYECESKNKVGSQLRSLTLDVQGRENNKDYFSPELLVLYFASSLIIPAIGMIIYFARKANMKGSYSLVEAQKSKV

SEQ ID NO: 5461 - protein, 647 aa, Homo sapiens
MPGKMVVILGASNILWIMFAASQAFKIETTPESRYLAQIGDSVSLTCSTTGCESPFFSWRTQIDSPLNGKVTNEGTTSTLTMNPVSFGNEHSYLCTATCESRKLEKGIQVEIYSFPKDPEIHLSGPLEAGKPITVKCSVADVYPFDRLEIDLLKGDHLMKSQEFLEDADRKSLETKSLEVTFTPVIEDIGKVLVCRAKLHIDEMDSVPTVRQAVKELQVYISPKNTVISVNPSTKLQEGGSVTMTCSSEGLPAPEIFWSKKLDNGNLQHLSGNATLTLIAMRMEDSGIYVCEGVNLIGKNRKEVELIVQAFPRDPEIEMSGGLVNGSSVTVSCKVPSVYPLDRLEIELLKGETILENIEFLEDTDMKSLENKSLEMTFIPTIEDTGKALVCQAKLHIDDMEFEPKQRQSTQTLYVNVAPRDTTVLVSPSSILEEGSSVNMTCLSQGFPAPKILWSRQLPNGELQPLSENATLTLISTKMEDSGVYLCEGINQAGRSRKEVELIIQVTPKDIKLTAFPSESVKEGDTVIISCTCGNVPETWIILKKKAETGDTVLKSIDGAYTIRKAQLKDAGVYECESKNKVGSQLRSLTLDVQGRENNKDYFSPELLVLYFASSLIIPAIGMIIYFARKANMKGSYSLVEAQKSKV

SEQ ID NO: 5462 - protein, 677 aa, Homo sapiens
MPGKMVVILGASNILWIMFAASQAFKIETTPESRYLAQIGDSVSLTCSTTGSFPKDPEIHLSGPLEAGKPITVKCSVADVYPFDRLEIDLLKGDHLMKSQEFLEDADRKSLETKSLEVTFTPVIEDIGKVLVCRAKLHIDEMDSVPTVRQAVKELQVYISPKNTVISVNPSTKLQEGGSVTMTCSSEGLPAPEIFWSKKLDNGNLQHLSGNATLTLIAMRMEDSGIYVCEGVNLIGKNRKEVELIVQEKPFTVEISPGPRIAAQIGDSVMLTCSVMGCESPSFSWRTQIDSPLSGKVRSEGTNSTLTLSPVSFENEHSYLCTVTCGHKKLEKGIQVELYSFPRDPEIEMSGGLVNGSSVTVSCKVPSVYPLDRLEIELLKGETILENIEFLEDTDMKSLENKSLEMTFIPTIEDTGKALVCQAKLHIDDMEFEPKQRQSTQTLYVNVAPRDTTVLVSPSSILEEGSSVNMTCLSQGFPAPKILWSRQLPNGELQPLSENATLTLISTKMEDSGVYLCEGINQAGRSRKEVELIIQVTPKDIKLTAFPSESVKEGDTVIISCTCGNVPETWIILKKKAETGDTVLKSIDGAYTIRKAQLKDAGVYECESKNKVGSQLRSLTLDVQGRENNKDYFSPELLVLYFASSLIIPAIGMIIYFARKANMKGSYSLVEAQKSKV

SEQ ID NO: 5463 - protein, 124 aa, Homo sapiens
MYKLASCCLLFIGFLNPLLSLPLLDSREISFQLSAPHEDARLTPEELERASLLQILPEMLGAERGDILRKADSSTNIFNPRGNLRKFQDFSGQDPNILLSHLLARIWKPYKKRETPDCFWKYCV

SEQ ID NO: 5464 - protein, 139 aa, Homo sapiens
METNVFHLMLCVTSARTHKSTSLCFGHFNSYPSLPLIHDLLLEISFQLSAPHEDARLTPEELERASLLQILPEMLGAERGDILRKADSSTNIFNPRGNLRKFQDFSGQDPNILLSHLLARIWKPYKKRETPDCFWKYCV

SEQ ID NO: 5465 - protein, 503 aa, Homo sapiens
MPDVKESVPPKYPGDSEGRSCKPETSGPPQEDKSGSEDPPPFLSVTGLTETVNEVSKLSNKIGMNCDYYMEEKVLPPSSLEGKVKETVHNAFWDHLKEQLSATPPDFSCALELLKEIKEILLSLLLPRQNRLRIEIEEALDMDLLKQEAEHGALKVLYLSKYVLNMMALLCAPVRDEAVQKLENITDPVWLLRGIFQVLGRMKMDMVNYTIQSLQPHLQEHSIQYERAKFQELLNKQPSLLNHTTKWLTQAAGDLTMSPPTCPDTSDSSSVAGPSPNEAANNPEPLSPTMVLCQGFLNLLLWDLENEEFPETLLMDRTRLQELKSQLHQLTVMASVLLVASSFSGSVLFGSPQFVDKLKRITKSLLEDFHSRPEEAILTVSEQVSQEIHQSLKNMGLVALSSDNTASLMGQLQNIAKKENCVCSVIDQRIHLFLKCCLVLGVQRSLLDLPGGLTLIEAELAELGQKFVNLTHHNQQVFGPYYTEILKTLISPAQALETKVESV

SEQ ID NO: 5466 - protein, 441 aa, Homo sapiens
MAPKGILGSFPTAMNLSLEGKVKETVHNAFWDHLKEQLSATPPDFSCALELLKEIKEILLSLLLPRQNRLRIEIEEALDMDLLKQEAEHGALKVLYLSKYVLNMMALLCAPVRDEAVQKLENITDPVWLLRGIFQVLGRMKMDMVNYTIQSLQPHLQEHSIQYERAKFQELLNKQPSLLNHTTKWLTQAAGDLTMSPPTCPDTSDSSSVAGPSPNEAANNPEPLSPTMVLCQGFLNLLLWDLENEEFPETLLMDRTRLQELKSQLHQLTVMASVLLVASSFSGSVLFGSPQFVDKLKRITKSLLEDFHSRPEEAILTVSEQVSQEIHQSLKNMGLVALSSDNTASLMGQLQNIAKKENCVCSVIDQRIHLFLKCCLVLGVQRSLLDLPGGLTLIEAELAELGQKFVNLTHHNQQVFGPYYTEILKTLISPAQALETKVESV

SEQ ID NO: 5467 - protein, 440 aa, Homo sapiens
MNCDYYMEEKVLPPSSLEGKVKETVHNAFWDHLKEQLSATPPDFSCALELLKEIKEILLSLLLPRQNRLRIEIEEALDMDLLKQEAEHGALKVLYLSKYVLNMMALLCAPVRDEAVQKLENITDPVWLLRGIFQVLGRMKMDMVNYTIQSLQPHLQEHSIQYERAKFQELLNKQPSLLNHTTKWLTQAAGDLTMSPPTCPDTSDSSSVAGPSPNEAANNPEPLSPTMVLCQGFLNLLLWDLENEEFPETLLMDRTRLQELKSQLHQLTVMASVLLVASSFSGSVLFGSPQFVDKLKRITKSLLEDFHSRPEEAILTVSEQVSQEIHQSLKNMGLVALSSDNTASLMGQLQNIAKKENCVCSVIDQRIHLFLKCCLVLGVQRSLLDLPGGLTLIEAELAELGQKFVNLTHHNQQVFGPYYTEILKTLISPAQALETKVESV

SEQ ID NO: 5468 - protein, 470 aa, Homo sapiens
MTRGGGGGVLSVTGLTETVNEVSKLSNKIGMNCDYYMEEKVLPPSSLEGKVKETVHNAFWDHLKEQLSATPPDFSCALELLKEIKEILLSLLLPRQNRLRIEIEEALDMDLLKQEAEHGALKVLYLSKYVLNMMALLCAPVRDEAVQKLENITDPVWLLRGIFQVLGRMKMDMVNYTIQSLQPHLQEHSIQYERAKFQELLNKQPSLLNHTTKWLTQAAGDLTMSPPTCPDTSDSSSVAGPSPNEAANNPEPLSPTMVLCQGFLNLLLWDLENEEFPETLLMDRTRLQELKSQLHQLTVMASVLLVASSFSGSVLFGSPQFVDKLKRITKSLLEDFHSRPEEAILTVSEQVSQEIHQSLKNMGLVALSSDNTASLMGQLQNIAKKENCVCSVIDQRIHLFLKCCLVLGVQRSLLDLPGGLTLIEAELAELGQKFVNLTHHNQQVFGPYYTEILKTLISPAQALETKVESV

SEQ ID NO: 5469 - protein, 511 aa, Homo sapiens
MTRGGGGGDTISKMPDVKESVPPKYPGDSEGRSCKPETSGPPQEDKSGSEDPPPCLTETVNEVSKLSNKIGMNCDYYMEEKVLPPSSLEGKVKETVHNAFWDHLKEQLSATPPDFSCALELLKEIKEILLSLLLPRQNRLRIEIEEALDMDLLKQEAEHGALKVLYLSKYVLNMMALLCAPVRDEAVQKLENITDPVWLLRGIFQVLGRMKMDMVNYTIQSLQPHLQEHSIQYERAKFQELLNKQPSLLNHTTKWLTQAAGDLTMSPPTCPDTSDSSSVAGPSPNEAANNPEPLSPTMVLCQGFLNLLLWDLENEEFPETLLMDRTRLQELKSQLHQLTVMASVLLVASSFSGSVLFGSPQFVDKLKRITKSLLEDFHSRPEEAILTVSEQVSQEIHQSLKNMGLVALSSDNTASLMGQLQNIAKKENCVCSVIDQRIHLFLKCCLVLGVQRSLLDLPGGLTLIEAELAELGQKFVNLTHHNQQVFGPYYTEILKTLISPAQALETKVESV

SEQ ID NO: 5470 - protein, 465 aa, Homo sapiens
MTRGGGGGGLTETVNEVSKLSNKIGMNCDYYMEEKVLPPSSLEGKVKETVHNAFWDHLKEQLSATPPDFSCALELLKEIKEILLSLLLPRQNRLRIEIEEALDMDLLKQEAEHGALKVLYLSKYVLNMMALLCAPVRDEAVQKLENITDPVWLLRGIFQVLGRMKMDMVNYTIQSLQPHLQEHSIQYERAKFQELLNKQPSLLNHTTKWLTQAAGDLTMSPPTCPDTSDSSSVAGPSPNEAANNPEPLSPTMVLCQGFLNLLLWDLENEEFPETLLMDRTRLQELKSQLHQLTVMASVLLVASSFSGSVLFGSPQFVDKLKRITKSLLEDFHSRPEEAILTVSEQVSQEIHQSLKNMGLVALSSDNTASLMGQLQNIAKKENCVCSVIDQRIHLFLKCCLVLGVQRSLLDLPGGLTLIEAELAELGQKFVNLTHHNQQVFGPYYTEILKTLISPAQALETKVESV

SEQ ID NO: 5471 - protein, 516 aa, Homo sapiens
MTRGGGGGDTISKMPDVKESVPPKYPGDSEGRSCKPETSGPPQEDKSGSEDPPPFLSVTGLTETVNEVSKLSNKIGMNCDYYMEEKVLPPSSLEGKVKETVHNAFWDHLKEQLSATPPDFSCALELLKEIKEILLSLLLPRQNRLRIEIEEALDMDLLKQEAEHGALKVLYLSKYVLNMMALLCAPVRDEAVQKLENITDPVWLLRGIFQVLGRMKMDMVNYTIQSLQPHLQEHSIQYERAKFQELLNKQPSLLNHTTKWLTQAAGDLTMSPPTCPDTSDSSSVAGPSPNEAANNPEPLSPTMVLCQGFLNLLLWDLENEEFPETLLMDRTRLQELKSQLHQLTVMASVLLVASSFSGSVLFGSPQFVDKLKRITKSLLEDFHSRPEEAILTVSEQVSQEIHQSLKNMGLVALSSDNTASLMGQLQNIAKKENCVCSVIDQRIHLFLKCCLVLGVQRSLLDLPGGLTLIEAELAELGQKFVNLTHHNQQVFGPYYTEILKTLISPAQALETKVESV

SEQ ID NO: 5472 - protein, 397 aa, Homo sapiens
MNAGSDPVVIVSAARTIIGSFNGALAAVPVQDLGSTVIKEVLKRATVAPEDVSEVIFGHVLAAGCGQNPVRQASVGAGIPYSVPAWSCQMICGSGLKAVCLAVQSIGIGDSSIVVAGGMENMSKAPHLAYLRTGVKIGEMPLTDSILCDGLTDAFHNCHMGITAENVAKKWQVSREDQDKVAVLSQNRTENAQKAGHFDKEIVPVLVSTRKGLIEVKTDEFPRHGSNIEAMSKLKPYFLTDGTGTVTPANASGINDGAAAVVLMKKSEADKRGLTPLARIVSWSQVGVEPSIMGIGPIPAIKQAVTKAGWSLEDVDIFEINEAFAAVSAAIVKELGLNPEKVNIEGGAIALGHPLGASGCRILVTLLHTLERMGRSRGVAALCIGGGMGIAMCVQRE

SEQ ID NO: 5473 - protein, 426 aa, Homo sapiens
MGSHPVLRIWGNRRATAASLGRSGGRLSSPRLLRVVAPTLTFAQTSRCSFNGALAAVPVQDLGSTVIKEVLKRATVAPEDVSEVIFGHVLAAGCGQNPVRQASVGAGIPYSVPAWSCQMICGSGLKAVCLAVQSIGIGDSSIVVAGGMENMSKAPHLAYLRTGVKIGEMPLTDSILCDGLTDAFHNCHMGITAENVAKKWQVSREDQDKVAVLSQNRTENAQKAGHFDKEIVPVLVSTRKGLIEVKTDEFPRHGSNIEAMSKLKPYFLTDGTGTVTPANASGINDGAAAVVLMKKSEADKRGLTPLARIVSWSQVGVEPSIMGIGPIPAIKQAVTKAGWSLEDVDIFEINEAFAAVSAAIVKELGLNPEKVNIEGGAIALGHPLGASGCRILVTLLHTLERMGRSRGVAALCIGGGMGIAMCVQRE

SEQ ID NO: 5474 - protein, 687 aa, Homo sapiens
MAEELVLERCDLELETNGRDHHTADLCREKLVVRRGQPFWLTLHFEGRNYEASVDSLTFSVVTGPAPSQEAGTKARFPLRDAVEEGDWTATVVDQQDCTLSLQLTTPANAPIGLYRLSLEASTGYQGSSFVLGHFILLFNAWCPADAVYLDSEEERQEYVLTQQGFIYQGSAKFIKNIPWNFGQFEDGILDICLILLDVNPKFLKNAGRDCSRRSSPVYVGRVVSGMVNCNDDQGVLLGRWDNNYGDGVSPMSWIGSVDILRRWKNHGCQRVKYGQCWVFAAVACTVLRCLGIPTRVVTNYNSAHDQNSNLLIEYFRNEFGEIQGDKSEMIWNFHCWVESWMTRPDLQPGYEGWQALDPTPQEKSEGTYCCGPVPVRAIKEGDLSTKYDAPFVFAEVNADVVDWIQQDDGSVHKSINRSLIVGLKISTKSVGRDEREDITHTYKYPEGSSEEREAFTRANHLNKLAEKEETGMAMRIRVGQSMNMGSDFDVFAHITNNTAEEYVCRLLLCARTVSYNGILGPECGTKYLLNLNLEPFSEKSVPLCILYEKYRDCLTESNLIKVRALLVEPVINSYLLAERDLYLENPEIKIRILGEPKQKRKLVAEVSLQNPLPVALEGCTFTVEGAGLTEEQKTVEIPDPVEAGEEVKVRMDLLPLHMGLHKLVVNFESDKLKAVKGFRNVIIGPA

SEQ ID NO: 5475 - protein, 548 aa, Homo sapiens
MAEELVLERCDLELETNGRDHHTADLCREKLVVRRGQPFWLTLHFEGRNYEASVDSLTFSVVTGPAPSQEAGTKARFPLRDAVEEGDWTATVVDQQDCTLSLQLTTPANAPIGLYRLSLEASTGYQGSSFVLGHFILLFNAWCPADAVYLDSEEERQEYVLTQQGFIYQGSAKFIKNIPWNFGQFEDGILDICLILLDVNPKFLKNAGRDCSRRSSPVYVGRVVSGMVNCNDDQGVLLGRWDNNYGDGVSPMSWIGSVDILRRWKNHGCQRVKYGQCWVFAAVACTVLRCLGIPTRVVTNYNSAHDQNSNLLIEYFRNEFGEIQGDKSEMIWNFHCWVESWMTRPDLQPGYEGWQALDPTPQEKSEGTYCCGPVPVRAIKEGDLSTKYDAPFVFAEVNADVVDWIQQDDGSVHKSINRSLIVGLKISTKSVGRDEREDITHTYKYPEGSSEEREAFTRANHLNKLAEKEETGMAMRIRVGQSMNMGSDFDVFAHITNNTAEEYVCRLLLCARTVSYNGILGPECGTKYLLNLNLEPFSGKALCSWSIC

SEQ ID NO: 5476 - protein, 349 aa, Homo sapiens
MAEELVLERCDLELETNGRDHHTADLCREKLVVRRGQPFWLTLHFEGRNYEASVDSLTFSVVTGPAPSQEAGTKARFPLRDAVEEGDWTATVVDQQDCTLSLQLTTPANAPIGLYRLSLEASTGYQGSSFVLGHFILLFNAWCPADAVYLDSEEERQEYVLTQQGFIYQGSAKFIKNIPWNFGQFEDGILDICLILLDVNPKFLKNAGRDCSRRSSPVYVGRVVSGMVNCNDDQGVLLGRWDNNYGDGVSPMSWIGSVDILRRWKNHGCQRVKYGQCWVFAAVACTGELHAGMWVMSPGRGHEEHWSRNQDIPALVLPPATNTLNALCGLEPVTTLSGPLSNSHPSSGC

SEQ ID NO: 5477 - protein, 301 aa, Homo sapiens
MEGDFSVCRNCKRHVVSANFTLHEAYCLRFLVLCPECEEPVPKETMEEHCKLEHQQVGCTMCQQSMQKSSLEFHKANECQERPVECKFCKLDMQLSKLELHESYCGSRTELCQGCGQFIMHRMLAQHRDVCRSEQAQLGKGERISAPEREIYCHYCNQMIPENKYFHHMGKCCPDSEFKKHFPVGNPEILPSSLPSQAAENQTSTMEKDVRPKTRSINRFPLHSESSSKKAPRSKNKTLDPLLMSEPKPRTSSPRGDKAAYDILRRCSQCGILLPLPILNQHQEKCRWLASSKGKQVRNFS

SEQ ID NO: 5478 - protein, 282 aa, Homo sapiens
MEGDFSVCRNCKRHVVSANFTLHEAYCLRFLVLCPECEEPVPKETMEEHCKLEHQQANECQERPVECKFCKLDMQLSKLELHESYCGSRTELCQGCGQFIMHRMLAQHRDVCRSEQAQLGKGERISAPEREIYCHYCNQMIPENKYFHHMGKCCPDSEFKKHFPVGNPEILPSSLPSQAAENQTSTMEKDVRPKTRSINRFPLHSESSSKKAPRSKNKTLDPLLMSEPKPRTSSPRGDKAAYDILRRCSQCGILLPLPILNQHQEKCRWLASSKGKQVRNFS

SEQ ID NO: 5479 - protein, 141 aa, Homo sapiens
MEGDFSVCRNCKRHVVSANFTLHEAYCLRFLVLCPECEEPVPKETMEEHCKLEHQQVGCTMCQQSMQKSSLEFHKANECQERPVECKFCKLDMQLSKLELHESYCGSRTELCQGCGQFIMHRMLAQHRDVCRSEQAQLGKG

SEQ ID NO: 5480 - protein, 122 aa, Homo sapiens
MEGDFSVCRNCKRHVVSANFTLHEAYCLRFLVLCPECEEPVPKETMEEHCKLEHQQANECQERPVECKFCKLDMQLSKLELHESYCGSRTELCQGCGQFIMHRMLAQHRDVCRSEQAQLGKG

SEQ ID NO: 5481 - protein, 166 aa, Homo sapiens
MEGDFSVCRNCKRHVVSANFTLHEAYCLRFLVLCPECEEPVPKETMEEHCKLEHQQVGCTMCQQSMQKSSLEFHKANECQERPVECKFCKLDMQLSKLELHESYCGSRTELCQGCGQFIMHRMLAQHRDVCRSEQAQLGKETSPDPGKCLSITVAAALSAHLWPFT

SEQ ID NO: 5482 - protein, 199 aa, Homo sapiens
MSLHYGCCCPECTSVAIKEMMWVIRPRVACVVKDAGSAGERISAPEREIYCHYCNQMIPENKYFHHMGKCCPDSEFKKHFPVGNPEILPSSLPSQAAENQTSTMEKDVRPKTRSINRFPLHSESSSKKAPRSKNKTLDPLLMSEPKPRTSSPRGDKAAYDILRRCSQCGILLPLPILNQHQEKCRWLASSKGKQVRNFS

SEQ ID NO: 5483 - protein, 301 aa, Homo sapiens
MEGDFSVCRNCKRHVVSANFTLHEAYCLRFLVLCPECEEPVPKETMEEHCKLEHQQGKEFQLLKGKSTVIIATKKANECQERPVECKFCKLDMQLSKLELHESYCGSRTELCQGCGQFIMHRMLAQHRDVCRSEQAQLGKGERISAPEREIYCHYCNQMIPENKYFHHMGKCCPDSEFKKHFPVGNPEILPSSLPSQAAENQTSTMEKDVRPKTRSINRFPLHSESSSKKAPRSKNKTLDPLLMSEPKPRTSSPRGDKAAYDILRRCSQCGILLPLPILNQHQEKCRWLASSKGKQVRNFS

SEQ ID NO: 5484 - protein, 539 aa, Homo sapiens
MPENVAPRSGATAGAAGGRGKGAYQDRDKPAQIRFSNISAAKAVADAIRTSLGPKGMDKMIQDGKGDVTITNDGATILKQMQVLHPAARMLVELSKAQDIEAGDGTTSVVIIAGSLLDSCTKLLQKGIHPTIISESFQKALEKGIEILTDMSRPVELSDRETLLNSATTSLNSKVVSQYSSLLSPMSVNAVMKVIDPATATSVDLRDIKIVKKLGGTIDDCELVEGLVLTQKVSNSGITRVEKAKIGLIQFCLSAPKTDMDNQIVVSDYAQMDRVLREERAYILNLVKQIKKTGCNVLLIQKSILRDALSDLALHFLNKMKIMVIKDIEREDIEFICKTIGTKPVAHIDQFTADMLGSAELAEEVNLNGSGKLLKITGCASPGKTVTIVVRGSNKLVIEEAERSIHDALCVIRCLVKKRALIAGGGAPEIELALRLTEYSRTLSGMESYCVRAFADAMEVIPSTLAENAGLNPISTVTELRNRHAQGEKTAGINVRKGGISNILEELVVQPLLVSVSALTLATETVRSILKIDDVVNTR

SEQ ID NO: 5485 - protein, 509 aa, Homo sapiens
MPENVAPRSGATAGAAGGRGKGAYQDRDKPAQIRFSNISAAKAVADAIRTSLGPKGMDKMLVELSKAQDIEAGDGTTSVVIIAGSLLDSCTKLLQKGIHPTIISESFQKALEKGIEILTDMSRPVELSDRETLLNSATTSLNSKVVSQYSSLLSPMSVNAVMKVIDPATATSVDLRDIKIVKKLGGTIDDCELVEGLVLTQKVSNSGITRVEKAKIGLIQFCLSAPKTDMDNQIVVSDYAQMDRVLREERAYILNLVKQIKKTGCNVLLIQKSILRDALSDLALHFLNKMKIMVIKDIEREDIEFICKTIGTKPVAHIDQFTADMLGSAELAEEVNLNGSGKLLKITGCASPGKTVTIVVRGSNKLVIEEAERSIHDALCVIRCLVKKRALIAGGGAPEIELALRLTEYSRTLSGMESYCVRAFADAMEVIPSTLAENAGLNPISTVTELRNRHAQGEKTAGINVRKGGISNILEELVVQPLLVSVSALTLATETVRSILKIDDVVNTR

SEQ ID NO: 5486 - protein, 236 aa, Homo sapiens
MTAEFLSLLCLGLCLGYEDEKKNEKPPKPSLHAWPSSVVEAESNVTLKCQAHSQNVTFVLRKVNDSGYKQEQSSAENEAEFPFTDLKPKDAGRYFCAYKTTASHEWSESSEHLQLVVTDKHDELEAPSMKTDTRTIFVAIFSCISILLLFLSVFIIYRCSQHSSSSEESTKRTSHSKLPEQEAAEADLSNMERVSLSTADPQGVTYAELSTSALSEAASDTTQEPPGSHEYAALKV

SEQ ID NO: 5487 - protein, 205 aa, Homo sapiens
MTAEFLSLLCLGLCLGYEDEKKNEKPPKPSLHAWPSSVVEAESNVTLKCQAHSQNVTFVLRKVNDSGYKQEQSSAENEAEFPFTDLKPKDAGRYFCAYKTTASHEWSESSEHLQLVVTDKHDELEAPSMKTGSSSEESTKRTSHSKLPEQEAAEADLSNMERVSLSTADPQGVTYAELSTSALSEAASDTTQEPPGSHEYAALKV

SEQ ID NO: 5488 - protein, 174 aa, Homo sapiens
MTAEFLSLLCLGLCLGYEDEKKNEKPPKPSLHAWPSSVVEAESNVTLKCQAHSQNVTFVLRKVNDSGYKQEQSSAENEAEFPFTDLKPKDAGRYFCAYKTTASHEWSESSEHLQLVVTDKHDELEAPSMKTDTRTIFVAIFSCISILLLFLSVFIIYRCSQHSELRERKGREGE

SEQ ID NO: 5489 - protein, 320 aa, Homo sapiens
MRLLALAAAALLARAPAPEVCAALNVTVSPGPVVDYLEGENATLLCHVSQKRRKDSLLAVRWFFAHSFDSQEALMVKMTKLRVVQYYGNFSRSAKRRRLRLLEEQRGALYRLSVLTLQPSDQGHYVCRVQEISRHRNKWTAWSNGSSATEMRVISLKASEESSFEKTKETWAFFEDLYVYAVLVCCVGILSILLFMLVIVWQSVFNKRKSRVRHYLVKCPQNSSGETVTSVTSLAPLQPKKGKRQKEKPDIPPAVPAKAPIAPTFHKPKLLKPQRKVTLPKIAEENLTYAELELIKPHRAAKGAPTSTVYAQILFEENKL

SEQ ID NO: 5490 - protein, 191 aa, Homo sapiens
MRLLALAAAALLARAPAPEVCAALNVTVSPGPVVDYLEGENATLLCHVSQKRRKDSLLAVRWFFAHSFDSQEALMVKMTKLRVVQYYGNFSRSAKRRRLRLLEEQRGALYRLSVLTLQPSDQGHYVCRVQEISRHRNKWTAWSNGSSATEMRGVSSHPVERGAFLGISLVILPHSLPFTADLTMASFLQSS

SEQ ID NO: 5491 - protein, 2002 aa, Homo sapiens
MEQDRTNHVEGNRLSPFLIPSPPICQTEPLATKLQNGSPLPERAHPEVNGDTKWHSFKSYYGIPCMKGSQNSRVSPDFTQESRGYSKCLQNGGIKRTVSEPSLSGLLQIKKLKQDQKANGERRNFGVSQERNPGESSQPNVSDLSDKKESVSSVAQENAVKDFTSFSTHNCSGPENPELQILNEQEGKSANYHDKNIVLLKNKAVLMPNGATVSASSVEHTHGELLEKTLSQYYPDCVSIAVQKTTSHINAINSQATNELSCEITHPSHTSGQINSAQTSNSELPPKPAAVVSEACDADDADNASKLAAMLNTCSFQKPEQLQQQKSVFEICPSPAENNIQGTTKLASGEEFCSGSSSNLQAPGGSSERYLKQNEMNGAYFKQSSVFTKDSFSATTTPPPPSQLLLSPPPPLPQVPQLPSEGKSTLNGGVLEEHHHYPNQSNTTLLREVKIEGKPEAPPSQSPNPSTHVCSPSPMLSERPQNNCVNRNDIQTAGTMTVPLCSEKTRPMSEHLKHNPPIFGSSGELQDNCQQLMRNKEQEILKGRDKEQTRDLVPPTQHYLKPGWIELKAPRFHQAESHLKRNEASLPSILQYQPNLSNQMTSKQYTGNSNMPGGLPRQAYTQKTTQLEHKSQMYQVEMNQGQSQGTVDQHLQFQKPSHQVHFSKTDHLPKAHVQSLCGTRFHFQQRADSQTEKLMSPVLKQHLNQQASETEPFSNSHLLQHKPHKQAAQTQPSQSSHLPQNQQQQQKLQIKNKEEILQTFPHPQSNNDQQREGSFFGQTKVEECFHGENQYSKSSEFETHNVQMGLEEVQNINRRNSPYSQTMKSSACKIQVSCSNNTHLVSENKEQTTHPELFAGNKTQNLHHMQYFPNNVIPKQDLLHRCFQEQEQKSQQASVLQGYKNRNQDMSGQQAAQLAQQRYLIHNHANVFPVPDQGGSHTQTPPQKDTQKHAALRWHLLQKQEQQQTQQPQTESCHSQMHRPIKVEPGCKPHACMHTAPPENKTWKKVTKQENPPASCDNVQQKSIIETMEQHLKQFHAKSLFDHKALTLKSQKQVKVEMSGPVTVLTRQTTAAELDSHTPALEQQTTSSEKTPTKRTAASVLNNFIESPSKLLDTPIKNLLDTPVKTQYDFPSCRCVEQIIEKDEGPFYTHLGAGPNVAAIREIMEERFGQKGKAIRIERVIYTGKEGKSSQGCPIAKWVVRRSSSEEKLLCLVRERAGHTCEAAVIVILILVWEGIPLSLADKLYSELTETLRKYGTLTNRRCALNEERTCACQGLDPETCGASFSFGCSWSMYYNGCKFARSKIPRKFKLLGDDPKEEEKLESHLQNLSTLMAPTYKKLAPDAYNNQIEYEHRAPECRLGLKEGRPFSGVTACLDFCAHAHRDLHNMQNGSTLVCTLTREDNREFGGKPEDEQLHVLPLYKVSDVDEFGSVEAQEEKKRSGAIQVLSSFRRKVRMLAEPVKTCRQRKLEAKKAAAEKLSSLENSSNKNEKEKSAPSRTKQTENASQAKQLAELLRLSGPVMQQSQQPQPLQKQPPQPQQQQRPQQQQPHHPQTESVNSYSASGSTNPYMRRPNPVSPYPNSSHTSDIYGSTSPMNFYSTSSQAAGSYLNSSNPMNPYPGLLNQNTQYPSYQCNGNLSVDNCSPYLGSYSPQSQPMDLYRYPSQDPLSKLSLPPIHTLYQPRFGNSQSFTSKYLGYGNQNMQGDGFSSCTIRPNVHHVGKLPPYPTHEMDGHFMGATSRLPPNLSNPNMDYKNGEHHSPSHIIHNYSAAPGMFNSSLHALHLQNKENDMLSHTANGLSKMLPALNHDRTACVQGGLHKLSDANGQEKQPLALVQGVASGAEDNDEVWSDSEQSFLDPDIGGVAVAPTHGSILIECAKRELHATTPLKNPNRNHPTRISLVFYQHKSMNEPKHGLALWEAKMAEKAREKEEECEKYGPDYVPQKSHGKKVKREPAEPHETSEPTYLRFIKSLAERTMSVTTDSTVTTSPYAFTRVTGPYNRYI

SEQ ID NO: 5492 - protein, 1165 aa, Homo sapiens
MEQDRTNHVEGNRLSPFLIPSPPICQTEPLATKLQNGSPLPERAHPEVNGDTKWHSFKSYYGIPCMKGSQNSRVSPDFTQESRGYSKCLQNGGIKRTVSEPSLSGLLQIKKLKQDQKANGERRNFGVSQERNPGESSQPNVSDLSDKKESVSSVAQENAVKDFTSFSTHNCSGPENPELQILNEQEGKSANYHDKNIVLLKNKAVLMPNGATVSASSVEHTHGELLEKTLSQYYPDCVSIAVQKTTSHINAINSQATNELSCEITHPSHTSGQINSAQTSNSELPPKPAAVVSEACDADDADNASKLAAMLNTCSFQKPEQLQQQKSVFEICPSPAENNIQGTTKLASGEEFCSGSSSNLQAPGGSSERYLKQNEMNGAYFKQSSVFTKDSFSATTTPPPPSQLLLSPPPPLPQVPQLPSEGKSTLNGGVLEEHHHYPNQSNTTLLREVKIEGKPEAPPSQSPNPSTHVCSPSPMLSERPQNNCVNRNDIQTAGTMTVPLCSEKTRPMSEHLKHNPPIFGSSGELQDNCQQLMRNKEQEILKGRDKEQTRDLVPPTQHYLKPGWIELKAPRFHQAESHLKRNEASLPSILQYQPNLSNQMTSKQYTGNSNMPGGLPRQAYTQKTTQLEHKSQMYQVEMNQGQSQGTVDQHLQFQKPSHQVHFSKTDHLPKAHVQSLCGTRFHFQQRADSQTEKLMSPVLKQHLNQQASETEPFSNSHLLQHKPHKQAAQTQPSQSSHLPQNQQQQQKLQIKNKEEILQTFPHPQSNNDQQREGSFFGQTKVEECFHGENQYSKSSEFETHNVQMGLEEVQNINRRNSPYSQTMKSSACKIQVSCSNNTHLVSENKEQTTHPELFAGNKTQNLHHMQYFPNNVIPKQDLLHRCFQEQEQKSQQASVLQGYKNRNQDMSGQQAAQLAQQRYLIHNHANVFPVPDQGGSHTQTPPQKDTQKHAALRWHLLQKQEQQQTQQPQTESCHSQMHRPIKVEPGCKPHACMHTAPPENKTWKKVTKQENPPASCDNVQQKSIIETMEQHLKQFHAKSLFDHKALTLKSQKQVKVEMSGPVTVLTRQTTAAELDSHTPALEQQTTSSEKTPTKRTAASVLNNFIESPSKLLDTPIKNLLDTPVKTQYDFPSCRCVGKCQKCTETHGVYPELANLSSDMGFSFFF

SEQ ID NO: 5493 - protein, 1194 aa, Homo sapiens
MEQDRTNHVEGNRLSPFLIPSPPICQTEPLATKLQNGSPLPERAHPEVNGDTKWHSFKSYYGIPCMKGSQNSRVSPDFTQESRGYSKCLQNGGIKRTVSEPSLSGLLQIKKLKQDQKANGERRNFGVSQERNPGESSQPNVSDLSDKKESVSSVAQENAVKDFTSFSTHNCSGPENPELQILNEQEGKSANYHDKNIVLLKNKAVLMPNGATVSASSVEHTHGELLEKTLSQYYPDCVSIAVQKTTSHINAINSQATNELSCEITHPSHTSGQINSAQTSNSELPPKPAAVVSEACDADDADNASKLAAMLNTCSFQKPEQLQQQKSVFEICPSPAENNIQGTTKLASGEEFCSGSSSNLQAPGGSSERYLKQNEMNGAYFKQSSVFTKDSFSATTTPPPPSQLLLSPPPPLPQVPQLPSEGKSTLNGGVLEEHHHYPNQSNTTLLREVKIEGKPEAPPSQSPNPSTHVCSPSPMLSERPQNNCVNRNDIQTAGTMTVPLCSEKTRPMSEHLKHNPPIFGSSGELQDNCQQLMRNKEQEILKGRDKEQTRDLVPPTQHYLKPGWIELKAPRFHQAESHLKRNEASLPSILQYQPNLSNQMTSKQYTGNSNMPGGLPRQAYTQKTTQLEHKSQMYQVEMNQGQSQGTVDQHLQFQKPSHQVHFSKTDHLPKAHVQSLCGTRFHFQQRADSQTEKLMSPVLKQHLNQQASETEPFSNSHLLQHKPHKQAAQTQPSQSSHLPQNQQQQQKLQIKNKEEILQTFPHPQSNNDQQREGSFFGQTKVEECFHGENQYSKSSEFETHNVQMGLEEVQNINRRNSPYSQTMKSSACKIQVSCSNNTHLVSENKEQTTHPELFAGNKTQNLHHMQYFPNNVIPKQDLLHRCFQEQEQKSQQASVLQGYKNRNQDMSGQQAAQLAQQRYLIHNHANVFPVPDQGGSHTQTPPQKDTQKHAALRWHLLQKQEQQQTQQPQTESCHSQMHRPIKVEPGCKPHACMHTAPPENKTWKKVTKQENPPASCDNVQQKSIIETMEQHLKQFHAKSLFDHKALTLKSQKQVKVEMSGPVTVLTRQTTAAELDSHTPALEQQTTSSEKTPTKRTAASVLNNFIESPSKLLDTPIKNLLDTPVKTQYDFPSCRCVGLDRRVKLLGLKESSILVKKAKVLRDVLLLSGWFAEAAVKRSYCVWCGSELATPVRLQ

SEQ ID NO: 5494 - protein, 543 aa, Homo sapiens
MMPTPVILLKEGTDSSQGIPQLVSNISACQVIAEAVRTTLGPRGMDKLIVDGRGKATISNDGATILKLLDVVHPAAKTLVDIAKSQDAEVGDGTTSVTLLAAEFLKQVKPYVEEGLHPQIIIRAFRTATQLAVNKIKEIAVTVKKADKVEQRKLLEKCAMTALSSKLISQQKAFFAKMVVDAVMMLDDLLQLKMIGIKKVQGGALEDSQLVAGVAFKKTFSYAGFEMQPKKYHNPKIALLNVELELKAEKDNAEIRVHTVEDYQAIVDAEWNILYDKLEKIHHSGAKVVLSKLPIGDVATQYFADRDMFCAGRVPEEDLKRTMMACGGSIQTSVNALSADVLGRCQVFEETQIGGERYNFFTGCPKAKTCTFILRGGAEQFMEETERSLHDAIMIVRRAIKNDSVVAGGGAIEMELSKYLRDYSRTIPGKQQLLIGAYAKALEIIPRQLCDNAGFDATNILNKLRARHAQGGTWYGVDINNEDIADNFEAFVWEPAMVRINALTAASEAACLIVSVDETIKNPRSTVDAPTAAGRGRGRGRPH

SEQ ID NO: 5495 - protein, 339 aa, Homo sapiens
MMDSQLVAGVAFKKTFSYAGFEMQPKKYHNPKIALLNVELELKAEKDNAEIRVHTVEDYQAIVDAEWNILYDKLEKIHHSGAKVVLSKLPIGDVATQYFADRDMFCAGRVPEEDLKRTMMACGGSIQTSVNALSADVLGRCQVFEETQIGGERYNFFTGCPKAKTCTFILRGGAEQFMEETERSLHDAIMIVRRAIKNDSVVAGGGAIEMELSKYLRDYSRTIPGKQQLLIGAYAKALEIIPRQLCDNAGFDATNILNKLRARHAQGGTWYGVDINNEDIADNFEAFVWEPAMVRINALTAASEAACLIVSVDETIKNPRSTVDAPTAAGRGRGRGRPH

SEQ ID NO: 5496 - protein, 499 aa, Homo sapiens
MDKLIVDGRGKATISNDGATILKLLDVVHPAAKTLVDIAKSQDAEVGDGTTSVTLLAAEFLKQVKPYVEEGLHPQIIIRAFRTATQLAVNKIKEIAVTVKKADKVEQRKLLEKCAMTALSSKLISQQKAFFAKMVVDAVMMLDDLLQLKMIGIKKVQGGALEDSQLVAGVAFKKTFSYAGFEMQPKKYHNPKIALLNVELELKAEKDNAEIRVHTVEDYQAIVDAEWNILYDKLEKIHHSGAKVVLSKLPIGDVATQYFADRDMFCAGRVPEEDLKRTMMACGGSIQTSVNALSADVLGRCQVFEETQIGGERYNFFTGCPKAKTCTFILRGGAEQFMEETERSLHDAIMIVRRAIKNDSVVAGGGAIEMELSKYLRDYSRTIPGKQQLLIGAYAKALEIIPRQLCDNAGFDATNILNKLRARHAQGGTWYGVDINNEDIADNFEAFVWEPAMVRINALTAASEAACLIVSVDETIKNPRSTVDAPTAAGRGRGRGRPH

SEQ ID NO: 5497 - protein, 456 aa, Homo sapiens
MMVGDGTTSVTLLAAEFLKQVKPYVEEGLHPQIIIRAFRTATQLAVNKIKEIAVTVKKADKVEQRKLLEKCAMTALSSKLISQQKAFFAKMVVDAVMMLDDLLQLKMIGIKKVQGGALEDSQLVAGVAFKKTFSYAGFEMQPKKYHNPKIALLNVELELKAEKDNAEIRVHTVEDYQAIVDAEWNILYDKLEKIHHSGAKVVLSKLPIGDVATQYFADRDMFCAGRVPEEDLKRTMMACGGSIQTSVNALSADVLGRCQVFEETQIGGERYNFFTGCPKAKTCTFILRGGAEQFMEETERSLHDAIMIVRRAIKNDSVVAGGGAIEMELSKYLRDYSRTIPGKQQLLIGAYAKALEIIPRQLCDNAGFDATNILNKLRARHAQGGTWYGVDINNEDIADNFEAFVWEPAMVRINALTAASEAACLIVSVDETIKNPRSTVDAPTAAGRGRGRGRPH

SEQ ID NO: 5498 - protein, 557 aa, Homo sapiens
MDSTVPSALELPQRLALNPRESPRSPEEEEPHLLSSLAAVQTLANVIRPCYGPHGRQKFLVTMKGETVCTGCATAILRALELEHPAAWLLREAAQTQAENSGDGTAFVVLLTEALLEQAEQLLKFGLPRPQLREAYATATAEVLATLPSLAIQSLGPLEDPSWALHSVMNTHTLPPMNHLTKLVAHACWAIKELDGSFKPERVGVCTLHGGTLEDSCLLQGLAISGKLCGQMAAVLSGARVALFACPFGPAHPNAPATACLSSPADLAQFSKGSDQLLEKQVGQLAAAGINVAVVLGEVDEETLTLADKYGIVVIQARSRMEIIYLSEVLDTPLLPRLLPPQRPGKCQRVYRQELGDGLAVVFEWECTGTPALTVVLRGATTQGLRSAEQAVYHSIDAYFQPCQDPRLIPGAGATEMALAKMLSDKGSRLEGPNGPAFLAFARALKYLPKTLAENAGLAVSDVVAEMSGVHQGGNLLMGVGAEGIINVAQEGVWDTLIVKAQGFRAVAEVVLQLVTVDEIVVAKKSPTHQQIWNPDSKKTKKRPPPVEKKKILGMNN

SEQ ID NO: 5499 - protein, 919 aa, Homo sapiens
MATIAAAAFEALMDGVTCWDVPRGPIPSELLLIGEAAFPVMVNDKGQVLIAASSYGRGRLVVVSHEGYLSHTGLAPFLLNAVSWLCPCPGAPVGVHPSLAPLVNILQDAGLEAQVKPEPGEPLGVYCINAYNDTLTATLIQFVKHGGGLLIGGQAWYWASQHGPDKVLSRFPGNKVTSVAGVYFTDTYGDRDRFKVSKKVPKIPLHVRYGEDVRQDQQQLLEGISELDIRTGGVPSQLLVHGALAFPLGLDASLNCFLAAAHYGRGRVVLAAHECLLCAPKMGPFLLNAVRWLARGQTGKVGVNTNLKDLCPLLSEHGLQCSLEPHLNSDLCVYCCKAYSDKEAKQLQEFVAEGGGLLIGGQAWWWASQNPGHCPLAGFPGNIILNCFGLSILPQTLKAGCFPVPTPEMRSYHFRKALSQFQAILNHENGNLEKSCLAKLRVDGAAFLQIPAEGVPAYISLHRLLRKMLRGSGLPAVSRENPVASDSYEAAVLSLATGLAHSGTDCSQLAQGLGTWTCSSSLYPSKHPITVEINGINPGNNDCWVSTGLYLLEGQNAEVSLSEAAASAGLRVQIGCHTDDLTKARKLSRAPVVTHQCWMDRTERSVSCLWGGLLYVIVPKGSQLGPVPVTIRGAVPAPYYKLGKTSLEEWKRQMQENLAPWGELATDNIILTVPTTNLQALKDPEPVLRLWDEMMQAVARLAAEPFPFRRPERIVADVQISAGWMHSGYPIMCHLESVKEIINEMDMRSRGVWGPIHELGHNQQRHGWEFPPHTTEATCNLWSVYVHETVLGIPRAQAHEALSPPERERRIKAHLGKGAPLCDWNVWTALETYLQLQEAFGWEPFTQLFAEYQTLSHLPKDNTGRMNLWVKKFSEKVKKNLVPFFEAWGWPIQKEVADSLASLPEWQENPMQVYLRARK

SEQ ID NO: 5500 - protein, 845 aa, Homo sapiens
MATIAAAAFEALMDGVTCWDVPRGPIPSELLLIGEAAFPVMVNDKGQVLIAASSYGRGRLVVVSHEGYLSHTGLAPFLLNAVSWLCPCPGAPVGVHPSLAPLVNILQDAGLEAQVKPEPGEPLGVYCINAYNDTLTATLIQFVKHGGGLLIGGQAWYWASQHGPDKVLSRFPGNKVTSVAGVYFTDTYGDRDRFKVSKKVPKIPLHVRYGEDVRQDQQQLLEGISELDIRTGGVPSQLLVHGALAFPLGLDASLNCFLAAAHYGRGRVVLAAHECLLCAPKMGPFLLNAVRWLARGQTGKVGVNTNLKDLCPLLSEHGLQCSLEPHLNSDLCVYCCKAYSDKEAKQLQEFVAEGGGLLIGGQAWWWASQNPGHCPLAGFPGNIILNCFGLSILPQTLKAGCFPVPTPEMRSYHFRKALSQFQAILNHENGNLEKSCLAKLRVDGAAFLQIPAEGVPAYISLHRLLRKMLRGSGLPAVSRENPVASDSYEAAVLSLATGLAHSGTDCSQLAQGLGTWTCSSSLYPSKHPITVEINGINPGNNDCWVSTGLYLLEGQNAEVSLSEAAASAGLRVQIGCHTDDLTKARKLSRAPVVTHQCWMDRTERSVSCLWGGLLYVIVPKGSQLGPVPVTIRGAVPAPYYKLGKTSLEEWKRQMQENLAPWGELATDNIILTVPTTNLQALKDPEPVLRLWDEMMQAVARLAAEPFPFRRPERIVADVQISAGWMHSGYPIMCHLESVKEIINEMDMRSRGVWGPIHELGHNQQRHGWEFPPHTTEATCNLWSVYVHETVLGIPRAQAHEALSPPERERRIKAHLGKGAPLCDWNVWTALETYLQVLSRNSGRRG

SEQ ID NO: 5501 - protein, 815 aa, Homo sapiens
MKIFQKEFKFILKKCTPIQKYREENGNSSSSPHHQLQSHASGPRYGEDVRQDQQQLLEGISELDIRTGGVPSQLLVHGALAFPLGLDASLNCFLAAAHYGRGRVVLAAHECLLCAPKMGPFLLNAVRWLARGQTGKVGVNTNLKDLCPLLSEHGLQCSLEPHLNSDLCVYCCKAYSDKEAKQLQEFVAEGGGLLIGGQAWWWASQNPGHCPLAGFPGNIILNCFGLSILPQTLKAGCFPVPTPEMRSYHFRKALSQFQAILNHENGNLEKSCLAKLRVDGAAFLQIPAEGVPAYISLHRLLRKMLRGSGLPAVSRENPVASDSYEAAVLSLATGLAHSGTDCSQLAQGLGTWTCSSSLYPSKHPITVEINGINPESHSVIQVGMQWRDLSSCNLHLLGLSNSSLSASCVAGTTGTRHHAWLIFVFLVEREFHRKGNNDCWVSTGLYLLEGQNAEVSLSEAAASAGLRVQIGCHTDDLTKARKLSRAPVVTHQCWMDRTERSVSCLWGGLLYVIVPKGSQLGPVPVTIRGAVPAPYYKLGKTSLEEWKRQMQENLAPWGELATDNIILTVPTTNLQALKDPEPVLRLWDEMMQAVARLAAEPFPFRRPERIVADVQISAGWMHSGYPIMCHLESVKEIINEMDMRSRGVWGPIHELGHNQQRHGWEFPPHTTEATCNLWSVYVHETVLGIPRAQAHEALSPPERERRIKAHLGKGAPLCDWNVWTALETYLQLQEAFGWEPFTQLFAEYQTLSHLPKDNTGRMNLWVKKFSEKVKKNLVPFFEAWGWPIQKEVADSLASLPEWQENPMQVYLRARK

SEQ ID NO: 5502 - protein, 411 aa, Homo sapiens
MLSLREQQLQVWFKNRRAKLARERRLQQQPQRVPGQRGRGARAAPLVPAASASAPQRGPSGILPAAEPTICSLHQAWGGPGCRAQKGIPAALSPGPGPIPAPIPGPAQIPGPLPGSIPGPIPGPAQIPSPIPAPIPGPISGPVQIPGPFRGPIPGPISGPAPIPGPISGPFSGPNPGPIPGPNPGPIPGPISGPIPGPISVPIPGPIPGPISGPISGPNPGPIPGPIPGPISGPNPGPIPGPISGPNPGLIPGPIPGPISGPGPIIGPIPSPAQIPGPGRLQGPGPILSPGRMRSPGSLPGLAPILGPGSGPGSGSVPAPIPGPGSLPAPAPLWPQSPDASDFLPDTQLFPHFTELLLPLDPLEGSSVSTMTSQYQEGDDSMGKKHSGSQPQEEGGSVNENHSGPRLLLDL

SEQ ID NO: 5503 - protein, 407 aa, Homo sapiens
MLSLREQQLQVWFKNRRAKLARERRLQQQPQRVPGQRGRGARAAPLVPAASASAPQRGPSGILPAAEPTICSLHQAWGGPGCRAQKGIPAALSPGPGPIPAPIPGPAQIPGPLPGSIPGPIPGPAQIPSPIPAPIPGPISGPVQIPGPFRGPIPGPISGPAPIPGPISGPFSGPNPGPIPGPNPGPIPGPISGPIPGPISVPIPGPISGPISGPNPGPIPGPIPGPISGPNPGPIPGPISGPNPGLIPGPIPGPISGPGPIIGPIPSPAQIPGPGRLQGPGPILSPGRMRSPGSLPGLAPILGPGSGPGSGSVPAPIPGPGSLPAPAPLWPQSPDASDFLPDTQLFPHFTELLLPLDPLEGSSVSTMTSQYQEGDDSMGKKHSGSQPQEEGGSVNENHSGPRLLLDL

SEQ ID NO: 5504 - protein, 346 aa, Homo sapiens
MESVSCSAAAVRTGDMESQRDLSLVPERLQRREQERQLEVERRKQKRQNQEVEKENSHFFVATFVRERAAVEELLERAESVERLEEAASRLQGLQKLINDSVFFLAAYDLRQGQEALARLQAALAERRRGLQPKKRFAFKTRGKDAASSTKVDAAPGIPPAVESIQDSPLPKKAEGDLGPSWVCGFSNLESQVLEKRASELHQRDVLLTELSNCTVRLYGNPNTLRLTKAHSCKLLCGPVSTSVFLEDCSDCVLAVACQQLRIHSTKDTRIFLQVTSRAIVEDCSGIQFAPYTWSYPEIDKDFESSGLDRSKNNWNDVDDFNWLARDMASPNWSILPEEERNIQWD

SEQ ID NO: 5505 - protein, 112 aa, Homo sapiens
MQDTGSVVPLHWFGFGYAALVASGGIIGYVKAGSVPSLAAGLLFGSLAGLGAYQLSQDPRNVWVFLATSGTLAGIMGMRFYHSGKFMPAGLIAGASLLMVAKVGVSMFNRPH

SEQ ID NO: 5506 - protein, 308 aa, Homo sapiens [sequence omitted]

SEQ ID NO: 5507 - protein, 157 aa, Homo sapiens
MKHYEVEILDAKTREKLCFFAAWMAYYINHPLYTPPTYGAQQVKLALAIFVICQLGNFSIHMALRDLRPAGSKTRKIPYPTKNPFTWLFLLVSCPNYTYEVGSWIGFAIMTQCLPVALFSLVGFTQMTIWAKGKHRSYLKEFRDYPPLRMPIIPFLL

SEQ ID NO: 5508 - protein, 1729 aa, Homo sapiens
MKVSTLRESSAMASPLPREMEEELVPTGSEPGDTRAKPPVKPKPRALPAKPALPAKPSLLVPVGPRPPRGPLAELPSARKMNMLAGPQPYGGSKRPLPFAPRPAVEASTGGEATQETGKEEAGKEEPPPLTPPARCAAPGGVRKAPAPFRPASERFAATTVEEILAKMEQPRKEVLASPDRLWGSRLTFNHDGSSRYGPRTYGTTTAPRDEDGSTLFRGWSQEGPVKSPAECREEHSKTPEERSLPSDLAFNGDLAKAASSELPADISKPWIPSSPAPSSENGGPASPGLPAEASGSGPGSPHLHPPDKSSPCHSQLLEAQTPEASQASPCPAVTPSAPSAALPDEGSRHTPSPGLPAEGAPEAPRPSSPPPEVLEPHSLDQPPATSPRPLIEVGELLDLTRTFPSGGEEEAKGDAHLRPTSLVQRRFSEGVLQSPSQDQEKLGGSLAALPQGQGSQLALDRPFGAESNWSLSQSFEWTFPTRPSGLGVWRLDSPPPSPITEASEAAEAAEAGNLAVSSREEGVSQQGQGAGSAPSGSGSSWVQGDDPSMSLTQKGDGESQPQFPAVPLEPLPTTEGTPGLPLQQAEERYESQEPLAGQESPLPLATREAALPILEPVLGQEQPAAPDQPCVLFADAPEPGQALPVEEEAVTLARAETTQARTEAQDLCRASPEPPGPESSSRWLDDLLASPPPSGGGARRGAGAELKDTQSPSTCSEGLLGWSQKDLQSEFGITGDPQPSSFSPSSWCQGASQDYGLGGASPRGDPGLGERDWTSKYGQGAGEGSTREWASRCGIGQEEMEASSSQDQSKVSAPGVLTAQDRVVGKPAQLGTQRSQEADVQDWEFRKRDSQGTYSSRDAELQDQEFGKRDSLGTYSSRDVSLGDWEFGKRDSLGAYASQDANEQGQDLGKRDHHGRYSSQDADEQDWEFQKRDVSLGTYGSRAAEPQEQEFGKSAWIRDYSSGGSSRTLDAQDRSFGTRPLSSGFSPEEAQQQDEEFEKKIPSVEDSLGEGSRDAGRPGERGSGGLFSPSTAHVPDGALGQRDQSSWQNSDASQEVGGHQERQQAGAQGPGSADLEDGEMGKRGWVGEFSLSVGPQREAAFSPGQQDWSRDFCIEASERSYQFGIIGNDRVSGAGFSPSSKMEGGHFVPPGKTTAGSVDWTDQLGLRNLEVSSCVGSGGSSEARESAVGQMGWSGGLSLRDMNLTGCLESGGSEEPGGIGVGEKDWTSDVNVKSKDLAEVGEGGGHSQARESGVGQTDWSGVEAGEFLKSRERGVGQADWTPDLGLRNMAPGAVCSPGESKELGVGQMDWGNNLGLRDLEVTCDPDSGGSQGLRGCGVGQMDWTQDLAPQNVELFGAPSEAREHGVGGVSQCPEPGLRHNGSLSPGLEARDPLEARELGVGETSGPETQGEDYSSSSLEPHPADPGMETGEALSFGASPGRCPARPPPSGSQGLLEEMLAASSSKAVARRESAASGLGGLLEEEGAGAGAAQEEVLEPGRDSPPSWRPQPDGEASQTEDVDGTWGSSAARWSDQGPAQTSRRPSQGPPARSPSQDFSFIEDTEILDSAMYRSRANLGRKRGHRAPVIRPGGTLGLSEAADSDAHLFQDSTEPRASRVPSSDEEVVEEPQSRRTRMSLGTKGLKVNLFPGLSPSALKAKLRPRNRSAEEGELAESKSSQKESAVQRSKSCKVPGLGKPLTLPPKPEKSSGSEGSSPNWLQALKLKKKKV

SEQ ID NO: 5509 - protein, 778 aa, Homo sapiens
MSLTQKGDGESQPQFPAVPLEPLPTTEGTPGLPLQQAEERYESQEPLAGQESPLPLATREAALPILEPVLGQEQPAAPDQPCVLFADAPEPGQALPVEEEAVTLARAETTQARTEAQDLCRASPEPPGPESSSRWLDDLLASPPPSGGGARRGAGAELKDTQSPSTCSEGLLGWSQKDLQSEFGITGDPQPSSFSPSSWCQGASQDYGLGGASPRGDPGLGERDWTSKYGQGAGEGSTREWASRCGIGQEEMEASSSQDQSKVSAPGVLTAQDRVVGKPAQLGTQRSQEADVQDWEFRKRDSQGTYSSRDAELQDQEFGKRDSLGTYSSRDVSLGDWEFGKRDSLGAYASQDANEQGQDLGKRDHHGRYSSQDADEQDWEFQKRDVSLGTYGSRAAEPQEQEFGKSAWIRDYSSGGSSRTLDAQDRSFGTRPLSSGFSPEEAQQQDEEFEKKIPSVEDSLGEGSRDAGRPGERGSGGLFSPSTAHVPDGALGQRDQSSWQNSDASQEVGGHQERQQAGAQGPGSADLEDGEMGKRGWVGEFSLSVGPQREAAFSPGQQDWSRDFCIEASERSYQFGIIGNDRVSGAGFSPSSKMEGGHFVPPGKTTAGSVDWTDQLGLRNLEVSSCVGSGGSSEARESAVGQMGWSGGLSLRDMNLTGCLESGGSEEPGGIGVGEKDWTSDVNVKSKDLAEVGEGGGHSQARESGVGQTDWSGVEAGEFLKSRERLGRHIYALCITLRTPPTPSLPWISSLVVEGFVPSSPPSLSLSASSSSLPWVFF

SEQ ID NO: 5510 - protein, 671 aa, Homo sapiens
MQGPPRSLRAGLSLDDFIPGHLQSHIGSSSRGTRVPVIRNGGSNTLNFQFHDPAPRTVCNGGYTPRRDASQHPDPAWYQTWPGPGSKPSASTKIPASQHTQNWSATWTKDSKRRDKRWVKYEGIGPVDESGMPIAPRSSVDRPRDWYRRMFQQIHRKMPDLQLDWTFEEPPRDPRHLGAQQRPAHRPGPATSSSGRSWDHSEELPRSTFNYRPGAFSTVLQPSNQVLRRREKVDNVWTEESWNQFLQELETGQRPKKPLVDDPGEKPSQPIEVLLERELAELSAELDKDLRAIETRLPSPKSSPAPRRAPEQRPPAGPASAWSSSYPHAPYLGSARSLSPHKMADGGSPFLGRRDFVYPSSTRDPSASNGGGSPARREEKKRKAARLKFDFQAQSPKELTLQKGDIVYIHKEVDKNWLEGEHHGRLGIFPANYVEVLPADEIPKPIKPPTYQVLEYGEAVAQYTFKGDLEVELSFRKGEHICLIRKVNENWYEGRITGTGRQGIFPASYVQVSREPRLRLCDDGPQLPTSPRLTAAARSARHPSSPSALRSPADPIDLGGQTSPRRTGFSFPTQEPRPQTQNLGTPGPALSHSRGPSHPLDLGTSSPNTSQIHWTPYRAMYQYRPQNEDELELREGDRVDVMQQCDDGWFVGVSRRTQKFGTFPGNYVAPV

SEQ ID NO: 5511 - protein, 329 aa, Homo sapiens
MADGGSPFLGRRDFVYPSSTRDPSASNGGGSPARREEKKRKAARLKFDFQAQSPKELTLQKGDIVYIHKEVDKNWLEGEHHGRLGIFPANYVEVLPADEIPKPIKPPTYQVLEYGEAVAQYTFKGDLEVELSFRKGEHICLIRKVNENWYEGRITGTGRQGIFPASYVQVSREPRLRLCDDGPQLPTSPRLTAAARSARHPSSPSALRSPADPIDLGGQTSPRRTGFSFPTQEPRPQTQNLGTPGPALSHSRGPSHPLDLGTSSPNTSQIHWTPYRAMYQYRPQNEDELELREGDRVDVMQQCDDGWFVGVSRRTQKFGTFPGNYVAPV

SEQ ID NO: 5512 - protein, 292 aa, Homo sapiens
MPLHVKWPFPAVPPLTWTLASSVVMGLVGTYSCFWTKYMNHLTVHNREVLYELIEKRGPATPLITVSNHQSCMDDPHLWGILKLRHIWNLKLMRWTPAAADICFTKELHSHFFSLGKCVPVCRGAEFFQAENEGKGVLDTGRHMPGAGKRREKGDGVYQKGMDFILEKLNHGDWVHIFPEGKVNMSSEFLRFKWGIGRLIAECHLNPIILPLWHVGMNDVLPNSPPYFPRFGQKITVLIGKPFSALPVLERLRAENKSAVEMRKALTDFIQEEFQHLKTQAEQLHNHLQPGR

SEQ ID NO: 5513 - protein, 268 aa, Homo sapiens
MGLVGTYSCFWTKYMNHLTVHNREVLYELIEKRGPATPLITVSNHQSCMDDPHLWGILKLRHIWNLKLMRWTPAAADICFTKELHSHFFSLGKCVPVCRGAEFFQAENEGKGVLDTGRHMPGAGKRREKGDGVYQKGMDFILEKLNHGDWVHIFPEGKVNMSSEFLRFKWGIGRLIAECHLNPIILPLWHVGMNDVLPNSPPYFPRFGQKITVLIGKPFSALPVLERLRAENKSAVEMRKALTDFIQEEFQHLKTQAEQLHNHLQPGR

SEQ ID NO: 5514 - protein, 262 aa, Homo sapiens
MPLHVKWPFPAVPPLTWTLASSVVMGLVGTYSCFWTKYMNHLTVHNREVLYELIEKRGPATPLITVSNHQSCMDDPHLWGILKLRHIWNLKLMRWTPAAADICFTKELHSHFFSLGKCVPVCRGDGVYQKGMDFILEKLNHGDWVHIFPEGKVNMSSEFLRFKWGIGRLIAECHLNPIILPLWHVGMNDVLPNSPPYFPRFGQKITVLIGKPFSALPVLERLRAENKSAVEMRKALTDFIQEEFQHLKTQAEQLHNHLQPGR

SEQ ID NO: 5515 - protein, 265 aa, Homo sapiens
MPLHVKWPFPAVPPLTWTLASSVVMGLVGTYSCFWTKYMNHLTVHNREVLYELIEKRGPATPLITVSNHQSCMDDPHLWGILKLRHIWNLKLMRWTPAAADICFTKELHSHFFSLGKCVPVCRGAEFFQAENEGKGVLDTGRHMPGAGKRREKGKVNMSSEFLRFKWGIGRLIAECHLNPIILPLWHVGMNDVLPNSPPYFPRFGQKITVLIGKPFSALPVLERLRAENKSAVEMRKALTDFIQEEFQHLKTQAEQLHNHLQPGR

SEQ ID NO: 5516 - protein, 278 aa, Homo sapiens
MPLHVKWPFPAVPPLTWTLASSVVMGLVGTYSCFWTKYMNHLTVHNREVLYELIEKRGPATPLITVSNHQSCMDDPHLWGILKLRHIWNLKLMRWTPAAADICFTKELHSHFFSLGKCVPVCRGAEFFQAENEGKGVLDTGRHMPGAGKRREKGDGVYQKGMDFILEKLNHGDWVHIFPEGIGRLIAECHLNPIILPLWHVGMNDVLPNSPPYFPRFGQKITVLIGKPFSALPVLERLRAENKSAVEMRKALTDFIQEEFQHLKTQAEQLHNHLQPGR

SEQ ID NO: 5517 - protein, 254 aa, Homo sapiens
MGLVGTYSCFWTKYMNHLTVHNREVLYELIEKRGPATPLITVSNHQSCMDDPHLWGILKLRHIWNLKLMRWTPAAADICFTKELHSHFFSLGKCVPVCRGAEFFQAENEGKGVLDTGRHMPGAGKRREKGDGVYQKGMDFILEKLNHGDWVHIFPEGIGRLIAECHLNPIILPLWHVGMNDVLPNSPPYFPRFGQKITVLIGKPFSALPVLERLRAENKSAVEMRKALTDFIQEEFQHLKTQAEQLHNHLQPGR

SEQ ID NO: 5518 - protein, 248 aa, Homo sapiens
MPLHVKWPFPAVPPLTWTLASSVVMGLVGTYSCFWTKYMNHLTVHNREVLYELIEKRGPATPLITVSNHQSCMDDPHLWGILKLRHIWNLKLMRWTPAAADICFTKELHSHFFSLGKCVPVCRGDGVYQKGMDFILEKLNHGDWVHIFPEGIGRLIAECHLNPIILPLWHVGMNDVLPNSPPYFPRFGQKITVLIGKPFSALPVLERLRAENKSAVEMRKALTDFIQEEFQHLKTQAEQLHNHLQPGR

SEQ ID NO: 5519 - protein, 238 aa, Homo sapiens
MGLVGTYSCFWTKYMNHLTVHNREVLYELIEKRGPATPLITVSNHQSCMDDPHLWGILKLRHIWNLKLMRWTPAAADICFTKELHSHFFSLGKCVPVCRGDGVYQKGMDFILEKLNHGDWVHIFPEGKVNMSSEFLRFKWGIGRLIAECHLNPIILPLWHVGMNDVLPNSPPYFPRFGQKITVLIGKPFSALPVLERLRAENKSAVEMRKALTDFIQEEFQHLKTQAEQLHNHLQPGR

SEQ ID NO: 5520 - protein, 224 aa, Homo sapiens
MGLVGTYSCFWTKYMNHLTVHNREVLYELIEKRGPATPLITVSNHQSCMDDPHLWGILKLRHIWNLKLMRWTPAAADICFTKELHSHFFSLGKCVPVCRGDGVYQKGMDFILEKLNHGDWVHIFPEGIGRLIAECHLNPIILPLWHVGMNDVLPNSPPYFPRFGQKITVLIGKPFSALPVLERLRAENKSAVEMRKALTDFIQEEFQHLKTQAEQLHNHLQPGR

SEQ ID NO: 5521 - protein, 595 aa, Homo sapiens
MRVLLAALGLLFLGALRAFPQDRPFEDTCHGNPSHYYDKAVRRCCYRCPMGLFPTQQCPQRPTDCRKQCEPDYYLDEADRCTACVTCSRDDLVEKTPCAWNSSRVCECRPGMFCSTSAVNSCARCFFHSVCPAGMIVKFPGTAQKNTVCEPASPGVSPACASPENCKEPSSGTIPQAKPTPVSPATSSASTMPVRGGTRLAQEAASKLTRAPDSPSSVGRPSSDPGLSPTQPCPEGSGDCRKQCEPDYYLDEAGRCTACVSCSRDDLVEKTPCAWNSSRTCECRPGMICATSATNSCARCVPYPICAAETVTKPQDMAEKDTTFEAPPLGTQPDCNPTPENGEAPASTSPTQSLLVDSQASKTLPIPTSAPVALSSTGKPVLDAGPVLFWVILVLVVVVGSSAFLLCHRRACRKRIRQKLHLCYPVQTSQPKLELVDSRPRRSSTQLRSGASVTEPVAEERGLMSQPLMETCHSVGAAYLESLPLQDASPAGGPSSPRDLPEPRVSTEHTNNKIEKIYIMKADTVIVGTVKAELPEGRGLAGPAEPELEEELEADHTPHYPEQETEPPLGSCSDVMLSVEEEGKEDPLPTAASGK

SEQ ID NO: 5522 - protein, 132 aa, Homo sapiens
MSQPLMETCHSVGAAYLESLPLQDASPAGGPSSPRDLPEPRVSTEHTNNKIEKIYIMKADTVIVGTVKAELPEGRGLAGPAEPELEEELEADHTPHYPEQETEPPLGSCSDVMLSVEEEGKEDPLPTAASGK

SEQ ID NO: 5523 - protein, 483 aa, Homo sapiens
MFCSTSAVNSCARCFFHSVCPAGMIVKFPGTAQKNTVCEPASPGVSPACASPENCKEPSSGTIPQAKPTPVSPATSSASTMPVRGGTRLAQEAASKLTRAPDSPSSVGRPSSDPGLSPTQPCPEGSGDCRKQCEPDYYLDEAGRCTACVSCSRDDLVEKTPCAWNSSRTCECRPGMICATSATNSCARCVPYPICAAETVTKPQDMAEKDTTFEAPPLGTQPDCNPTPENGEAPASTSPTQSLLVDSQASKTLPIPTSAPVALSSTGKPVLDAGPVLFWVILVLVVVVGSSAFLLCHRRACRKRIRQKLHLCYPVQTSQPKLELVDSRPRRSSTLRSGASVTEPVAEERGLMSQPLMETCHSVGAAYLESLPLQDASPAGGPSSPRDLPEPRVSTEHTNNKIEKIYIMKADTVIVGTVKAELPEGRGLAGPAEPELEEELEADHTPHYPEQETEPPLGSCSDVMLSVEEEGKEDPLPTAASGK

SEQ ID NO: 5524 - protein, 170 aa, Homo sapiens
MASEAEKTFHRFAAFGESSSSGTEMNNKNFSKLCKDCGIMDGKTVTSTDVDIVFSKVKAKNARTITFQQFKEAVKELGQKRFKGKSPDEVLENIYGLMEGKDPATTGATKATTVGAVDRLTDTSKYTGTHKERFDESGKGKGIAGREEMTDNTGYVSGYKGSGTYDKKTK

SEQ ID NO: 5525 - protein, 259 aa, Homo sapiens
MARIPKTLKFVVVIVAVLLPVLAYSATTARQEEVPQQTVAPQQQRHSFKGEECPAGSHRSEHTGACNPCTEGVDYTNASNNEPSCFPCTVCKSDQKHKSSCTMTRDTVCQCKEGTFRNENSPEMCRKCSRCPSGEVQVSNCTSWDDIQCVEEFGANATVETPAAEETMNTSPGTPAPAAEETMNTSPGTPAPAAEETMTTSPGTPAPAAEETMTTSPGTPAPAAEETMITSPGTPASSHYLSCTIVGIIVLIVLLIVFV

SEQ ID NO: 5526 - protein, 3097 aa, Homo sapiens
MSGSSGGAAAPAASSGPAAAASAAGSGCGGGAGEGAEEAAKDLADIAAFFRSGFRKNDEMKAMDVLPILKEKVAYLSGGRDKRGGPILTFPARSNHDRIRQEDLRRLISYLACIPSEEVCKRGFTVIVDMRGSKWDSIKPLLKILQESFPCCIHVALIIKPDNFWQKQRTNFGSSKFEFETNMVSLEGLTKVVDPSQLTPEFDGCLEYNHEEWIEIRVAFEDYISNATHMLSRLEELQDILAKKELPQDLEGARNMIEEHSQLKKKVIKAPIEDLDLEGQKLLQRIQSSESFPKKNSGSGNADLQNLLPKVSTMLDRLHSTRQHLHQMWHVRKLKLDQCFQLRLFEQDAEKMFDWITHNKGLFLNSYTEIGTSHPHAMELQTQHNHFAMNCMNVYVNINRIMSVANRLVESGHYASQQIRQIASQLEQEWKAFAAALDERSTLLDMSSIFHQKAEKYMSNVDSWCKACGEVDLPSELQDLEDAIHHHQGIYEHITLAYSEVSQDGKSLLDKLQRPLTPGSSDSLTASANYSKAVHHVLDVIHEVLHHQRQLENIWQHRKVRLHQRLQLCVFQQDVQQVLDWIENHGEAFLSKHTGVGKSLHRARALQKRHEDFEEVAQNTYTNADKLLEAAEQLAQTGECDPEEIYQAAHQLEDRIQDFVRRVEQRKILLDMSVSFHTHVKELWTWLEELQKELLDDVYAESVEAVQDLIKRFGQQQQTTLQVTVNVIKEGEDLIQQLRDSAISSNKTPHNSSINHIETVLQQLDEAQSQMEELFQERKIKLELFLQLRIFERDAIDIISDLESWNDELSQQMNDFDTEDLTIAEQRLQHHADKALTMNNLTFDVIHQGQDLLQYVNEVQASGVELLCDRDVDMATRVQDLLEFLHEKQQELDLAAEQHRKHLEQCVQLRHLQAEVKQVLGWIRNGESMLNAGLITASSLQEAEQLQREHEQFQHAIEKTHQSALQVQQKAEAMLQANHYDMDMIRDCAEKVASHWQQLMLKMEDRLKLVNASVAFYKTSEQVCSVLESLEQEYKREEDWCGGADKLGPNSETDHVTPMISKHLEQKEAFLKACTLARRNADVFLKYLHRNSVNMPGMVTHIKAPEQQVKNILNELFQRENRVLHYWTMRKRRLDQCQQYVVFERSAKQALEWIHDNGEFYLSTHTSTGSSIQHTQELLKEHEEFQITAKQTKERVKLLIQLADGFCEKGHAHAAEIKKCVTAVDKRYRDFSLRMEKYRTSLEKALGISSDSNKSSKSLQLDIIPASIPGSEVKLRDAAHELNEEKRKSARRKEFIMAELIQTEKAYVRDLRECMDTYLWEMTSGVEEIPPGIVNKELIIFGNMQEIYEFHNNIFLKELEKYEQLPEDVGHCFVTWADKFQMYVTYCKNKPDSTQLILEHAGSYFDEIQQRHGLANSISSYLIKPVQRITKYQLLLKELLTCCEEGKGEIKDGLEVMLSVPKRANDAMHLSMLEGFDENIESQGELILQESFQVWDPKTLIRKGRERHLFLFEMSLVFSKEVKDSSGRSKYLYKSKLFTSELGVTEHVEGDPCKFALWVGRTPTSDNKIVLKASSIENKQDWIKHIREVIQERTIHLKGALKEPIHIPKTAPATRQKGRRDGEDLDSQGDGSSQPDTISIASRTSQNTLDSDKLSGGCELTVVIHDFTACNSNELTIRRGQTVEVLERPHDKPDWCLVRTTDRSPAAEGLVPCGSLCIAHSRSSMEMEGIFNHKDSLSVSSNDASPPASVASLQPHMIGAQSSPGPKRPGNTLRKWLTSPVRRLSSGKADGHVKKLAHKHKKSREVRKSADAGSQKDSDDSAATPQDETVEERGRNEGLSSGTLSKSSSSGMQSCGEEEGEEGADAVPLPPPMAIQQHSLLQPDSQDDKASSRLLVRPTSSETPSAAELVSAIEELVKSKMALEDRPSSLLVDQGDSSSPSFNPSDNSLLSSSSPIDEMEERKSSSLKRRHYVLQELVETERDYVRDLGYVVEGYMALMKEDGVPDDMKGKDKIVFGNIHQIYDWHRDFFLGELEKCLEDPEKLGSLFVKHERRLHMYIAYCQNKPKSEHIVSEYIDTFFEDLKQRLGHRLQLTDLLIKPVQRIMKYQLLLKDFLKYSKKASLDTSELERAVEVMCIVPRRCNDMMNVGRLQGFDGKIVAQGKLLLQDTFLVTDQDAGLLPRCRERRIFLFEQIVIFSEPLDKKKGFSMPGFLFKNSIKVSCLCLEENVENDPCKFALTSRTGDVVETFILHSSSPSVRQTWIHEINQILENQRNFLNALTSPIEYQRNHSGGGGGGGSGGSGGGGGSGGGGAPSGGSGHSGGPSSCGGAPSTSRSRPSRIPQPVRHHPPVLVSSAASSQAEADKMSGTSTPGPSLPPPGAAPEAGPSAPSRRPPGADAEGSEREAEPIPKMKVLESPRKGAANASGSSPDAPAKDARASLGTLPLGKPRAGAASPLNSPLSSAVPSLGKEPFPPSSPLQKGGSFWSSIPASPASRPGSFTFPGDSDSLQRQTPRHAAPGKDTDRMSTCSSASEQSVQSTQSNGSESSSSSNISTMLVTHDYTAVKEDEINVYQGEVVQILASNQQNMFLVFRAATDQCPAAEGWIPGFVLGHTSAVIVENPDGTLKKSTSWHTALRLRKKSEKKDKDGKREGKLENGYRKSREGLSNKVSVKLLNPNYIYDVPPEFVIPLSEVTCETGETVVLRCRVCGRPKASITWKGPEHNTLNNDGHYSISYSDLGEATLKIVGVTTEDDGIYTCIAVNDMGSASSSASLRVLGPGMDGIMVTWKDNFDSFYSEVAELGRGRFSVVKKCDQKGTKRAVATKFVNKKLMKRDQVTHELGILQSLQHPLLVGLLDTFETPTSYILVLEMADQGRLLDCVVRWGSLTEGKIRAHLGEVLEAVRYLHNCRIAHLDLKPENILVDESLAKPTIKLADFGDAVQLNTTYYIHQLLGNPEFAAPEIILGNPVSLTSDTWSVGVLTYVLLSGVSPFLDDSVEETCLNICRLDFSFPDDYFKGVSQKAKEFVCFLLQEDPAKRPSAALALQEQWLQAGNGRSTGVLDTSRLTSFIERRKHQNDVRPIRSIKNFLQSRLLPRV

SEQ ID NO: 5527 - protein, 2921 aa, Homo sapiens
MSGSSGGAAAPAASSGPAAAASAAGSGCGGGAGEGAEEAAKDLADIAAFFRSGFRKNDEMKAMDVLPILKEKVAYLSGGRDKRGGPILTFPARSNHDRIRQEDLRRLISYLACIPSEEVCKRGFTVIVDMRGSKWDSIKPLLKILQESFPCCIHVALIIKPDNFWQKQRTNFGSSKFEFETNMVSLEGLTKVVDPSQLTPEFDGCLEYNHEEWIEIRVAFEDYISNATHMLSRLEELQDILAKKELPQDLEGARNMIEEHSQLKKKVIKAPIEDLDLEGQKLLQRIQSSESFPKKNSGSGNADLQNLLPKVSTMLDRLHSTRQHLHQMWHVRKLKLDQCFQLRLFEQDAEKMFDWITHNKGLFLNSYTEIGTSHPHAMELQTQHNHFAMNCMNVYVNINRIMSVANRLVESGHYASQQIRQIASQLEQEWKAFAAALDERSTLLDMSSIFHQKAEKYMSNVDSWCKACGEVDLPSELQDLEDAIHHHQGIYEHITLAYSEVSQDGKSLLDKLQRPLTPGSSDSLTASANYSKAVHHVLDVIHEVLHHQRQLENIWQHRKVRLHQRLQLCVFQQDVQQVLDWIENHGEAFLSKHTGVGKSLHRARALQKRHEDFEEVAQNTYTNADKLLEAAEQLAQTGECDPEEIYQAAHQLEDRIQDFVRRVEQRKILLDMSVSFHTHVKELWTWLEELQKELLDDVYAESVEAVQDLIKRFGQQQQTTLQVTVNVIKEGEDLIQQLRDSAISSNKTPHNSSINHIETVLQQLDEAQSQMEELFQERKIKLELFLQLRIFERDAIDIISDLESWNDELSQQMNDFDTEDLTIAEQRLQHHADKALTMNNLTFDVIHQGQDLLQYVNEVQASGVELLCDRDVDMATRVQDLLEFLHEKQQELDLAAEQHRKHLEQCVQLRHLQAEVKQVLGWIRNGESMLNAGLITASSLQEAEQLQREHEQFQHAIEKTHQSALQVQQKAEAMLQANHYDMDMIRDCAEKVASHWQQLMLKMEDRLKLVNASVAFYKTSEQVCSVLESLEQEYKREEDWCGGADKLGPNSETDHVTPMISKHLEQKEAFLKACTLARRNADVFLKYLHRNSVNMPGMVTHIKAPEQQVKNILNELFQRENRVLHYWTMRKRRLDQCQQYVVFERSAKQALEWIHDNGEFYLSTHTSTGSSIQHTQELLKEHEEFQITAKQTKERVKLLIQLADGFCEKGHAHAAEIKKCVTAVDKRYRDFSLRMEKYRTSLEKALGISSDSNKSSKSLQLDIIPASIPGSEVKLRDAAHELNEEKRKSARRKEFIMAELIQTEKAYVRDLRECMDTYLWEMTSGVEEIPPGIVNKELIIFGNMQEIYEFHNNIFLKELEKYEQLPEDVGHCFVTWADKFQMYVTYCKNKPDSTQLILEHAGSYFDEIQQRHGLANSISSYLIKPVQRITKYQLLLKELLTCCEEGKGEIKDGLEVMLSVPKRANDAMHLSMLEGFDENIESQGELILQESFQVWDPKTLIRKGRERHLFLFEMSLVFSKEVKDSSGRSKYLYKSKLFTSELGVTEHVEGDPCKFALWVGRTPTSDNKIVLKASSIENKQDWIKHIREVIQERTIHLKGALKEPIHIPKTAPATRQKGRRDGEDLDSQGDGSSQPDTISIASRTSQNTLDSDKLSGGCELTVVIHDFTACNSNELTIRRGQTVEVLERPHDKPDWCLVRTTDRSPAAEGLVPCGSLCIAHSRSSMEMEGIFNHKDSLSVSSNDASPPASVASLQPHMIGAQSSPGPKRPGNTLRKWLTSPVRRLSSGKADGHVKKLAHKHKKSREVRKSADAGSQKDSDDSAATPQDETVEERGRNEGLSSGTLSKSSSSGMQSCGEEEGEEGADAVPLPPPMAIQQHSLLQPDSQDDKASSRLLVRPTSSETPSAAELVSAIEELVKSKMALEDRPSSLLVDQGDSSSPSFNPSDNSLLSSSSPIDEMEERKSSSLKRRHYVLQELVETERDYVRDLGYVVEGYMALMKEDGVPDDMKGKDKIVFGNIHQIYDWHRDFFLGELEKCLEDPEKLGSLFVKHERRLHMYIAYCQNKPKSEHIVSEYIDTFFEDLKQRLGHRLQLTDLLIKPVQRIMKYQLLLKDFLKYSKKASLDTSELERAVEVMCIVPRRCNDMMNVGRLQGFDGKIVAQGKLLLQDTFLVTDQDAGLLPRCRERRIFLFEQIVIFSEPLDKKKGFSMPGFLFKNSIKVSCLCLEENVENDPCKFALTSRTGDVVETFILHSSSPSVRQTWIHEINQILENQRNFLNALTSPIEYQRNHSGGGGGGGSGGSGGGGGSGGGGAPSGGSGHSGGPSSCGGAPSTSRSRPSRIPQPVRHHPPVLVSSAASSQAEADKMSESESSSSSNISTMLVTHDYTAVKEDEINVYQGEVVQILASNQQNMFLVFRAATDQCPAAEGWIPGFVLGHTSAVIVENPDGTLKKSTSWHTALRLRKKSEKKDKDGKREGKLENGYRKSREGLSNKVSVKLLNPNYIYDVPPEFVIPLSEVTCETGETVVLRCRVCGRPKASITWKGPEHNTLNNDGHYSISYSDLGEATLKIVGVTTEDDGIYTCIAVNDMGSASSSASLRVLGPGMDGIMVTWKDNFDSFYSEVAELGRGRFSVVKKCDQKGTKRAVATKFVNKKLMKRDQVTHELGILQSLQHPLLVGLLDTFETPTSYILVLEMADQGRLLDCVVRWGSLTEGKIRAHLGEVLEAVRYLHNCRIAHLDLKPENILVDESLAKPTIKLADFGDAVQLNTTYYIHQLLGNPEFAAPEIILGNPVSLTSDTWSVGVLTYVLLSGVSPFLDDSVEETCLNICRLDFSFPDDYFKGVSQKAKEFVCFLLQEDPAKRPSAALALQEQWLQAGNGRSTGVLDTSRLTSFIERRKHQNDVRPIRSIKNFLQSRLLPRV

SEQ ID NO: 5528 - protein, 596 aa, Homo sapiens
MLPSQAQGLLWWVFPLFPASSLSYPPVSYRADGLARNTFLKACSESSSSSNISTMLVTHDYTAVKEDEINVYQGEVVQILASNQQNMFLVFRAATDQCPAAEGWIPGFVLGHTSAVIVENPDGTLKKSTSWHTALRLRKKSEKKDKDGKREGKLENGYRKSREGLSNKVSVKLLNPNYIYDVPPEFVIPLSEVTCETGETVVLRCRVCGRPKASITWKGPEHNTLNNDGHYSISYSDLGEATLKIVGVTTEDDGIYTCIAVNDMGSASSSASLRVLGPGMDGIMVTWKDNFDSFYSEVAELGRGRFSVVKKCDQKGTKRAVATKFVNKKLMKRDQVTHELGILQSLQHPLLVGLLDTFETPTSYILVLEMADQGRLLDCVVRWGSLTEGKIRAHLGEVLEAVRYLHNCRIAHLDLKPENILVDESLAKPTIKLADFGDAVQLNTTYYIHQLLGNPEFAAPEIILGNPVSLTSDTWSVGVLTYVLLSGVSPFLDDSVEETCLNICRLDFSFPDDYFKGVSQKAKEFVCFLLQEDPAKRPSAALALQEQWLQAGNGRSTGVLDTSRLTSFIERRKHQNDVRPIRSIKNFLQSRLLPRV

SEQ ID NO: 5529 - protein, 3038 aa, Homo sapiens
MKAMDVLPILKEKVAYLSGGRDKRGGPILTFPARSNHDRIRQEDLRRLISYLACIPSEEVCKRGFTVIVDMRGSKWDSIKPLLKILQESFPCCIHVALIIKPDNFWQKQRTNFGSSKFEFETNMVSLEGLTKVVDPSQLTPEFDGCLEYNHEEWIEIRVAFEDYISNATHMLSRLEELQDILAKKELPQDLEGARNMIEEHSQLKKKVIKAPIEDLDLEGQKLLQRIQSSESFPKKNSGSGNADLQNLLPKVSTMLDRLHSTRQHLHQMWHVRKLKLDQCFQLRLFEQDAEKMFDWITHNKGLFLNSYTEIGTSHPHAMELQTQHNHFAMNCMNVYVNINRIMSVANRLVESGHYASQQIRQIASQLEQEWKAFAAALDERSTLLDMSSIFHQKAEKYMSNVDSWCKACGEVDLPSELQDLEDAIHHHQGIYEHITLAYSEVSQDGKSLLDKLQRPLTPGSSDSLTASANYSKAVHHVLDVIHEVLHHQRQLENIWQHRKVRLHQRLQLCVFQQDVQQVLDWIENHGEAFLSKHTGVGKSLHRARALQKRHEDFEEVAQNTYTNADKLLEAAEQLAQTGECDPEEIYQAAHQLEDRIQDFVRRVEQRKILLDMSVSFHTHVKELWTWLEELQKELLDDVYAESVEAVQDLIKRFGQQQQTTLQVTVNVIKEGEDLIQQLRDSAISSNKTPHNSSINHIETVLQQLDEAQSQMEELFQERKIKLELFLQLRIFERDAIDIISDLESWNDELSQQMNDFDTEDLTIAEQRLQHHADKALTMNNLTFDVIHQGQDLLQYVNEVQASGVELLCDRDVDMATRVQDLLEFLHEKQQELDLAAEQHRKHLEQCVQLRHLQAEVKQVLGWIRNGESMLNAGLITASSLQEAEQLQREHEQFQHAIEKTHQSALQVQQKAEAMLQANHYDMDMIRDCAEKVASHWQQLMLKMEDRLKLVNASVAFYKTSEQVCSVLESLEQEYKREEDWCGGADKLGPNSETDHVTPMISKHLEQKEAFLKACTLARRNADVFLKYLHRNSVNMPGMVTHIKAPEQQVKNILNELFQRENRVLHYWTMRKRRLDQCQQYVVFERSAKQALEWIHDNGEFYLSTHTSTGSSIQHTQELLKEHEEFQITAKQTKERVKLLIQLADGFCEKGHAHAAEIKKCVTAVDKRYRDFSLRMEKYRTSLEKALGISSDSNKSSKSLQLDIIPASIPGSEVKLRDAAHELNEEKRKSARRKEFIMAELIQTEKAYVRDLRECMDTYLWEMTSGVEEIPPGIVNKELIIFGNMQEIYEFHNNIFLKELEKYEQLPEDVGHCFVTWADKFQMYVTYCKNKPDSTQLILEHAGSYFDEIQQRHGLANSISSYLIKPVQRITKYQLLLKELLTCCEEGKGEIKDGLEVMLSVPKRANDAMHLSMLEGFDENIESQGELILQESFQVWDPKTLIRKGRERHLFLFEMSLVFSKEVKDSSGRSKYLYKSKLFTSELGVTEHVEGDPCKFALWVGRTPTSDNKIVLKASSIENKQDWIKHIREVIQERTIHLKGALKEPIHIPKTAPATRQKGRRDGEDLDSQGDGSSQPDTISIASRTSQNTLDSDKLSGGCELTVVIHDFTACNSNELTIRRGQTVEVLERPHDKPDWCLVRTTDRSPAAEGLVPCGSLCIAHSRSSMEMEGIFNHKDSLSVSSNDASPPASVASLQPHMIGAQSSPGPKRPGNTLRKWLTSPVRRLSSGKADGHVKKLAHKHKKSREVRKSADAGSQKDSDDSAATPQDETVEERGRNEGLSSGTLSKSSSSGMQSCGEEEGEEGADAVPLPPPMAIQQHSLLQPDSQDDKASSRLLVRPTSSETPSAAELVSAIEELVKSKMALEDRPSSLLVDQGDSSSPSFNPSDNSLLSSSSPIDEMEERKSSSLKRRHYVLQELVETERDYVRDLGYVVEGYMALMKEDGVPDDMKGKDKIVFGNIHQIYDWHRDFFLGELEKCLEDPEKLGSLFVKHERRLHMYIAYCQNKPKSEHIVSEYIDTFFEDLKQRLGHRLQLTDLLIKPVQRIMKYQLLLKDFLKYSKKASLDTSELERAVEVMCIVPRRCNDMMNVGRLQGFDGKIVAQGKLLLQDTFLVTDQDAGLLPRCRERRIFLFEQIVIFSEPLDKKKGFSMPGFLFKNSIKVSCLCLEENVENDPCKFALTSRTGDVVETFILHSSSPSVRQTWIHEINQILENQRNFLNALTSPIEYQRNHSGGGGGGGSGGSGGGGGSGGGGAPSGGSGHSGGPSSCGGAPSTSRSRPSRIPQPVRHHPPVLVSSAASSQAEADKMSGTSTPGPSLPPPGAAPEAGPSAPSRRPPGADAEGSEREAEPIPKMKVLESPRKGAANASGSSPDAPAKDARASLGTLPLGKPRAGAASPLNSPLSSAVPSLGKEPFPPSSPLQKGGSFWSSIPASPASRPGSFTFPGDSDSLQRQTPRHAAPGKDTDRMSTCSSASEQSVQSTQSNGSESSSSSNISTMLVTHDYTAVKEDEINVYQGEVVQILASNQQNMFLVFRAATDQCPAAEGWIPGFVLGHTSAVIVENPDGTLKKSTSWHTALRLRKKSEKKDKDGKREGKLENGYRKSREGLSNKVSVKLLNPNYIYDVPPEFVIPLSEVTCETGETVVLRCRVCGRPKASITWKGPEHNTLNNDGHYSISYSDLGEATLKIVGVTTEDDGIYTCIAVNDMGSASSSASLRVLGPGMDGIMVTWKDNFDSFYSEVAELGRGRFSVVKKCDQKGTKRAVATKFVNKKLMKRDQVTHELGILQSLQHPLLVGLLDTFETPTSYILVLEMADQGRLLDCVVRWGSLTEGKIRAHLGEVLEAVRYLHNCRIAHLDLKPENILVDESLAKPTIKLADFGDAVQLNTTYYIHQLLGNPEFAAPEIILGNPVSLTSDTWSVGVLTYVLLSGVSPFLDDSVEETCLNICRLDFSFPDDYFKGVSQKAKEFVCFLLQEDPAKRPSAALALQEQWLQAGNGRSTGVLDTSRLTSFIERRKHQNDVRPIRSIKNFLQSRLLPRV

SEQ ID NO: 5530 - protein, 2563 aa, Homo sapiens
MSGSSGGAAAPAASSGPAAAASAAGSGCGGGAGEGAEEAAKDLADIAAFFRSGFRKNDEMKAMDVLPILKEKVAYLSGGRDKRGGPILTFPARSNHDRIRQEDLRRLISYLACIPSEEVCKRGFTVIVDMRGSKWDSIKPLLKILQESFPCCIHVALIIKPDNFWQKQRTNFGSSKFEFETNMVSLEGLTKVVDPSQLTPEFDGCLEYNHEEWIEIRVAFEDYISNATHMLSRLEELQDILAKKELPQDLEGARNMIEEHSQLKKKVIKAPIEDLDLEGQKLLQRIQSSESFPKKNSGSGNADLQNLLPKVSTMLDRLHSTRQHLHQMWHVRKLKLDQCFQLRLFEQDAEKMFDWITHNKGLFLNSYTEIGTSHPHAMELQTQHNHFAMNCMNVYVNINRIMSVANRLVESGHYASQQIRQIASQLEQEWKAFAAALDERSTLLDMSSIFHQKAEKYMSNVDSWCKACGEVDLPSELQDLEDAIHHHQGIYEHITLAYSEVSQDGKSLLDKLQRPLTPGSSDSLTASANYSKAVHHVLDVIHEVLHHQRQLENIWQHRKVRLHQRLQLCVFQQDVQQVLDWIENHGEAFLSKHTGVGKSLHRARALQKRHEDFEEVAQNTYTNADKLLEAAEQLAQTGECDPEEIYQAAHQLEDRIQDFVRRVEQRKILLDMSVSFHTHVKELWTWLEELQKELLDDVYAESVEAVQDLIKRFGQQQQTTLQVTVNVIKEGEDLIQQLRDSAISSNKTPHNSSINHIETVLQQLDEAQSQMEELFQERKIKLELFLQLRIFERDAIDIISDLESWNDELSQQMNDFDTEDLTIAEQRLQHHADKALTMNNLTFDVIHQGQDLLQYVNEVQASGVELLCDRDVDMATRVQDLLEFLHEKQQELDLAAEQHRKHLEQCVQLRHLQAEVKQVLGWIRNGESMLNAGLITASSLQEAEQLQREHEQFQHAIEKTHQSALQVQQKAEAMLQANHYDMDMIRDCAEKVASHWQQLMLKMEDRLKLVNASVAFYKTSEQVCSVLESLEQEYKREEDWCGGADKLGPNSETDHVTPMISKHLEQKEAFLKACTLARRNADVFLKYLHRNSVNMPGMVTHIKAPEQQVKNILNELFQRENRVLHYWTMRKRRLDQCQQYVVFERSAKQALEWIHDNGEFYLSTHTSTGSSIQHTQELLKEHEEFQITAKQTKERVKLLIQLADGFCEKGHAHAAEIKKCVTAVDKRYRDFSLRMEKYRTSLEKALGISSDSNKSSKSLQLDIIPASIPGSEVKLRDAAHELNEEKRKSARRKEFIMAELIQTEKAYVRDLRECMDTYLWEMTSGVEEIPPGIVNKELIIFGNMQEIYEFHNNIFLKELEKYEQLPEDVGHCFVTWADKFQMYVTYCKNKPDSTQLILEHAGSYFDEIQQRHGLANSISSYLIKPVQRITKYQLLLKELLTCCEEGKGEIKDGLEVMLSVPKRANDAMHLSMLEGFDENIESQGELILQESFQVWDPKTLIRKGRERHLFLFEMSLVFSKEVKDSSGRSKYLYKSKLFTSELGVTEHVEGDPCKFALWVGRTPTSDNKIVLKASSIENKQDWIKHIREVIQERTIHLKGALKEPIHIPKTAPATRQKGRRDGEDLDSQGDGSSQPDTISIASRTSQNTLDSDKLSGGCELTVVIHDFTACNSNELTIRRGQTVEVLERPHDKPDWCLVRTTDRSPAAEGLVPCGSLCIAHSRSSMEMEGIFNHKDSLSVSSNDASPPASVASLQPHMIGAQSSPGPKRPGNTLRKWLTSPVRRLSSGKADGHVKKLAHKHKKSREVRKSADAGSQKDSDDSAATPQDETVEERGRNEGLSSGTLSKSSSSGMQSCGEEEGEEGADAVPLPPPMAIQQHSLLQPDSQDDKASSRLLVRPTSSETPSAAELVSAIEELVKSKMALEDRPSSLLVDQGDSSSPSFNPSDNSLLSSSSPIDEMEERKSSSLKRRHYVLQELVETERDYVRDLGYVVEGYMALMKEDGVPDDMKGKDKIVFGNIHQIYDWHRDFFLGELEKCLEDPEKLGSLFVKHERRLHMYIAYCQNKPKSEHIVSEYIDTFFEDLKQRLGHRLQLTDLLIKPVQRIMKYQLLLKDFLKYSKKASLDTSELERAVEVMCIVPRRCNDMMNVGRLQGFDGKIVAQGKLLLQDTFLVTDQDAGLLPRCRERRIFLFEQIVIFSEPLDKKKGFSMPGFLFKNSIKVSCLCLEENVENDPCKFALTSRTGDVVETFILHSSSPSVRQTWIHEINQILENQRNFLNALTSPIEYQRNHSGGGGGGGSGGSGGGGGSGGGGAPSGGSGHSGGPSSCGGAPSTSRSRPSRIPQPVRHHPPVLVSSAASSQAEADKMSGTSTPGPSLPPPGAAPEAGPSAPSRRPPGADAEGSEREAEPIPKMKVLESPRKGAANASGSSPDAPAKDARASLGTLPLGKPRAGAASPLNSPLSSAVPSLGKEPFPPSSPLQKGGSFWSSIPASPASRPGSFTFPGDSDSLQRQTPRHAAPGKDTDRMSTCSSASEQSVQSTQSNGVSASGGPRPPAPLPLSRQL

SEQ ID NO: 5531 - protein, 273 aa, Homo sapiens
MILKGCLLYPLCSPRNKQRCARLWKIAYGGLLKIVTGSLLTFYVVLCLDGGMVLMRKQVPSRFMYPKEWQHLTMFILLTLNGCVDFMSKNVLPQRCVGLEKGTLVLIIYELLLLMVSHVKDSEGVELHVYSLLILVVFLLLLVLTAELWAPNMCHLQLMETFLILMMGSWLMQAGFILYRPVSGYPWQDDDISDIMFVTTFFCWHVMINASFLLGIYGFSSFWYHCFRPSLKLTGPKEAPYYASTPGPLYKLLQEVEQSEKEDQALLLPKSSP

SEQ ID NO: 5532 - protein, 1972 aa, Homo sapiens
MDPTGSQLDSDFSQQDTPCLIIEDSQPESQVLEDDSGSHFSMLSRHLPNLQTHKENPVLDVVSNPEQTAGEERGDGNSGFNEHLKENKVADPVDSSNLDTCGSISQVIEQLPQPNRTSSVLGMSVESAPAVEEEKGEELEQKEKEKEEDTSGNTTHSLGAEDTASSQLGFGVLELSQSQDVEENTVPYEVDKEQLQSVTTNSGYTRLSDVDANTAIKHEEQSNEDIPIAEQSSKDIPVTAQPSKDVHVVKEQNPPPARSEDMPFSPKASVAAMEAKEQLSAQELMESGLQIQKSPEPEVLSTQEDLFDQSNKTVSSDGCSTPSREEGGCSLASTPATTLHLLQLSGQRSLVQDSLSTNSSDLVAPSPDAFRSTPFIVPSSPTEQEGRQDKPMDTSVLSEEGGEPFQKKLQSGEPVELENPPLLPESTVSPQASTPISQSTPVFPPGSLPIPSQPQFSHDIFIPSPSLEEQSNDGKKDGDMHSSSLTVECSKTSEIEPKNSPEDLGLSLTGDSCKLMLSTSEYSQSPKMESLSSHRIDEDGENTQIEDTEPMSPVLNSKFVPAENDSILMNPAQDGEVQLSQNDDKTKGDDTDTRDDISILATGCKGREETVAEDVCIDLTCDSGSQAVPSPATRSEALSSVLDQEEAMEIKEHHPEEGSSGSEVEEIPETPCESQGEELKEENMESVPLHLSLTETQSQGLCLQKEMPKKECSEAMEVETSVISIDSPQKLAILDQELEHKEQEAWEEATSEDSSVVIVDVKEPSPRVDVSCEPLEGVEKCSDSQSWEDIAPEIEPCAENRLDTKEEKSVEYEGDLKSGTAETEPVEQDSSQPSLPLVRADDPLRLDQELQQPQTQEKTSNSLTEDSKMANAKQLSSDAEAQKLGKPSAHASQSFCESSSETPFHFTLPKEGDIIPPLTGATPPLIGHLKLEPKRHSTPIGISNYPESTIATSDVMSESMVETHDPILGSGKGDSGAAPDVDDKLCLRMKLVSPETEASEESLQFNLEKPATGERKNGSTAVAESVASPQKTMSVLSCICEARQENEARSEDPPTTPIRGNLLHFPSSQGEEEKEKLEGDHTIRQSQQPMKPISPVKDPVSPASQKMVIQGPSSPQGEAMVTDVLEDQKEGRSTNKENPSKALIERPSQNNIGIQTMECSLRVPETVSAATQTIKNVCEQGTSTVDQNFGKQDATVQTERGSGEKPVSAPGDDTESLHSQGEEEFDMPQPPHGHVLHRHMRTIREVRTLVTRVITDVYYVDGTEVERKVTEETEEPIVECQECETEVSPSQTGGSSGDLGDISSFSSKASSLHRTSSGTSLSAMHSSGSSGKGAGPLRGKTSGTEPADFALPSSRGGPGKLSPRKGVSQTGTPVCEEDGDAGLGIRQGGKAPVTPRGRGRRGRPPSRTTGTRETAVPGPLGIEDISPNLSPDDKSFSRVVPRVPDSTRRTDVGAGALRRSDSPEIPFQAAAGPSDGLDASSPGNSFVGLRVVAKWSSNGYFYSGKITRDVGAGKYKLLFDDGYECDVLGKDILLCDPIPLDTEVTALSEDEYFSAGVVKGHRKESGELYYSIEKEGQRKWYKRMAVILSLEQGNRLREQYGLGPYEAVTPLTKAADISLDNLVEGKRKRRSNVSSPATPTASSSSSTTPTRKITESPRASMGVLSGKRKLITSEEERSPAKRGRKSATVKPGAVGAGEFVSPCESGDNTGEPSALEEQRGPLPLNKTLFLGYAFLLTMATTSDKLASRSKLPDGPTGSSEEEEEFLEIPPFNKQYTESQLRAGAGYILEDFNEAQCNTAYQCLLIADQHCRTRKYFLCLASGIPCVSHVWVHDSCHANQLQNYRNYLLPAGYSLEEQRILDWQPRENPFQNLKVLLVSDQQQNFLELWSEILMTGGAASVKQHHSSAHNKDIALGVFDVVVTDPSCPASVLKCAEALQLPVVSQEWVIQCLIVGERIGFKQHPKYKHDYVSH

SEQ ID NO: 5533 - protein, 1977 aa, Homo sapiens
MPGEQMDPTGSQLDSDFSQQDTPCLIIEDSQPESQVLEDDSGSHFSMLSRHLPNLQTHKENPVLDVVSNPEQTAGEERGDGNSGFNEHLKENKVADPVDSSNLDTCGSISQVIEQLPQPNRTSSVLGMSVESAPAVEEEKGEELEQKEKEKEEDTSGNTTHSLGAEDTASSQLGFGVLELSQSQDVEENTVPYEVDKEQLQSVTTNSGYTRLSDVDANTAIKHEEQSNEDIPIAEQSSKDIPVTAQPSKDVHVVKEQNPPPARSEDMPFSPKASVAAMEAKEQLSAQELMESGLQIQKSPEPEVLSTQEDLFDQSNKTVSSDGCSTPSREEGGCSLASTPATTLHLLQLSGQRSLVQDSLSTNSSDLVAPSPDAFRSTPFIVPSSPTEQEGRQDKPMDTSVLSEEGGEPFQKKLQSGEPVELENPPLLPESTVSPQASTPISQSTPVFPPGSLPIPSQPQFSHDIFIPSPSLEEQSNDGKKDGDMHSSSLTVECSKTSEIEPKNSPEDLGLSLTGDSCKLMLSTSEYSQSPKMESLSSHRIDEDGENTQIEDTEPMSPVLNSKFVPAENDSILMNPAQDGEVQLSQNDDKTKGDDTDTRDDISILATGCKGREETVAEDVCIDLTCDSGSQAVPSPATRSEALSSVLDQEEAMEIKEHHPEEGSSGSEVEEIPETPCESQGEELKEENMESVPLHLSLTETQSQGLCLQKEMPKKECSEAMEVETSVISIDSPQKLAILDQELEHKEQEAWEEATSEDSSVVIVDVKEPSPRVDVSCEPLEGVEKCSDSQSWEDIAPEIEPCAENRLDTKEEKSVEYEGDLKSGTAETEPVEQDSSQPSLPLVRADDPLRLDQELQQPQTQEKTSNSLTEDSKMANAKQLSSDAEAQKLGKPSAHASQSFCESSSETPFHFTLPKEGDIIPPLTGATPPLIGHLKLEPKRHSTPIGISNYPESTIATSDVMSESMVETHDPILGSGKGDSGAAPDVDDKLCLRMKLVSPETEASEESLQFNLEKPATGERKNGSTAVAESVASPQKTMSVLSCICEARQENEARSEDPPTTPIRGNLLHFPSSQGEEEKEKLEGDHTIRQSQQPMKPISPVKDPVSPASQKMVIQGPSSPQGEAMVTDVLEDQKEGRSTNKENPSKALIERPSQNNIGIQTMECSLRVPETVSAATQTIKNVCEQGTSTVDQNFGKQDATVQTERGSGEKPVSAPGDDTESLHSQGEEEFDMPQPPHGHVLHRHMRTIREVRTLVTRVITDVYYVDGTEVERKVTEETEEPIVECQECETEVSPSQTGGSSGDLGDISSFSSKASSLHRTSSGTSLSAMHSSGSSGKGAGPLRGKTSGTEPADFALPSSRGGPGKLSPRKGVSQTGTPVCEEDGDAGLGIRQGGKAPVTPRGRGRRGRPPSRTTGTRETAVPGPLGIEDISPNLSPDDKSFSRVVPRVPDSTRRTDVGAGALRRSDSPEIPFQAAAGPSDGLDASSPGNSFVGLRVVAKWSSNGYFYSGKITRDVGAGKYKLLFDDGYECDVLGKDILLCDPIPLDTEVTALSEDEYFSAGVVKGHRKESGELYYSIEKEGQRKWYKRMAVILSLEQGNRLREQYGLGPYEAVTPLTKAADISLDNLVEGKRKRRSNVSSPATPTASSSSSTTPTRKITESPRASMGVLSGKRKLITSEEERSPAKRGRKSATVKPGAVGAGEFVSPCESGDNTGEPSALEEQRGPLPLNKTLFLGYAFLLTMATTSDKLASRSKLPDGPTGSSEEEEEFLEIPPFNKQYTESQLRAGAGYILEDFNEAQCNTAYQCLLIADQHCRTRKYFLCLASGIPCVSHVWVHDSCHANQLQNYRNYLLPAGYSLEEQRILDWQPRENPFQNLKVLLVSDQQQNFLELWSEILMTGGAASVKQHHSSAHNKDIALGVFDVVVTDPSCPASVLKCAEALQLPVVSQEWVIQCLIVGERIGFKQHPKYKHDYVSH

SEQ ID NO: 5534 - protein, 1975 aa, Homo sapiens
MPGEQMDPTGSQLDSDFSQQDTPCLIIEDSQPESQVLEDDSGSHFSMLSRHLPNLQTHKENPVLDVVSNPEQTAGEERGDGNSGFNEHLKENKVADPVDSSNLDTCGSISQVIEQLPQPNRTSSVLGMSVESAPAVEEEKGEELEQKEKEKEEDTSGNTTHSLGAEDTASSQLGFGVLELSQSQDVEENTVPYEVDKEQLQSVTTNSGYTRLSDVDANTAIKHEEQSNEDIPIAEQSSKDIPVTAQPSKDVHVVKEQNPPPARSEDMPFSPKASVAAMEAKEQLSAQELMESGLQIQKSPEPEVLSTQEDLFDQSNKTVSSDGCSTPSREEGGCSLASTPATTLHLLQLSGQRSLVQDSLSTNSSDLVAPSPDAFRSTPFIVPSSPTEQEGRQDKPMDTSVLSEEGGEPFQKKLQSGEPVELENPPLLPESTVSPQASTPISQSTPVFPPGSLPIPSQPQFSHDIFIPSPSLEEQSNDGKKDGDMHSSSLTVECSKTSEIEPKNSPEDLGLSLTGDSCKLMLSTSEYSQSPKMESLSSHRIDEDGENTQIEDTEPMSPVLNSKFVPAENDSILMNPAQDGEVQLSQNDDKTKGDDTDTRDDISILATGCKGREETVAEDVCIDLTCDSGSQAVPSPATRSEALSSVLDQEEAMEIKEHHPEEGSSGSEVEEIPETPCESQGEELKEENMESVPLHLSLTETQSQGLCLQKEMPKKECSEAMEVETSVISIDSPQKLAILDQELEHKEQEAWEEATSEDSSVVIVDVKEPSPRVDVSCEPLEGVEKCSDSQSWEDIAPEIEPCAENRLDTKEEKSVEYEGDLKSGTAETEPVEQDSSQPSLPLVRADDPLRLDQELQQPQTQEKTSNSLTEDSKMANAKQLSSDAEAQKLGKPSAHASQSFCESSSETPFHFTLPKEGDIIPPLTGATPPLIGHLKLEPKRHSTPIGISNYPESTIATSDVMSESMVETHDPILGSGKGDSGAAPDVDDKLCLRMKLVSPETEASEESLQFNLEKPATGERKNGSTAVAESVASPQKTMSVLSCICEARQENEARSEDPPTTPIRGNLLHFPSSQGEEEKEKLEGDHTIRQSQQPMKPISPVKDPVSPASQKMVIQGPSSPQGEAMVTDVLEDQKEGRSTNKENPSKALIERPSQNNIGIQTMECSLRVPETVSAATQTIKNVCEQGTSTVDQNFGKQDATVQTERGSGEKPVSAPGDDTESLHSQGEEEFDMPQPPHGHVLHRHMRTIREVRTLVTRVITDVYYVDGTEVERKVTEETEEPIVECQECETEVSPSQTGGSSGDLGDISSFSSKASSLHRTSSGTSLSAMHSSGSSGKGAGPLRGKTSGTEPADFALPSSRGGPGKLSPRKGVSQTGTPVCEEDGDAGLGIRQGGKAPVTPRGRGRRGRPPSRTTGTRETAVPGPLGIEDISPNLSPDDKSFSRVVPRVPDSTRRTDVGAGALRRSDSPEIPFQAAAGPSDGLDASSPGNSFVGLRVVAKWSSNGYFYSGKITRDVGAGKYKLLFDDGYECDVLGKDILLCDPIPLDTEVTALSEDEYFSAGVVKGHRKESGELYYSIEKEGQRKWYKRMAVILSLEQGNRLREQYGLGPYEAVTPLTKAADISLDNLVEGKRKRRSNVSSPATPTASSSSSTTPTRKITESPRASMGVLSGKRKLITSEEERSPAKRGRKSATVKPVGAGEFVSPCESGDNTGEPSALEEQRGPLPLNKTLFLGYAFLLTMATTSDKLASRSKLPDGPTGSSEEEEEFLEIPPFNKQYTESQLRAGAGYILEDFNEAQCNTAYQCLLIADQHCRTRKYFLCLASGIPCVSHVWVHDSCHANQLQNYRNYLLPAGYSLEEQRILDWQPRENPFQNLKVLLVSDQQQNFLELWSEILMTGGAASVKQHHSSAHNKDIALGVFDVVVTDPSCPASVLKCAEALQLPVVSQEWVIQCLIVGERIGFKQHPKYKHDYVSH

SEQ ID NO: 5535 - protein, 292 aa, Homo sapiens
MGKPRQNPSTLVSTLCEAEPKGKLWVNGYAGTQGTRDATLQTRLIPLSFHLQRGKGLAAPLSALSAPRLPERPADGRVAVDAQPAARSMDSDSGEQSEGEPVTAAGPDVFSSKSLALQAQKKILSKIASKTVANMLIDDTSSEIFDELYKVTKEHTHNKKEAHKIMKDLIKVAIKIGILYRNNQFSQEELVIVEKFRKKLNQTAMTIVSFYEVEYTFDRNVLSNLLHECKDLVHELVQRHLTPRTHGRINHVFNHFADVEFLSTLYSLDGDCRPNLKRICEGINKLLDEKVL

SEQ ID NO: 5536 - protein, 163 aa, Homo sapiens
MSEQGRETEEEEGGGGASDTAPMLPRGPPDHQASALTCPGWSGPPLLPGRLLAGLLLHLLLPAAAFLLVLLPAAAVVYLGFLCHSRVHPAPGPRCRALFSDRGSAALIVFGLLSLPPLLVLASAVRARLARRLRPLLPPPAGTPGPRRPPGRPDEDEQLCAWV

SEQ ID NO: 5537 - protein, 1100 aa, Homo sapiens
MKTSKASQRYRGIRRNASQCYLYQESLLLSNLDDSFSADETGDSNDPEQIFQNIQFQKDLMANIRCRPWTMGQKLRALRQAKNIVLKFEGRLTRTRGYQAAGAELWRKFARLACNFVVIFIPWEMRIKKIESHFGSGVASYFIFLRWLFGINIVLTIMTGAFIVIPELIAGQPFGSTARKTIPKEQVSSAQDLDTVWSLGGYLQYSVLFYGYYGRERKIGRAGYRLPLAYFLVGMAVFAYSFIILLKKMAKNSRTSLASASNENYTFCWRVFCAWDYLIGNPEAAESKTAAIVNSIREAILEEQEKKKSKNLAVTICLRIIANILVLLSLAGSIYLIYFVVDRSQKLEQSKKELTLWEKNEVSVVVSLVTMIAPSAFDLIAALEMYHPRTTLRFQLARVLVLYLGNLYSLIIALLDKVNSMSIEEMATKNNTSHWIDSTTFFATRTAPEEEKWSTSRPGMGLRRNNTWALEETSISAYTMPLIKANKTSLHTQSPQDQCWETYVGQEMLKLSIIDMLFTVASILLIDFFRGLFVRYLSDYWCWDLESKFPEYGEFKIAENVLHLVYNQGMIWMGAFFSPCLPAFNVLKLIGLMYLRSWAVLTCNVPHQQVFRASRSNNFYLAMLLFMLFLCMLPTIFAIVRYKPSLNCGPFSGQEKIYDIVSETIEKDFPVWFGSVVGHISSPVVILPAVLLLFMLIYYLQSIARSLKLSNHQLKMQIQNARSEDKKKVAQMVEARIQTQEESTKKLPNDSDLTSQLSSAHSGTPQNNGNVAHFDSGSSKSGRIETVAQSMPQSPRPGDRAPSSPLPGVPKSRLEHETNRYLHGLCASTSDLHRNRSRTPMTFTTHIEDVHSEPLFRKDFQQINPPHRGPQASTLLAQGPRPHAPRYYVINECDSYKKKHLNVWPERHFKIDASGDIVELYPRNVRQYASRVPRQPPSPQLSEEEEETPSRDWIKRSLPPRSLIDLRRAPHFYIGERSESQTRDPEHQGRVHYKSWNEDFEGHLERPAYVPRKPRSRNFQYPQPPLKPRGKPRFEPSLTESDSVSAASSSDQQNSSADQYLQVTHSQGRFPRSVGQPSRRKAKSGQELTVDLDDLICSDV

SEQ ID NO: 5538 - protein, 724 aa, Homo sapiens
MKTSKASQRYRGIRRNASQCYLYQESLLLSNLDDSFSADETGDSNDPEQIFQNIQFQKDLMANIRCRPWTMGQKLRALRQAKNIVLKFEGRLTRTRGYQAAGAELWRKFARLACNFVVIFIPWEMRIKKIESHFGSGVASYFIFLRWLFGINIVLTIMTGAFIVIPELIAGQPFGSTARKTIPKEQVSSAQDLDTVWSLGGYLQYSVLFYGYYGRERKIGRAGYRLPLAYFLVGMAVFAYSFIILLKKMAKNSRTSLASASNENYTFCWRVFCAWDYLIGNPEAAESKTAAIVNSIREAILEEQEKKKSKNLAVTICLRIIANILVLLSLAGSIYLIYFVVDRSQKLEQSKKELTLWEKNEVSVVVSLVTMIAPSAFDLIAALEMYHPRTTLRFQLARVLVLYLGNLYSLIIALLDKVNSMSIEEMATKNNTSHWIDSTTFFATRTAPEEEKWSTSRPGMGLRRNNTWALEETSISAYTMPLIKANKTSLHTQSPQDQCWETYVGQEMLKLSIIDMLFTVASILLIDFFRGLFVRYLSDYWCWDLESKFPEYGEFKIAENVLHLVYNQGMIWMGAFFSPCLPAFNVLKLIGLMYLRSWAVLTCNVPHQQVFRASRSNNFYLAMLLFMLFLCMLPTIFAIVRYKPSLNCGPFSGQEKIYDIVSETIEKDFPVWFGSVVGHISSPVVILPAVLLLFMLIYYLQSIARSLKLSNHQLKMQIQNASIS

SEQ ID NO: 5539 - protein, 430 aa, Homo sapiens
MKPSLLCRPLSCFLMLLPWPLATLTSTTLWQCPPGEEPDLDPGQGTLCRPCPPGTFSAAWGSSPCQPHARCSLWRRLEAQVGMATRDTLCGDCWPGWFGPWGVPRVPCQPCSWAPLGTHGCDEWGRRARRGVEVAAGASSGGETRQPGNGTRAGGPEETAAQYAVIAIVPVFCLMGLLGILVCNLLKRKGYHCTAHKEVGPGPGGGGSGINPAYRTEDANEDTIGVLVRLITEKKENAAALEELLKEYHSKQLVQTSHRPVSKLPPAPPNVPHICPHRHHLHTVQGLASLSGPCCSRCSQKKWPEVLLSPEAVAATTPVPSLLPNPTRVPKAGAKAGRQGEITILSVGRFRVARIPEQRTSSMVSEVKTITEAGPSWGDLPDSPQPGLPPEQQALLGSGGSRTKWLKPPAENKAEENRYVVRLSESNLVI

SEQ ID NO: 5540 - protein, 382 aa, Homo sapiens
MAPRAGQPGLQGLLLVAAALSQPAAPCPFQCYCFGGPKLLLRCASGAELRQPPRDVPPDARNLTIVGANLTVLRAAAFAGGDGDGDQAAGVRLPLLSALRLTHNHIEVVEDGAFDGLPSLAALDLSHNPLRALGGGAFRGLPALRSLQLNHALVRGGPALLAALDAALAPLAELRLLGLAGNALSRLPPAALRLARLEQLDVRLNALAGLDPDELRALERDGGLPGPRLLLADNPLRCGCAARPLLAWLRNATERVPDSRRLRCAAPRALLDRPLLDLDGARLRCADSGADARGEEAEAAGPELEASYVFFGLVLALIGLIFLMVLYLNRRGIQRWMRNLREACRDQMEGYHYRYEQDADPRRAPAPAAPAGSRATSPGSGL

SEQ ID NO: 5541 - protein, 234 aa, Homo sapiens
MRKTRLWGLLWMLFVSELRAATKLTEEKYELKEGQTLDVKCDYTLEKFASSQKAWQIIRDGEMPKTLACTERPSKNSHPVQVGRIILEDYHDHGLLRVRMVNLQVEDSGLYQCVIYQPPKEPHMLFDRIRLVVTKGFSGTPGSNENSTQNVYKIPPTTTKALCPLYTSPRTVTQAPPKSTADVSTPDSEINLTNVTDIIRVPVFNIVILLAGGFLSKSLVFSVLFAVTLRSFVP

SEQ ID NO: 5542 - protein, 150 aa, Homo sapiens
MRKTRLWGLLWMLFVSELRAATKLTEEKYELKEGQTLDVKCDYTLEKFASSQKAWQIIRDGEMPKTLACTERPSKNSHPVQVGRIILEDYHDHGLLRVRMVNLQVEDSGLYQCVIYQPPKEPHMLFDRIRLVVTKGFRCSTLSFSWLVDS

SEQ ID NO: 5543 - protein, 225 aa, Homo sapiens
MRKTRLWGLLWMLFVSELRAATKLTEEKYELKEGQTLDVKCDYTLEKFASSQKAWQIIRDGEMPKTLACTERPSKNSHPVQVGRIILEDYHDHGLLRVRMVNLQVEDSGLYQCVIYQPPKEPHMLFDRIRLVVTKGFSGTPGSNENSTQNVYKIPPTTTKALCPLYTSPRTVTQAPPKSTADVSTPDSEINLTNVTDIIRYSFQVPGPLVWTLSPLFPSLCAERM

SEQ ID NO: 5544 - protein, 79 aa, Homo sapiens
MELEAMSRYTSPVNPAVFPHLTVVLLAIGMFFTAWFFVYEVTSTKYTRDIYKELLISLVASLFMGFGVLFLLLWVGIYV

SEQ ID NO: 5545 - protein, 222 aa, Homo sapiens
MCLRLGGLSVGDFRKVLMKTGLVLVVLGHVSFITAALFHGTVLRYVGTPQDAVALQYCVVNILSVTSAIVVITSGIAAIVLSRYLPSTPLRWTVFSSSVACALLSLTCALGLLASIAMTFATQGKALLAACTFGSSELLALAPDCPFDPTRIYSSSLCLWGIALVLCVAENVFAVRCAQLTHQLLELRPWWGKSSHHMMRENPELVEGRDLLSCTSSEPLTL

SEQ ID NO: 5546 - protein, 202 aa, Homo sapiens
MCLRLGGLSVGDFRKVLMKTGLVLVVLGHVSFITAALFHGTVLRYVGTPQDAVALQYCVVNILSVTSAIVRWTVFSSSVACALLSLTCALGLLASIAMTFATQGKALLAACTFGSSELLALAPDCPFDPTRIYSSSLCLWGIALVLCVAENVFAVRCAQLTHQLLELRPWWGKSSHHMMRENPELVEGRDLLSCTSSEPLTL

SEQ ID NO: 5547 - protein, 169 aa, Homo sapiens
MCLRLGGLSVGDFRKVLMKTGLVLVVLGHVSFITAALFHGTVLRYVGTPQDAVALQYCVVNILSVTSAIVGKALLAACTFGSSELLALAPDCPFDPTRIYSSSLCLWGIALVLCVAENVFAVRCAQLTHQLLELRPWWGKSSHHMMRENPELVEGRDLLSCTSSEPLTL

SEQ ID NO: 5548 - protein, 871 aa, Homo sapiens
MADSSEGPRAGPGEVAELPGDESGTPGGEAFPLSSLANLFEGEDGSLSPSPADASRPAGPGDGRPNLRMKFQGAFRKGVPNPIDLLESTLYESSVVPGPKKAPMDSLFDYGTYRHHSSDNKRWRKKIIEKQPQSPKAPAPQPPPILKVFNRPILFDIVSRGSTADLDGLLPFLLTHKKRLTDEEFREPSTGKTCLPKALLNLSNGRNDTIPVLLDIAERTGNMREFINSPFRDIYYRGQTALHIAIERRCKHYVELLVAQGADVHAQARGRFFQPKDEGGYFYFGELPLSLAACTNQPHIVNYLTENPHKKADMRRQDSRGNTVLHALVAIADNTRENTKFVTKMYDLLLLKCARLFPDSNLEAVLNNDGLSPLMMAAKTGKIGIFQHIIRREVTDEDTRHLSRKFKDWAYGPVYSSLYDLSSLDTCGEEASVLEILVYNSKIENRHEMLAVEPINELLRDKWRKFGAVSFYINVVSYLCAMVIFTLTAYYQPLEGTPPYPYRTTVDYLRLAGEVITLFTGVLFFFTNIKDLFMKKCPGVNSLFIDGSFQLLYFIYSVLVIVSAALYLAGIEAYLAVMVFALVLGWMNALYFTRGLKLTGTYSIMIQKILFKDLFRFLLVYLLFMIGYASALVSLLNPCANMKVCNEDQTNCTVPTYPSCRDSETFSTFLLDLFKLTIGMGDLEMLSSTKYPVVFIILLVTYIILTFVLLLNMLIALMGETVGQVSKESKHIWKLQWATTILDIERSFPVFLRKAFRSGEMVTVGKSSDGTPDRRWCFRVDEVNWSHWNQNLGIINEDPGKNETYQYYGFSHTVGRLRRDRWSSVVPRVVELNKNSNPDEVVVPLDSMGNPRCDGHQQGYPRKWRTDDAPL

SEQ ID NO: 5549 - protein, 811 aa, Homo sapiens
MADSSEGPRAGPGEVAELPGDESGTPGGEAFPLSSLANLFEGEDGSLSPSPADASRPAGPGDGRPNLRMKFQGAFRKGVPNPIDLLESTLYESSVVPGPKKAPMDSLFDYGTYRHHSSDNKRWRKKIIEKQPQSPKAPAPQPPPILKVFNRPILFDIVSRGSTADLDGLLPFLLTHKKRLTDEEFREPSTGKTCLPKALLNLSNGRNDTIPVLLDIAERTGNMREFINSPFRDIYYRGQTALHIAIERRCKHYVELLVAQGADVHAQARGRFFQPKDEGGYFYFGELPLSLAACTNQPHIVNYLTENPHKKADMRRQDSRGNTVLHALVAIADNTRENTKFVTKMYDLLLLKCARLFPDSNLEAVLNNDGLSPLMMAAKTGKIGNRHEMLAVEPINELLRDKWRKFGAVSFYINVVSYLCAMVIFTLTAYYQPLEGTPPYPYRTTVDYLRLAGEVITLFTGVLFFFTNIKDLFMKKCPGVNSLFIDGSFQLLYFIYSVLVIVSAALYLAGIEAYLAVMVFALVLGWMNALYFTRGLKLTGTYSIMIQKILFKDLFRFLLVYLLFMIGYASALVSLLNPCANMKVCNEDQTNCTVPTYPSCRDSETFSTFLLDLFKLTIGMGDLEMLSSTKYPVVFIILLVTYIILTFVLLLNMLIALMGETVGQVSKESKHIWKLQWATTILDIERSFPVFLRKAFRSGEMVTVGKSSDGTPDRRWCFRVDEVNWSHWNQNLGIINEDPGKNETYQYYGFSHTVGRLRRDRWSSVVPRVVELNKNSNPDEVVVPLDSMGNPRCDGHQQGYPRKWRTDDAPL

SEQ ID NO: 5550 - protein, 853 aa, Homo sapiens
MADSSEGPRAGPGEVAELPGDESGTPGGEAFPLSSLANLFEGEDGSLSPSPADASRPAGPGDGRPNLRMKFQGAFRKGVPNPIDLLESTLYESSVVPGPKKAPMDSLFDYGTYRHHSSDNKRWRKKIIEKQPQSPKAPAPQPPPILKVFNRPILFDIVSRGSTADLDGLLPFLLTHKKRLTDEEFREPSTGKTCLPKALLNLSNGRNDTIPVLLDIAERTGNMREFINSPFRDIYYRGQTALHIAIERRCKHYVELLVAQGADVHAQARGRFFQPKDEGGYFYFGELPLSLAACTNQPHIVNYLTENPHKKADMRRQDSRGNTVLHALVAIADNTRENTKFVTKMYDLLLLKCARLFPDSNLEAVLNNDGLSPLMMAAKTGKIGIFQHIIRREVTDEDTRHLSRKFKDWAYGPVYSSLYDLSSLDTCGEEASVLEILVYNSKIENRHEMLAVEPINELLRDKWRKFGAVSFYINVVSYLCAMVIFTLTAYYQPLEGTPPYPYRTTVDYLRLAGEVITLFTGVLFFFTNIKDLFMKKCPGVNSLFIDGSFQLLYFIYSVLVIVSAALYLAGIEAYLAVMVFALVLGWMNALYFTRGLKLTGTYSIMIQKILFKDLFRFLLVYLLFMIGYASALVSLLNPCANMKVCNEDQTNCTVPTYPSCRDSETFSTFLLDLFKLTIGMGDLEMLSSTKYPVVFIILLVTYIILTFVLLLNMLIALMGETVGQVSKESKHIWKLQWATTILDIERSFPVFLRKAFRSGEMVTVGKSSDGTPDRRWCFRVDEVNWSHWNQNLGIINEDPGKNETYQYYGFSHTVGRLRRDRWSSVVPRVVELNKNSNPDEVVVRHLCRVRRKR

SEQ ID NO: 5551 - protein, 824 aa, Homo sapiens
MADSSEGPRAGPGEVAELPGDESGTPGGEAFPLSSLANLFEGEDGSLSPSPADASRPAGPGDGRPNLRMKFQGAFRKGVPNPIDLLESTLYESSVVPGPKKAPMDSLFDYGTYRHHSSDNKRWRKKIIEKQPQSPKAPAPQPPPILKVFNRPILFDIVSRGSTADLDGLLPFLLTHKKRLTDEEFREPSTGKTCLPKALLNLSNGRNDTIPVLLDIAERTGNMREFINSPFRDIYYRGELPLSLAACTNQPHIVNYLTENPHKKADMRRQDSRGNTVLHALVAIADNTRENTKFVTKMYDLLLLKCARLFPDSNLEAVLNNDGLSPLMMAAKTGKIGIFQHIIRREVTDEDTRHLSRKFKDWAYGPVYSSLYDLSSLDTCGEEASVLEILVYNSKIENRHEMLAVEPINELLRDKWRKFGAVSFYINVVSYLCAMVIFTLTAYYQPLEGTPPYPYRTTVDYLRLAGEVITLFTGVLFFFTNIKDLFMKKCPGVNSLFIDGSFQLLYFIYSVLVIVSAALYLAGIEAYLAVMVFALVLGWMNALYFTRGLKLTGTYSIMIQKILFKDLFRFLLVYLLFMIGYASALVSLLNPCANMKVCNEDQTNCTVPTYPSCRDSETFSTFLLDLFKLTIGMGDLEMLSSTKYPVVFIILLVTYIILTFVLLLNMLIALMGETVGQVSKESKHIWKLQWATTILDIERSFPVFLRKAFRSGEMVTVGKSSDGTPDRRWCFRVDEVNWSHWNQNLGIINEDPGKNETYQYYGFSHTVGRLRRDRWSSVVPRVVELNKNSNPDEVVVPLDSMGNPRCDGHQQGYPRKWRTDDAPL

SEQ ID NO: 5552 - protein, 837 aa, Homo sapiens
MADSSEGPRAGPGEVAELPGDESGTPGDGRPNLRMKFQGAFRKGVPNPIDLLESTLYESSVVPGPKKAPMDSLFDYGTYRHHSSDNKRWRKKIIEKQPQSPKAPAPQPPPILKVFNRPILFDIVSRGSTADLDGLLPFLLTHKKRLTDEEFREPSTGKTCLPKALLNLSNGRNDTIPVLLDIAERTGNMREFINSPFRDIYYRGQTALHIAIERRCKHYVELLVAQGADVHAQARGRFFQPKDEGGYFYFGELPLSLAACTNQPHIVNYLTENPHKKADMRRQDSRGNTVLHALVAIADNTRENTKFVTKMYDLLLLKCARLFPDSNLEAVLNNDGLSPLMMAAKTGKIGIFQHIIRREVTDEDTRHLSRKFKDWAYGPVYSSLYDLSSLDTCGEEASVLEILVYNSKIENRHEMLAVEPINELLRDKWRKFGAVSFYINVVSYLCAMVIFTLTAYYQPLEGTPPYPYRTTVDYLRLAGEVITLFTGVLFFFTNIKDLFMKKCPGVNSLFIDGSFQLLYFIYSVLVIVSAALYLAGIEAYLAVMVFALVLGWMNALYFTRGLKLTGTYSIMIQKILFKDLFRFLLVYLLFMIGYASALVSLLNPCANMKVCNEDQTNCTVPTYPSCRDSETFSTFLLDLFKLTIGMGDLEMLSSTKYPVVFIILLVTYIILTFVLLLNMLIALMGETVGQVSKESKHIWKLQWATTILDIERSFPVFLRKAFRSGEMVTVGKSSDGTPDRRWCFRVDEVNWSHWNQNLGIINEDPGKNETYQYYGFSHTVGRLRRDRWSSVVPRVVELNKNSNPDEVVVPLDSMGNPRCDGHQQGYPRKWRTDDAPL

SEQ ID NO: 5553 - protein, 764 aa, Homo sapiens
MADSSEGPRAGPGEVAELPGDESGTPGGEAFPLSSLANLFEGEDGSLSPSPADASRPAGPGDGRPNLRMKFQGAFRKGVPNPIDLLESTLYESSVVPGPKKAPMDSLFDYGTYRHHSSDNKRWRKKIIEKQPQSPKAPAPQPPPILKVFNRPILFDIVSRGSTADLDGLLPFLLTHKKRLTDEEFREPSTGKTCLPKALLNLSNGRNDTIPVLLDIAERTGNMREFINSPFRDIYYRGELPLSLAACTNQPHIVNYLTENPHKKADMRRQDSRGNTVLHALVAIADNTRENTKFVTKMYDLLLLKCARLFPDSNLEAVLNNDGLSPLMMAAKTGKIGNRHEMLAVEPINELLRDKWRKFGAVSFYINVVSYLCAMVIFTLTAYYQPLEGTPPYPYRTTVDYLRLAGEVITLFTGVLFFFTNIKDLFMKKCPGVNSLFIDGSFQLLYFIYSVLVIVSAALYLAGIEAYLAVMVFALVLGWMNALYFTRGLKLTGTYSIMIQKILFKDLFRFLLVYLLFMIGYASALVSLLNPCANMKVCNEDQTNCTVPTYPSCRDSETFSTFLLDLFKLTIGMGDLEMLSSTKYPVVFIILLVTYIILTFVLLLNMLIALMGETVGQVSKESKHIWKLQWATTILDIERSFPVFLRKAFRSGEMVTVGKSSDGTPDRRWCFRVDEVNWSHWNQNLGIINEDPGKNETYQYYGFSHTVGRLRRDRWSSVVPRVVELNKNSNPDEVVVPLDSMGNPRCDGHQQGYPRKWRTDDAPL

SEQ ID NO: 5554 - protein, 89 aa, Homo sapiens
MAAQIPESDQIKQFKEFLGTYNKLTETCFLDCVKDFTTREVKPEETTCSEHCLQKYLKMTQRISMRFQEYHIQQNEALAAKAGLLGQPR

SEQ ID NO: 5555 - protein, 850 aa, Homo sapiens
MEPERKGLSLASSSDGDGREENKLKQGISQDLASSSRLDRYKIARQLTEKAIKEKKIFSIYGHYPVVRAALRRKGWVEKKFHFLPKVIPDVEDEGARVNDDTCAKVKENQEMALEKTDNIHDVMSRLVKNEMPYLLWTIKRDIIDYHSLTYDQMLNHYAKTASFTTKIGLCVNMRSLPWYVPANPDSFFPRCYSLCTESEQQEFLEDFRRTMASSILKWVVSHQSCSRSSRSKPRDQREEAGSSDLSSRQDAENAEAKLRGLPGQLVDIACKVCQAYLGQLEHEDIDTSADAVEDLTEAEWEDLTQQYYSLVHGDAFISNSRNYFSQCQALLNRITSVNPQTDIDGLRNIWIIKPAAKSRGRDIVCMDRVEEILELAAADHPLSRDNKWVVQKYIETPLLICDTKFDIRQWFLVTDWNPLTIWFYKESYLRFSTQRFSLDKLDSAIHLCNNAVQKYLKNDVGRSPLLPAHNMWTSTRFQEYLQRQGRGAVWGSVIYPSMKKAIAHAMKVAQDHVEPRKNSFELYGADFVLGRDFRPWLIEINSSPTMHPSTPVTAQLCAQVQEDTIKVAVDRSCDIGNFELLWRQPVVEPPPFSGSDLCVAGVSVRRARRQVLPVCNLKASASLLDAQPLKARGPSAMPDPAQGPPSPALQRDLGLKEEKGLPLALLAPLRGAAESGGAAQPTRTKAAGKVELPACPCRHVDSQAPNTGVPVAQPAKSWDPNQLNAHPLEPVLRGLKTAEGALRPPPGGKGEGTVCSRLPHHGHHVAACQTTGTTWDGGPGVCFLRQLLASELPMGPGLPRDPRAPPCLVCRGLLPPAGPCKRCRSFCAAVLQGASFVRLGGRSCSPRTP

SEQ ID NO: 5556 - protein, 834 aa, Homo sapiens
MRLLDGKQTSRYSENACEKKIFSIYGHYPVVRAALRRKGWVEKKFHFLPKVIPDVEDEGARVNDDTCAKVKENQEMALEKTDNIHDVMSRLVKNEMPYLLWTIKRDIIDYHSLTYDQMLNHYAKTASFTTKIGLCVNMRSLPWYVPANPDSFFPRCYSLCTESEQQEFLEDFRRTMASSILKWVVSHQSCSRSSRSKPRDQREEAGSSDLSSRQDAENAEAKLRGLPGQLVDIACKVCQAYLGQLEHEDIDTSADAVEDLTEAEWEDLTQQYYSLVQVPLGSSIVLCIFKIQKVMMSFEPPTARDRQCQALLNRITSVNPQTDIDGLRNIWIIKPAAKSRGRGESPDIVCMDRVEEILELAAADHPLSRDNKWVVQKYIETPLLICDTKFDIRQWFLVTDWNPLTIWFYKESYLRFSTQRFSLDKLDSAIHLCNNAVQKYLKNDVGRSPLLPAHNMWTSTRFQEYLQRQGRGAVWGSVIYPSMKKAIAHAMKVAQDHVEPRKNSFELYGADFVLGRDFRPWLIEINSSPTMHPSTPVTAQLCAQVQEDTIKVAVDRSCDIGNFELLWRQPVVEPPPFSGSDLCVAGVSVRRARRQVLPVCNLKASASLLDAQPLKARGPSAMPDPAQGPPSPALQRDLGLKEEKGLPLALLAPLRGAAESGGAAQPTRTKAAGKVELPACPCRHVDSQAPNTGVPVAQPAKSWDPNQLNAHPLEPVLRGLKTAEGALRPPPGGKGEGTVCSRLPHHGHHVAACQTTGTTWDGGPGVCFLRQLLASELPMGPGLPRDPRAPPCLVCRGLLPPAGPCKRCRSFCAAVLQGASFVRLGGRSCSPRTP

SEQ ID NO: 5557 - protein, 3859 aa, Homo sapiens
MAFVATQGATVVDQTTLMKKYLQFVAALTDVNTPDETKLKMMQEVSENFENVTSSPQYSTFLEHIIPRFLTFLQDGEVQFLQEKPAQQLRKLVLEIIHRIPTNEHLRPHTKNVLSVMFRFLETENEENVLICLRIIIELHKQFRPPITQEIHHFLDFVKQIYKELPKVVNRYFENPQVIPENTVPPPEMVGMITTIAVKVNPEREDSETRTHSIIPRGSLSLKVLAELPIIVVLMYQLYKLNIHNVVAEFVPLIMNTIAIQVSAQARQHKLYNKELYADFIAAQIKTLSFLAYIIRIYQELVTKYSQQMVKGMLQLLSNCPAETAHLRKELLIAAKHILTTELRNQFIPCMDKLFDESILIGSGYTARETLRPLAYSTLADLVHHVRQHLPLSDLSLAVQLFAKNIDDESLPSSIQTMSCKLLLNLVDCIRSKSEQESGNGRDVLMRMLEVFVLKFHTIARYQLSAIFKKCKPQSELGAVEAALPGVPTAPAAPGPAPSPAPVPAPPPPPPPPPPATPVTPAPVPPFEKQGEKDKEDKQTFQVTDCRSLVKTLVCGVKTITWGITSCKAPGEAQFIPNKQLQPKETQIYIKLVKYAMQALDIYQVQIAGNGQTYIRVANCQTVRMKEEKEVLEHFAGVFTMMNPLTFKEIFQTTVPYMVERISKNYALQIVANSFLANPTTSALFATILVEYLLDRLPEMGSNVELSNLYLKLFKLVFGSVSLFAAENEQMLKPHLHKIVNSSMELAQTAKEPYNYFLLLRALFRSIGGGSHDLLYQEFLPLLPNLLQGLNMLQSGLHKQHMKDLFVELCLTVPVRLSSLLPYLPMLMDPLVSALNGSQTLVSQGLRTLELCVDNLQPDFLYDHIQPVRAELMQALWRTLRNPADSISHVAYRVLGKFGGSNRKMLKESQKLHYVVTEVQGPSITVEFSDCKASLQLPMEKAIETALDCLKSANTEPYYRRQAWEVIKCFLVAMMSLEDNKHALYQLLAHPNFTEKTIPNVIISHRYKAQDTPARKTFEQALTGAFMSAVIKDLRPSALPFVASLIRHYTMVAVAQQCGPFLLPCYQVGSQPSTAMFHSEENGSKGMDPLVLIDAIAICMAYEEKELCKIGEVALAVIFDVASIILGSKERACQLPLFSYIVERLCACCYEQAWYAKLGGVVSIKFLMERLPLTWVLQNQQTFLKALLFVMMDLTGEVSNGAVAMAKTTLEQLLMRCATPLKDEERAEEIVAAQEKSFHHVTHDLVREVTSPNSTVRKQAMHSLQVLAQVTGKSVTVIMEPHKEVLQDMVPPKKHLLRHQPANAQIGLMEGNTFCTTLQPRLFTMDLNVVEHKVFYTELLNLCEAEDSALTKLPCYKSLPSLVPLRIAALNALAACNYLPQSREKIIAALFKALNSTNSELQEAGEACMRKFLEGATIEVDQIHTHMRPLLMMLGDYRSLTLNVVNRLTSVTRLFPNSFNDKFCDQMMQHLRKWMEVVVITHKGGQRSDGNESISECGRCPLSPFCQFEEMKICSAIINLFHLIPAAPQTLVKPLLEVVMKTERAMLIEAGSPFREPLIKFLTRHPSQTVELFMMEATLNDPQWSRMFMSFLKHKDARPLRDVLAANPNRFITLLLPGGAQTAVRPGSPSTSTMRLDLQFQAIKIISIIVKNDDSWLASQHSLVSQLRRVWVSENFQERHRKENMAATNWKEPKLLAYCLLNYCKRNYGDIELLFQLLRAFTGRFLCNMTFLKEYMEEEIPKNYSIAQKRALFFRFVDFNDPNFGDELKAKVLQHILNPAFLYSFEKGEGEQLLGPPNPEGDNPESITSVFITKVLDPEKQADMLDSLRIYLLQYATLLVEHAPHHIHDNNKNRNSKLRRLMTFAWPCLLSKACVDPACKYSGHLLLAHIIAKFAIHKKIVLQVFHSLLKAHAMEARAIVRQAMAILTPAVPARMEDGHQMLTHWTRKIIVEEGHTVPQLVHILHLIVQHFKVYYPVRHHLVQHMVSAMQRLGFTPSVTIEQRRLAVDLSEVVIKWELQRIKDQQPDSDMDPNSSGEGVNSVSSSIKRGLSVDSAQEVKRFRTATGAISAVFGRSQSLPGADSLLAKPIDKQHTDTVVNFLIRVACQVNDNTNTAGSPGEVLSRRCVNLLKTALRPDMWPKSELKLQWFDKLLMTVEQPNQVNYGNICTGLEVLSFLLTVLQSPAILSSFKPLQRGIAACMTCGNTKVLRAVHSLLSRLMSIFPTEPSTSSVASKYEELECLYAAVGKVIYEGLTNYEKATNANPSQLFGTLMILKSACSNNPSYIDRLISVFMRSLQKMVREHLNPQAASGSTEATSGTSELVMLSLELVKTRLAVMSMEMRKNFIQAILTSLIEKSPDAKILRAVVKIVEEWVKNNSPMAANQTPTLREKSILLVKMMTYIEKRFPEDLELNAQFLDLVNYVYRDETLSGSELTAKLEPAFLSGLRCAQPLIRAKFFEVFDNSMKRRVYERLLYVTCSQNWEAMGNHFWIKQCIELLLAVCEKSTPIGTSCQGAMLPSITNVINLADSHDRAAFAMVTHVKQEPRERENSESKEEDVEIDIELAPGDQTSTPKTKELSEKDIGNQLHMLTNRHDKFLDTLREVKTGALLSAFVQLCHISTTLAEKTWVQLFPRLWKILSDRQQHALAGEISPFLCSGSHQVQRDCQPSALNCFVEAMSQCVPPIPIRPCVLKYLGKTHNLWFRSTLMLEHQAFEKGLSLQIKPKQTTEFYEQESITPPQQEILDSLAELYSLLQEEDMWAGLWQKRCKYSETATAIAYEQHGFFEQAQESYEKAMDKAKKEHERSNASPAIFPEYQLWEDHWIRCSKELNQWEALTEYGQSKGHINPYLVLECAWRVSNWTAMKEALVQVEVSCPKEMAWKVNMYRGYLAICHPEEQQLSFIERLVEMASSLAIREWRRLPHVVSHVHTPLLQAAQQIIELQEAAQINAGLQPTNLGRNNSLHDMKTVVKTWRNRLPIVSDDLSHWSSIFMWRQHHYQGKPTWSGMHSSSIVTAYENSSQHDPSSNNAMLGVHASASAIIQYGKIARKQGLVNVALDILSRIHTIPTVPIVDCFQKIRQQVKCYLQLAGVMGKNECMQGLEVIESTNLKYFTKEMTAEFYALKGMFLAQINKSEEANKAFSAAVQMHDVLVKAWAMWGDYLENIFVKERQLHLGVSAITCYLHACRHQNESKSRKYLAKVLWLLSFDDDKNTLADAVDKYCIGVPPIQWLAWIPQLLTCLVGSEGKLLLNLISQVGRVYPQAVYFPIRTLYLTLKIEQRERYKSDPGPIRATAPMWRCSRIMHMQRELHPTLLSSLEGIVDQMVWFRENWHEEVLRQLQQGLAKCYSVAFEKSGAVSDAKITPHTLNFVKKLVSTFGVGLENVSNVSTMFSSAASESLARRAQATAQDPVFQKLKGQFTTDFDFSVPGSMKLHNLISKLKKWIKILEAKTKQLPKFFLIEEKCRFLSNFSAQTAEVEIPGEFLMPKPTHYYIKIARFMPRVEIVQKHNTAARRLYIRGHNGKIYPYLVMNDACLTESRREERVLQLLRLLNPCLEKRKETTKRHLFFTVPRVVAVSPQMRLVEDNPSSLSLVEIYKQRCAKKGIEHDNPISRYYDRLATVQARGTQASHQVLRDILKEVQSNMVPRSMLKEWALHTFPNATDYWTFRKMFTIQLALIGFAEFVLHLNRLNPEMLQIAQDTGKLNVAYFRFDINDATGDLDANRPVPFRLTPNISEFLTTIGVSGPLTASMIAVARCFAQPNFKVDGILKTVLRDEIIAWHKKTQEDTSSPLSAAGQPENMDSQQLVSLVQKAVTAIMTRLHNLAQFEGGESKVNTLVAAANSLDNLCRMDPAWHPWL

SEQ ID NO: 5558 - protein, 3830 aa, Homo sapiens
MAFVATQGATVVDQTTLMKKYLQFVAALTDVNTPDETKLKMMQEVSENFENVTSSPQYSTFLEHIIPRFLTFLQDGEVQFLQEKPAQQLRKLVLEIIHRIPTNEHLRPHTKNVLSVMFRFLETENEENVLICLRIIIELHKQFRPPITQEIHHFLDFVKQIYKELPKVVNRYFENPQVIPENTVPPPEMVGMITTIAVKVNPEREDSETRTHSIIPRGSLSLKVLAELPIIVVLMYQLYKLNIHNVVAEFVPLIMNTIAIQVSAQARQHKLYNKELYADFIAAQIKTLSFLAYIIRIYQELVTKYSQQMVKGMLQLLSNCPAETAHLRKELLIAAKHILTTELRNQFIPCMDKLFDESILIGSGYTARETLRPLAYSTLADLVHHVRQHLPLSDLSLAVQLFAKNIDDESLPSSIQTMSCKLLLNLVDCIRSKSEQESGNGRDVLMRMLEVFVLKFHTIARYQLSAIFKKCKPQSELGAVEAALPGVPTAPAAPGPAPSPAPVPAPPPPPPPPPPATPVTPAPVPPFEKQGEKDKEDKQTFQVTDCRSLVKTLVCGVKTITWGITSCKAPGEAQFIPNKQLQPKETQIYIKLVKYAMQALDIYQVQIAGNGQTYIRVANCQTVRMKEEKEVLEHFAGVFTMMNPLTFKEIFQTTVPYMVERISKNYALQIVANSFLANPTTSALFATILVEYLLDRLPEMGSNVELSNLYLKLFKLVFGSVSLFAAENEQMLKPHLHKIVNSSMELAQTAKEPYNYFLLLRALFRSIGGGSHDLLYQEFLPLLPNLLQGLNMLQSGLHKQHMKDLFVELCLTVPVRLSSLLPYLPMLMDPLVSALNGSQTLVSQGLRTLELCVDNLQPDFLYDHIQPVRAELMQALWRTLRNPADSISHVAYRVLGKFGGSNRKMLKESQKLHYVVTEVQGPSITVEFSDCKASLQLPMEKAIETALDCLKSANTEPYYRRQAWEVIKCFLVAMMSLEDNKHALYQLLAHPNFTEKTIPNVIISHRYKAQDTPARKTFEQALTGAFMSAVIKDLRPSALPFVASLIRHYTMVAVAQQCGPFLLPCYQVGSQPSTAMFHSEENGSKGMDPLVLIDAIAICMAYEEKELCKIGEVALAVIFDVASIILGSKERACQLPLFSYIVERLCACCYEQAWYAKLGGVVSIKFLMERLPLTWVLQNQQTFLKALLFVMMDLTGEVSNGAVAMAKTTLEQLLMRCATPLKDEERAEEIVAAQEKSFHHVTHDLVREVTSPNSTVRKQAMHSLQVLAQVTGKSVTVIMEPHKEVLQDMVPPKKHLLRHQPANAQIGLMEGNTFCTTLQPRLFTMDLNVVEHKVFYTELLNLCEAEDSALTKLPCYKSLPSLVPLRIAALNALAACNYLPQSREKIIAALFKALNSTNSELQEAGEACMRKFLEGATIEVDQIHTHMRPLLMMLGDYRSLTLNVVNRLTSVTRLFPNSFNDKFCDQMMQHLRKWMEVVVITHKGGQRSDGNEMKICSAIINLFHLIPAAPQTLVKPLLEVVMKTERAMLIEAGSPFREPLIKFLTRHPSQTVELFMMEATLNDPQWSRMFMSFLKHKDARPLRDVLAANPNRFITLLLPGGAQTAVRPGSPSTSTMRLDLQFQAIKIISIIVKNDDSWLASQHSLVSQLRRVWVSENFQERHRKENMAATNWKEPKLLAYCLLNYCKRNYGDIELLFQLLRAFTGRFLCNMTFLKEYMEEEIPKNYSIAQKRALFFRFVDFNDPNFGDELKAKVLQHILNPAFLYSFEKGEGEQLLGPPNPEGDNPESITSVFITKVLDPEKQADMLDSLRIYLLQYATLLVEHAPHHIHDNNKNRNSKLRRLMTFAWPCLLSKACVDPACKYSGHLLLAHIIAKFAIHKKIVLQVFHSLLKAHAMEARAIVRQAMAILTPAVPARMEDGHQMLTHWTRKIIVEEGHTVPQLVHILHLIVQHFKVYYPVRHHLVQHMVSAMQRLGFTPSVTIEQRRLAVDLSEVVIKWELQRIKDQQPDSDMDPNSSGEGVNSVSSSIKRGLSVDSAQEVKRFRTATGAISAVFGRSQSLPGADSLLAKPIDKQHTDTVVNFLIRVACQVNDNTNTAGSPGEVLSRRCVNLLKTALRPDMWPKSELKLQWFDKLLMTVEQPNQVNYGNICTGLEVLSFLLTVLQSPAILSSFKPLQRGIAACMTCGNTKVLRAVHSLLSRLMSIFPTEPSTSSVASKYEELECLYAAVGKVIYEGLTNYEKATNANPSQLFGTLMILKSACSNNPSYIDRLISVFMRSLQKMVREHLNPQAASGSTEATSGTSELVMLSLELVKTRLAVMSMEMRKNFIQAILTSLIEKSPDAKILRAVVKIVEEWVKNNSPMAANQTPTLREKSILLVKMMTYIEKRFPEDLELNAQFLDLVNYVYRDETLSGSELTAKLEPAFLSGLRCAQPLIRAKFFEVFDNSMKRRVYERLLYVTCSQNWEAMGNHFWIKQCIELLLAVCEKSTPIGTSCQGAMLPSITNVINLADSHDRAAFAMVTHVKQEPRERENSESKEEDVEIDIELAPGDQTSTPKTKELSEKDIGNQLHMLTNRHDKFLDTLREVKTGALLSAFVQLCHISTTLAEKTWVQLFPRLWKILSDRQQHALAGEISPFLCSGSHQVQRDCQPSALNCFVEAMSQCVPPIPIRPCVLKYLGKTHNLWFRSTLMLEHQAFEKGLSLQIKPKQTTEFYEQESITPPQQEILDSLAELYSLLQEEDMWAGLWQKRCKYSETATAIAYEQHGFFEQAQESYEKAMDKAKKEHERSNASPAIFPEYQLWEDHWIRCSKELNQWEALTEYGQSKGHINPYLVLECAWRVSNWTAMKEALVQVEVSCPKEMAWKVNMYRGYLAICHPEEQQLSFIERLVEMASSLAIREWRRLPHVVSHVHTPLLQAAQQIIELQEAAQINAGLQPTNLGRNNSLHDMKTVVKTWRNRLPIVSDDLSHWSSIFMWRQHHYQAIVTAYENSSQHDPSSNNAMLGVHASASAIIQYGKIARKQGLVNVALDILSRIHTIPTVPIVDCFQKIRQQVKCYLQLAGVMGKNECMQGLEVIESTNLKYFTKEMTAEFYALKGMFLAQINKSEEANKAFSAAVQMHDVLVKAWAMWGDYLENIFVKERQLHLGVSAITCYLHACRHQNESKSRKYLAKVLWLLSFDDDKNTLADAVDKYCIGVPPIQWLAWIPQLLTCLVGSEGKLLLNLISQVGRVYPQAVYFPIRTLYLTLKIEQRERYKSDPGPIRATAPMWRCSRIMHMQRELHPTLLSSLEGIVDQMVWFRENWHEEVLRQLQQGLAKCYSVAFEKSGAVSDAKITPHTLNFVKKLVSTFGVGLENVSNVSTMFSSAASESLARRAQATAQDPVFQKLKGQFTTDFDFSVPGSMKLHNLISKLKKWIKILEAKTKQLPKFFLIEEKCRFLSNFSAQTAEVEIPGEFLMPKPTHYYIKIARFMPRVEIVQKHNTAARRLYIRGHNGKIYPYLVMNDACLTESRREERVLQLLRLLNPCLEKRKETTKRHLFFTVPRVVAVSPQMRLVEDNPSSLSLVEIYKQRCAKKGIEHDNPISRYYDRLATVQARGTQASHQVLRDILKEVQSNMVPRSMLKEWALHTFPNATDYWTFRKMFTIQLALIGFAEFVLHLNRLNPEMLQIAQDTGKLNVAYFRFDINDATGDLDANRPVPFRLTPNISEFLTTIGVSGPLTASMIAVARCFAQPNFKVDGILKTVLRDEIIAWHKKTQEDTSSPLSAAGQPENMDSQQLVSLVQKAVTAIMTRLHNLAQFEGGESKVNTLVAAANSLDNLCRMDPAWHPWL

SEQ ID NO: 5559 - protein, 566 aa, Homo sapiens
MLQRSPRAGPSRAQGRREAAETGGPTTQEGVACGVHQLATLLMELDSEDEASRLLAADALYRLGRLEETHKALLVALSRRPQAAPVLARLALLQLRRGFFYDANQLVKKLVQSGDTACLQPTLDVFCHEDRQLLQGHCHARALAILRARPGGADGRVHTKEAIAYLSLAIFAAGSQASESLLARARCYGFLGQKKTAMFDFNTVLRAEPGNVQALCGRALVHLALDQLQEAVDDIVSALKLGPGTVVPELRSLKPEAQALITQGLYSHCRALLSQLPDTGAPLEDKDTQGLLAVGEALIKIDSGQPHWHLLLADILMAQGSYEEAGTHLEKALHRAPTSEAARARLGLLQLKKGDVPGAARDLQSLAEVDAPDLSCLLHLLEASERQSLAQAAAQEAGTLLDAGQPRQALGYCSLSVLASGSSACHLRLRATCLAELQEFGRALRDLDHVLQEALGDGDLPRRAEDFCRQGRLLLSLGDEAAAAGAFAQALKLAPSLAQNSLCRQPGRAPTARMFLLRGQCCLEEQRHAEAWTAVESGLLVDPDHRGLKRLKARIRREASSGCWLQ

SEQ ID NO: 5560 - protein, 583 aa, Homo sapiens
MAGSEQQRPRRRDDGDSDAAAAAAAPLQDAELALAGINMLLNNGFRESDQLFKQYRNHSPLMSFGASFVSFLNAMMTFEEEKMQLACDDLKTTEKLCESEEAGVIETIKNKIKKNVDVRKSAPSMVDRLQRQIIIADCQVYLAVLSFVKQELSAYIKGGWILRKAWKIYNKCYLDINALQELYQKKLTEESLTSDAANDNHIVAEGVSEESLNRLKGAVSFGYGLFHLCISMVPPNLLKIINLLGFPGDRLQGLSSLMYASESKDMKAPLATLALLWYHTVVRPFFALDGSDNKAGLDEAKEILLKKEAAYPNSSLFMFFKGRIQRLECQINSALTSFHTALELAVDQREIQHVCLYEIGWCSMIELNFKDAFDSFERLKNESRWSQCYYAYLTAVCQGATGDVDGAQIVFKEVQKLFKRKNNQIEQFSVKKAERFRKQTPTKALCVLASIEVLYLWKALPNCSFPNLQRMSQACHEVDDSSVVGLKYLLLGAIHKCLGNSEDAVQYFQRAVKDELCRQNNLYVQPYACYELGCLLLDKPETVGRGRALLLQAKEDFSGYDFENRLHVRIHAALASLRELVPQ

SEQ ID NO: 5561 - protein, 522 aa, Homo sapiens
MSFGASFVSFLNAMMTFEEEKMQLACDDLKTTEKLCESEEAGVIETIKNKIKKNVDVRKSAPSMVDRLQRQIIIADCQVYLAVLSFVKQELSAYIKGGWILRKAWKIYNKCYLDINALQELYQKKLTEESLTSDAANDNHIVAEGVSEESLNRLKGAVSFGYGLFHLCISMVPPNLLKIINLLGFPGDRLQGLSSLMYASESKDMKAPLATLALLWYHTVVRPFFALDGSDNKAGLDEAKEILLKKEAAYPNSSLFMFFKGRIQRLECQINSALTSFHTALELAVDQREIQHVCLYEIGWCSMIELNFKDAFDSFERLKNESRWSQCYYAYLTAVCQGATGDVDGAQIVFKEVQKLFKRKNNQIEQFSVKKAERFRKQTPTKALCVLASIEVLYLWKALPNCSFPNLQRMSQACHEVDDSSVVGLKYLLLGAIHKCLGNSEDAVQYFQRAVKDELCRQNNLYVQPYACYELGCLLLDKPETVGRGRALLLQAKEDFSGYDFENRLHVRIHAALASLRELVPQ

SEQ ID NO: 5562 - protein, 76 aa, Homo sapiens
MAGSEQQRPRRRDDGDSDAAAAAAAPLQDAELALAGINMLLNNGFRESDQLFKQYRKSFLTSEKTSALPGETQRRL

SEQ ID NO: 5563 - protein, 798 aa, Homo sapiens
MALHSPQYIFGDFSPDEFNQFFVTPRSSVELPPYSGTVLCGTQAVDKLPDGQEYQRIEFGVDEVIEPSDTLPRTPSYSISSTLNPQAPEFILGCTASKITPDGITKEASYGSIDCQYPGSALALDGSSNVEAEVLENDGVSGGLGQRERKKKKKRPPGYYSYLKDGGDDSISTEALVNGHANSAVPNSVSAEDAEFMGDMPPSVTPRTCNSPQNSTDSVSDIVPDSPFPGALGSDTRTAGQPEGGPGADFGQSCFPAEAGRDTLSRTAGAQPCVGTDTTENLGVANGQILESSGEGTATNGVELHTTESIDLDPTKPESASPPADGTGSASGTLPVSQPKSWASLFHDSKPSSSSPVAYVETKYSPPAISPLVSEKQVEVKEGLVPVSEDPVAIKIAELLENVTLIHKPVSLQPRGLINKGNWCYINATLQALVACPPMYHLMKFIPLYSKVQRPCTSTPMIDSFVRLMNEFTNMPVPPKPRQALGDKIVRDIRPGAAFEPTYIYRLLTVNKSSLSEKGRQEDAEEYLGFILNGLHEEMLNLKKLLSPSNEKLTISNGPKNHSVNEEEQEEQGEGSEDEWEQVGPRNKTSVTRQADFVQTPITGIFGGHIRSVVYQQSSKESATLQPFFTLQLDIQSDKIRTVQDALESLVARESVQGYTTKTKQEVEISRRVTLEKLPPVLVLHLKRFVYEKTGGCQKLIKNIEYPVDLEISKELLSPGVKNKNFKCHRTYRLFAVVYHHGNSATGGHYTTDVFQIGLNGWLRIDDQTVKVINQYQVVKPTAERTAYLLYYRRVDLL

SEQ ID NO: 5564 - protein, 846 aa, Homo sapiens
MCSKDTVLSVCALYWRKGIQSHTPLIGAWRRGKQREQPEDRGVPMKRAAALHSPQYIFGDFSPDEFNQFFVTPRSSVELPPYSGTVLCGTQAVDKLPDGQEYQRIEFGVDEVIEPSDTLPRTPSYSISSTLNPQAPEFILGCTASKITPDGITKEASYGSIDCQYPGSALALDGSSNVEAEVLENDGVSGGLGQRERKKKKKRPPGYYSYLKDGGDDSISTEALVNGHANSAVPNSVSAEDAEFMGDMPPSVTPRTCNSPQNSTDSVSDIVPDSPFPGALGSDTRTAGQPEGGPGADFGQSCFPAEAGRDTLSRTAGAQPCVGTDTTENLGVANGQILESSGEGTATNGVELHTTESIDLDPTKPESASPPADGTGSASGTLPVSQPKSWASLFHDSKPSSSSPVAYVETKYSPPAISPLVSEKQVEVKEGLVPVSEDPVAIKIAELLENVTLIHKPVSLQPRGLINKGNWCYINATLQALVACPPMYHLMKFIPLYSKVQRPCTSTPMIDSFVRLMNEFTNMPVPPKPRQALGDKIVRDIRPGAAFEPTYIYRLLTVNKSSLSEKGRQEDAEEYLGFILNGLHEEMLNLKKLLSPSNEKLTISNGPKNHSVNEEEQEEQGEGSEDEWEQVGPRNKTSVTRQADFVQTPITGIFGGHIRSVVYQQSSKESATLQPFFTLQLDIQSDKIRTVQDALESLVARESVQGYTTKTKQEVEISRRVTLEKLPPVLVLHLKRFVYEKTGGCQKLIKNIEYPVDLEISKELLSPGVKNKNFKCHRTYRLFAVVYHHGNSATGGHYTTDVFQIGLNGWLRIDDQTVKVINQYQVVKPTAERTAYLLYYRRVDLL

SEQ ID NO: 5565 - protein, 802 aa, Homo sapiens
MPWLPSPGIGQYIFGDFSPDEFNQFFVTPRSSVELPPYSGTVLCGTQAVDKLPDGQEYQRIEFGVDEVIEPSDTLPRTPSYSISSTLNPQAPEFILGCTASKITPDGITKEASYGSIDCQYPGSALALDGSSNVEAEVLENDGVSGGLGQRERKKKKKRPPGYYSYLKDGGDDSISTEALVNGHANSAVPNSVSAEDAEFMGDMPPSVTPRTCNSPQNSTDSVSDIVPDSPFPGALGSDTRTAGQPEGGPGADFGQSCFPAEAGRDTLSRTAGAQPCVGTDTTENLGVANGQILESSGEGTATNGVELHTTESIDLDPTKPESASPPADGTGSASGTLPVSQPKSWASLFHDSKPSSSSPVAYVETKYSPPAISPLVSEKQVEVKEGLVPVSEDPVAIKIAELLENVTLIHKPVSLQPRGLINKGNWCYINATLQALVACPPMYHLMKFIPLYSKVQRPCTSTPMIDSFVRLMNEFTNMPVPPKPRQALGDKIVRDIRPGAAFEPTYIYRLLTVNKSSLSEKGRQEDAEEYLGFILNGLHEEMLNLKKLLSPSNEKLTISNGPKNHSVNEEEQEEQGEGSEDEWEQVGPRNKTSVTRQADFVQTPITGIFGGHIRSVVYQQSSKESATLQPFFTLQLDIQSDKIRTVQDALESLVARESVQGYTTKTKQEVEISRRVTLEKLPPVLVLHLKRFVYEKTGGCQKLIKNIEYPVDLEISKELLSPGVKNKNFKCHRTYRLFAVVYHHGNSATGGHYTTDVFQIGLNGWLRIDDQTVKVINQYQVVKPTAERTAYLLYYRRVDLL

SEQ ID NO: 5566 - protein, 375 aa, Homo sapiens
MSVSGLKAELKFLASIFDKNHERFRIVSWKLDELHCQFLVPQQGSPHSLPPPLTLHCNITESYPSSSPIWFVDSEDPNLTSVLERLEDTKNNNLLRQQLKWLICELCSLYNLPKHLDVEMLDQPLPTGQNGTTEEVTSEEEEEEEEMAEDIEDLDHYEMKEEEPISGKKSEDEGIEKENLAILEKIRKTQRQDHLNGAVSGSVQASDRLMKELRDIYRSQSYKTGIYSVELINDSLYDWHVKLQKVDPDSPLHSDLQILKEKEGIEYILLNFSFKDNFPFDPPFVRVVLPVLSGGYVLGGGALCMELLTKQGWSSAYSIESVIMQINATLVKGKARVQFGANKNQYNLARAQQSYNSIVQIHEKNGWYTPPKEDG

SEQ ID NO: 5567 - protein, 314 aa, Homo sapiens
MSVSGLKAELKFLASIFDKNHERFRIVSWKLDELHCQFLVPQQGSPHSLPPPLTLHCNITESYPSSSPIWFVDSEDPNLTSVLERLEDTKNNNLLRQQLKWLICELCSLYNLPKHLDVEMLDQPLPTGQNGTTEEVTSEEEEEEEEMAEDIEDLDHYEMKEEEPISGKKSEDEGIEKENLAILEKIRKTQRQDHLNGAVSGSVQASDRLMKELRDIYRSQSYKTGIYSVELINDSLYDWHVKLQKVDPDSPLHSDLQILKEKEGIEYILLNFSFKDNFPFDPPFVRVVLPVLSGGLVHPSKGRWLNMLTVVCLD

SEQ ID NO: 5568 - protein, 359 aa, Homo sapiens
MRMDSLTEEKLECRLWCCLSDPSPPGLAARCCVLERSIVPSLRQESYPSSSPIWFVDSEDPNLTSVLERLEDTKNNNLLRQQLKWLICELCSLYNLPKHLDVEMLDQPLPTGQNGTTEEVTSEEEEEEEEMAEDIEDLDHYEMKEEEPISGKKSEDEGIEKENLAILEKIRKTQRQDHLNGAVSGSVQASDRLMKELRDIYRSQSYKTGIYSVELINDSLYDWHVKLQKVDPDSPLHSDLQILKEKEGIEYILLNFSFKDNFPFDPPFVRVVLPVLSGGYVLGGGALCMELLTKQGWSSAYSIESVIMQINATLVKGKARVQFGANKNQYNLARAQQSYNSIVQIHEKNGWYTPPKEDG

SEQ ID NO: 5569 - protein, 340 aa, Homo sapiens
MSVSGLKAELKFLASIFDKNHERFRIVSWKLDELHCQFLVPQQGSPHSLPPPLTLHCNITESYPSSSPIWFVDSEDPNLTSVLERLEDTKNNNLNGTTEEVTSEEEEEEEEMAEDIEDLDHYEMKEEEPISGKKSEDEGIEKENLAILEKIRKTQRQDHLNGAVSGSVQASDRLMKELRDIYRSQSYKTGIYSVELINDSLYDWHVKLQKVDPDSPLHSDLQILKEKEGIEYILLNFSFKDNFPFDPPFVRVVLPVLSGGYVLGGGALCMELLTKQGWSSAYSIESVIMQINATLVKGKARVQFGANKNQYNLARAQQSYNSIVQIHEKNGWYTPPKEDG

SEQ ID NO: 5570 - protein, 236 aa, Homo sapiens
MARPLVPSSQKALLLELKGLQEEPVEGFRVTLVDEGDLYNWEVAIFGPPNTYYEGGYFKARLKFPIDYPYSPPAFRFLTKMWHPNIYETGDVCISILHPPVDDPQSGELPSERWNPTQNVRTILLSVISLLNEPNTFSPANVDASVMYRKWKESKGKDREYTDIIRKQVLGTKVDAERDGVKVPTTLAEYCVKTKAPAPDEGSDLFYDDYYEDGEVEEEADSCFGDDEDDSGTEES

SEQ ID NO: 5571 - protein, 258 aa, Homo sapiens
MEEMKKTAIRLPKGKQKPIKTEWNSRCVLFTYFQGDISSVVDEHFSRALSNIKSPQELTPSSQSEGVMLKNDDSMSPNQWRYSSPWTKPQPEVPVTNRAANCNLHVPGPMAVNQFSPSLARRASVRPGELWHFSSLAGTSSLEPGYSHPFPARHLVPEPQPDGKREPLLSLLQQDRCLARPQESAARENGNPGQIAGSTGLLFNLPPGSVHYKKLYVSRGSASTSLPNETLSELETPGKYSLTPPNHWGHPHRYLQHL

SEQ ID NO: 5572 - protein, 326 aa, Homo sapiens
MSCAEVMYHPQPYGASQYLPNPMAATTCPTAYYQPAPQPGQQKKLAVFSKMQDSLEVTLPSKQEEEDEEEEEEEKDQPAEMEYLNSRCVLFTYFQGDIGSVVDEHFSRALGQAITLHPESAISKSKMGLTPLWRDSSALSSQRNSFPTSFWTSSYQPPPAPCLGGVHPDFQVTGPPGTFSAADPSPWPGHNLHQTGPAPPPAVSESWPYPLTSQVSPSYSHMHDVYMRHHHPHAHMHHRHRHHHHHHHPPAGSALDPSYGPLLMPSVHAARIPAPQCDITKTEPTTVTSATSAWAGAFHGTVDIVPSVGFDTGLQHQDKSKESPWY

SEQ ID NO: 5573 - protein, 320 aa, Homo sapiens
MSCAEVMYHPQPYGASQYLPNPMAATTCPTAYYQPAPQPGQQKKLAVFSKMQDSLEVTLPSKQEEEDEEEEEEEKDQPAEMEYLNSRCVLFTYFQGDIGSVVDEHFSRALGQAITLHPESAISKSKMGLTPLWRDSSALSSQRNSFPTSFWTSSYQPPPAPCLGGVHPDFQVTGPPGTFSAADPSPWPGHNLHQTGPAPPPAVSESWPYPLTSQVSPSYSHMHDVYMRHHHPHAHMHHRHRHHHHHHHPPAGSALDPSYGPLLMPSVHAARIPAPQCDITKTEPTTVTSATSAWAGAFHGTVDIVPSVGFDTGWSAMARS

SEQ ID NO: 5574 - protein, 920 aa, Homo sapiens
MSDPHSSPLLPEPLSSRYKLYEAEFTSPSWPSTSPDTHPALPLLEMPEEKDLRSSNEDSHIVKIEKLNERSKRKDDGVAHRDSAGQRCICLSKAVGYLTGDMKEYRIWLKDKHLALQFIDWVLRGTAQVMFINNPLSGLIIFIGLLIQNPWWTITGGLGTVVSTLTALALGQDRSAIASGLHGYNGMLVGLLMAVFSEKLDYYWWLLFPVTFTAMSCPVLSSALNSIFSKWDLPVFTLPFNIAVTLYLAATGHYNLFFPTTLVEPVSSVPNITWTEMEMPLLLQAIPVGVGQVYGCDNPWTGGVFLVALFISSPLICLHAAIGSIVGLLAALSVATPFETIYTGLWSYNCVLSCIAIGGMFYALTWQTHLLALICALFCAYMEAAISNIMSVVGVPPGTWAFCLATIIFLLLTTNNPAIFRLPLSKVTYPEANRIYYLTVKSGEEEKAPSGGGGEHPPTAGPKVEEGSEAVLSKHRSVFHIEWSSIRRRSKVFGKGEHQERQNKDPFPYRYRKPTVELLDLDTMEESSEIKVETNISKTSWIRSSMAASGKRVSKALSYITGEMKECGEGLKDKSPVFQFFDWVLRGTSQVMFVNNPLSGILIILGLFIQNPWWAISGCLGTIMSTLTALILSQDKSAIAAGFHGYNGVLVGLLMAVFSDKGDYYWWLLLPVIIMSMSCPILSSALGTIFSKWDLPVFTLPFNITVTLYLAATGHYNLFFPTTLLQPASAMPNITWSEVQVPLLLRAIPVGIGQVYGCDNPWTGGIFLIALFISSPLICLHAAIGSTMGMLAALTIATPFDSIYFGLCGFNSTLACIAIGGMFYVITWQTHLLAIACALFAAYLGAALANMLSVFGLPPCTWPFCLSALTFLLLTTNNPAIYKLPLSKVTYPEANRIYYLSQERNRRASIITKYQAYDVS

SEQ ID NO: 5575 - protein, 397 aa, Homo sapiens
MEESSEIKVETNISKTSWIRSSMAASGKRVSKALSYITGEMKECGEGLKDKSPVFQFFDWVLRGTSQVMFVNNPLSGILIILGLFIQNPWWAISGCLGTIMSTLTALILSQDKSAIAAGFHGYNGVLVGLLMAVFSDKGDYYWWLLLPVIIMSMSCPILSSALGTIFSKWDLPVFTLPFNITVTLYLAATGHYNLFFPTTLLQPASAMPNITWSEVQVPLLLRAIPVGIGQVYGCDNPWTGGIFLIALFISSPLICLHAAIGSTMGMLAALTIATPFDSIYFGLCGFNSTLACIAIGGMFYVITWQTHLLAIACALFAAYLGAALANMLSVFGLPPCTWPFCLSALTFLLLTTNNPAIYKLPLSKVTYPEANRIYYLSQERNRRASIITKYQAYDVS

SEQ ID NO: 5576 - protein, 766 aa, Homo sapiens
MNVNQVAENLALSHQEELVDLPKNYPLSENEDEGDSDGERKHQKLLEAIISLDGKNRRKLAERSEASLKVSEFSVSSEGSGEKLGLADLLEPVKTSSSLATVKKQLNRVKSKKVVELPLNKEKIEQIHREVAFSKTSQVLSKWDPIILKNQQAEQLVFPLGKEQPAIAPIEHALSGWKARTPLEQEIFNLLHKNKQPVTDPLLTPMEKASLQAMSLEEAKMHRAELQRARALQSYYEAKARKEKKIKSKKYHKVVKKGKAKKALKEFEQLQKVNPTVALEEMEKIENARMMERMSLKHQNSGKWAKSKAIMAKYDLEARQAMQEQLAKNKELTQKLQVASESEEEEGGTEVEELLVPHVANEVQMNVDGPNPWMFRSCTSDTKEAATQEDPEQVPELAAHEVSASEAEERPVAEEEILLREFEERQSLRKRSELNQDAEPASSQETKDSSSQEVLSELRALSQKLKEKHQSRKQKASSEGTVPQVQREEPAPEEAEPLLLQRSERVQTLEELEELGKEDCFQNKELPRPVLEGQQSERTPNNRPDAPKEKKEKEQLINLQNFLTTQSPSVRSLAVPTIIEELEDEEERDQRQMIKEAFAGDDVIRDFLKEKREAVEASKPKDVDLTLPGWGEWGGVGLKPSAKKRRQFLIKAPEGPPRKDKNLPNVIISEKRNIHAAAHQVQVLPYPFTHHRQFERTIQTPIGSTWNTQRAFQKLTTPKVVTKPGHIIKPIKAEDVGYQSSSRSDLPVIQRNPKRITTRHNKEEKL

SEQ ID NO: 5577 - protein, 370 aa, Homo sapiens
MGLWALLPGWVSATLLLALAALPAALAANSSGRWWGIVNVASSTNLLTDSKSLQLVLEPSLQLLSRKQRRLIRQNPGILHSVSGGLQSAVRECKWQFRNRRWNCPTAPGPHLFGKIVNRGCRETAFIFAITSAGVTHSVARSCSEGSIESCTCDYRRRGPGGPDWHWGGCSDNIDFGRLFGREFVDSGEKGRDLRFLMNLHNNEAGRTTVFSEMRQECKCHGMSGSCTVRTCWMRLPTLRAVGDVLRDRFDGASRVLYGNRGSNRASRAELLRLEPEDPAHKPPSPHDLVYFEKSPNFCTYSGRLGTAGTAGRACNSSSPALDGCELLCCGRGHRTRTQRVTERCNCTFHWCCHVSCRNCTHTRVLHECL

SEQ ID NO: 5578 - protein, 2813 aa, Homo sapiens
MIPARFAGVLLALALILPGTLCAEGTRGRSSTARCSLFGSDFVNTFDGSMYSFAGYCSYLLAGGCQKRSFSIIGDFQNGKRVSLSVYLGEFFDIHLFVNGTVTQGDQRVSMPYASKGLYLETEAGYYKLSGEAYGFVARIDGSGNFQVLLSDRYFNKTCGLCGNFNIFAEDDFMTQEGTLTSDPYDFANSWALSSGEQWCERASPPSSSCNISSGEMQKGLWEQCQLLKSTSVFARCHPLVDPEPFVALCEKTLCECAGGLECACPALLEYARTCAQEGMVLYGWTDHSACSPVCPAGMEYRQCVSPCARTCQSLHINEMCQERCVDGCSCPEGQLLDEGLCVESTECPCVHSGKRYPPGTSLSRDCNTCICRNSQWICSNEECPGECLVTGQSHFKSFDNRYFTFSGICQYLLARDCQDHSFSIVIETVQCADDRDAVCTRSVTVRLPGLHNSLVKLKHGAGVAMDGQDVQLPLLKGDLRIQHTVTASVRLSYGEDLQMDWDGRGRLLVKLSPVYAGKTCGLCGNYNGNQGDDFLTPSGLAEPRVEDFGNAWKLHGDCQDLQKQHSDPCALNPRMTRFSEEACAVLTSPTFEACHRAVSPLPYLRNCRYDVCSCSDGRECLCGALASYAAACAGRGVRVAWREPGRCELNCPKGQVYLQCGTPCNLTCRSLSYPDEECNEACLEGCFCPPGLYMDERGDCVPKAQCPCYYDGEIFQPEDIFSDHHTMCYCEDGFMHCTMSGVPGSLLPDAVLSSPLSHRSKRSLSCRPPMVKLVCPADNLRAEGLECTKTCQNYDLECMSMGCVSGCLCPPGMVRHENRCVALERCPCFHQGKEYAPGETVKIGCNTCVCQDRKWNCTDHVCDATCSTIGMAHYLTFDGLKYLFPGECQYVLVQDYCGSNPGTFRILVGNKGCSHPSVKCKKRVTILVEGGEIELFDGEVNVKRPMKDETHFEVVESGRYIILLLGKALSVVWDRHLSISVVLKQTYQEKVCGLCGNFDGIQNNDLTSSNLQVEEDPVDFGNSWKVSSQCADTRKVPLDSSPATCHNNIMKQTMVDSSCRILTSDVFQDCNKLVDPEPYLDVCIYDTCSCESIGDCACFCDTIAAYAHVCAQHGKVVTWRTATLCPQSCEERNLRENGYECEWRYNSCAPACQVTCQHPEPLACPVQCVEGCHAHCPPGKILDELLQTCVDPEDCPVCEVAGRRFASGKKVTLNPSDPEHCQICHCDVVNLTCEACQEPGGLVVPPTDAPVSPTTLYVEDISEPPLHDFYCSRLLDLVFLLDGSSRLSEAEFEVLKAFVVDMMERLRISQKWVRVAVVEYHDGSHAYIGLKDRKRPSELRRIASQVKYAGSQVASTSEVLKYTLFQIFSKIDRPEASRITLLLMASQEPQRMSRNFVRYVQGLKKKKVIVIPVGIGPHANLKQIRLIEKQAPENKAFVLSSVDELEQQRDEIVSYLCDLAPEAPPPTLPPDMAQVTVGPGLLGVSTLGPKRNSMVLDVAFVLEGSDKIGEADFNRSKEFMEEVIQRMDVGQDSIHVTVLQYSYMVTVEYPFSEAQSKGDILQRVREIRYQGGNRTNTGLALRYLSDHSFLVSQGDREQAPNLVYMVTGNPASDEIKRLPGDIQVVPIGVGPNANVQELERIGWPNAPILIQDFETLPREAPDLVLQRCCSGEGLQIPTLSPAPDCSQPLDVILLLDGSSSFPASYFDEMKSFAKAFISKANIGPRLTQVSVLQYGSITTIDVPWNVVPEKAHLLSLVDVMQREGGPSQIGDALGFAVRYLTSEMHGARPGASKAVVILVTDVSVDSVDAAADAARSNRVTVFPIGIGDRYDAAQLRILAGPAGDSNVVKLQRIEDLPTMVTLGNSFLHKLCSGFVRICMDEDGNEKRPGDVWTLPDQCHTVTCQPDGQTLLKSHRVNCDRGLRPSCPNSQSPVKVEETCGCRWTCPCVCTGSSTRHIVTFDGQNFKLTGSCSYVLFQNKEQDLEVILHNGACSPGARQGCMKSIEVKHSALSVELHSDMEVTVNGRLVSVPYVGGNMEVNVYGAIMHEVRFNHLGHIFTFTPQNNEFQLQLSPKTFASKTYGLCGICDENGANDFMLRDGTVTTDWKTLVQEWTVQRPGQTCQPILEEQCLVPDSSHCQVLLLPLFAECHKVLAPATFYAICQQDSCHQEQVCEVIASYAHLCRTNGVCVDWRTPDFCAMSCPPSLVYNHCEHGCPRHCDGNVSSCGDHPSEGCFCPPDKVMLEGSCVPEEACTQCIGEDGVQHQFLEAWVPDHQPCQICTCLSGRKVNCTTQPCPTAKAPTCGLCEVARLRQNADQCCPEYECVCDPVSCDLPPVPHCERGLQPTLTNPGECRPNFTCACRKEECKRVSPPSCPPHRLPTLRKTQCCDEYECACNCVNSTVSCPLGYLASTATNDCGCTTTTCLPDKVCVHRSTIYPVGQFWEEGCDVCTCTDMEDAVMGLRVAQCSQKPCEDSCRSGFTYVLHEGECCGRCLPSACEVVTGSPRGDSQSSWKSVGSQWASPENPCLINECVRVKEEVFIQQRNVSCPQLEVPVCPSGFQLSCKTSACCPSCRCERMEACMLNGTVIGPGKTVMIDVCTTCRCMVQVGVISGFKLECRKTTCNPCPLGYKEENNTGECCGRCLPTACTIQLRGGQIMTLKRDETLQDGCDTHFCKVNERGEYFWEKRVTGCPPFDEHKCLAEGGKIMKIPGTCCDTCEEPECNDITARLQYVKVGSCKSEVEVDIHYCQGKCASKAMYSIDINDVQDQCSCCSPTRTEPMQVALHCTNGSVVYHEVLNAMECKCSPRKCSK

SEQ ID NO: 5579 - protein, 351 aa, Homo sapiens
MGAQDEEEGIQDLDGLLVFDKIVEVTLLNLPWYNEETEGQRGEMTAPKSPRAKIRGTLCAEGTRGRSSTARCSLFGSDFVNTFDGSMYSFAGYCSYLLAGGCQKRSFSIIGDFQNGKRVSLSVYLGEFFDIHLFVNGTVTQGDQRVSMPYASKGLYLETEAGYYKLSGEAYGFVARIDGSGNFQVLLSDRYFNKTCGLCGNFNIFAEDDFMTQEGTLTSDPYDFANSWALSSGEQWCERASPPSSSCNISSGEMQKEEPECNDITARLQYVKVGSCKSEVEVDIHYCQGKCASKAMYSIDINDVQDQCSCCSPTRTEPMQVALHCTNGSVVYHEVLNAMECKCSPRKCSKI

SEQ ID NO: 5580 - protein, 1336 aa, Homo sapiens
MATEIGSPPRFFHMPRFQHQAPRQLFYKRPDFAQQQAMQQLTFDGKRMRKAVNRKTIDYNPSVIKYLENRIWQRDQRDMRAIQPDAGYYNDLVPPIGMLNNPMNAVTTKFVRTSTNKVKCPVFVVRWTPEGRRLVTGASSGEFTLWNGLTFNFETILQAHDSPVRAMTWSHNDMWMLTADHGGYVKYWQSNMNNVKMFQAHKEAIREASFSPTDNKFATCSDDGTVRIWDFLRCHEERILRGHGADVKCVDWHPTKGLVVSGSKDSQQPIKFWDPKTGQSLATLHAHKNTVMEVKLNLNGNWLLTASRDHLCKLFDIRNLKEELQVFRGHKKEATAVAWHPVHEGLFASGGSDGSLLFWHVGVEKEVGGMEMAHEGMIWSLAWHPLGHILCSGSNDHTSKFWTRNRPGDKMRDRYNLNLLPGMSEDGVEYDDLEPNSLAVIPGMGIPEQLKLAMEQEQMGKDESNEIEMTIPGLDWGMEEVMQKDQKKVPQKKVPYAKPIPAQFQQAWMQNKVPIPAPNEVLNDRKEDIKLEEKKKTQAEIEQEMATLQYTNPQLLEQLKIERLAQKQVEQIQPPPSSGTPLLGPQPFPGQGPMSQIPQGFQQPHPSQQMPMNMAQMGPPGPQGQFRPPGPQGQMGPQGPPLHQGGGGPQGFMGPQGPQGPPQGLPRPQDMHGPQGMQRHPGPHGPLGPQGPPGPQGSSGPQGHMGPQGPPGPQGHIGPQGPPGPQGHLGPQGPPGTQGMQGPPGPRGMQGPPHPHGIQGGPGSQGIQGPVSQGPLMGLNPRGMQGPPGPRENQGPAPQGMIMGHPPQEMRGPHPPGGLLGHGPQEMRGPQEIRGMQGPPPQGSMLGPPQELRGPPGSQSQQGPPQGSLGPPPQGGMQGPPGPQGQQNPARGPHPSQGPIPFQQQKTPLLGDGPRAPFNQEGQSTGPPPLIPGLGQQGAQGRIPPLNPGQGPGPNKGDSRGPPNHHMGPMSERRHEQSGGPEHGPERGPFRGGQDCRGPPDRRGPHPDFPDDFSRPDDFHPDKRFGHRLREFEGRGGPLPQEEKWRRGGPGPPFPPDHREFSEGDGRGAARGPPGAWEGRRPGDERFPRDPEDPRFRGRREESFRRGAPPRHEGRAPPRGRDGFPGPEDFGPEENFDASEEAARGRDLRGRGRGTPRGGRKGLLPTPDEFPRFEGGRKPDSWDGNREPGPGHEHFRDTPRPDHPPHDGHSPASRERSSSLQGMDMASLPPRKRPWHDGPGTSEHREMEAPGGPSEDRGGKGRGGPGPAQRVPKSGRSSSLDGEHHDGYHRDEPFGGPPGSGTPSRGGRSGSNWGRGSNMNSGPPRRGASRGGGRGR

SEQ ID NO: 5581 - protein, 326 aa, Homo sapiens
MATEIGSPPRFFHMPRFQHQAPRQLFYKRPDFAQQQAMQQLTFDGKRMRKAVNRKTIDYNPSVIKYLENRIWQRDQRDMRAIQPDAGYYNDLVPPIGMLNNPMNAVTTKFVRTSTNKVKCPVFVVRWTPEGRRLVTGASSGEFTLWNGLTFNFETILQAHDSPVRAMTWSHNDMWMLTADHGGYVKYWQSNMNNVKMFQAHKEAIREARFIHNIPFSVVPIVMVKLFSKCILGAEMHGLCQFLGNFLHPINTIFFFVFTHSPFCWHLSEVVLSRYQPLQYVRDVLSAAFCTGFLFSFMINNVYTLFLFIIYCVRQEYFIPNKEFSL

SEQ ID NO: 5582 - protein, 257 aa, Homo sapiens
MATEIGSPPRFFHMPRFQHQAPRQLFYKRPDFAQQQAMQQLTFDGKRMRKAVNRKTIDYNPSVIKYLENRIWQRDQRDMRAIQPDAGYYNDLVPPIGMLNNPMNAVTTKFVRTSTNKVKCPVFVVRWTPEGRRLVTGASSGEFTLWNGLTFNFETILQAHDSPVRAMTWSHNDMWMLTADHGGYVKYWQSNMNNVKMFQAHKEAIREASFSPTDNKFATCSDDGTVRIWDFLRCHEERILRDTCFHHCRCYFLSVKR

SEQ ID NO: 5583 - protein, 642 aa, Homo sapiens
MDSVSFEDVAVNFTLEEWALLDSSQKKLYEDVMQETFKNLVCLGKKWEDQDIEDDHRNQGKNRRCHMVERLCESRRGSKCGETTSQMPNVNINKETFTGAKPHECSFCGRDFIHHSSLNRHMRSHTGQKPNEYQEYEKQPCKCKAVGKTFSYHHCFRKHERTHTGVKPYECKQCGKAFIYYQPFQRHERTHAGQKPYECKQCGKTFIYYQSFQKHAHTGKKPYECKQCGKAFICYQSFQRHKRTHTGEKPYECKQCGKAFSCPTYFRTHERTHTGEKPYKCKECGKAFSFLSSFRRHKRTHSGEKPYECKECGKAFFYSASFRAHVIIHTGARPYKCKECGKAFNSSNSCRVHERTHIGEKPYECKRCGKSFSWSISLRLHERTHTGEKPYECKQCHKTFSFSSSLREHETTHTGEKPYECKQCGKTFSFSSSLQRHERTHNAEKPYECKQCGKAFRCSSYFRIHERSHTGEKPYECKQCGKVFIRSSSFRLHERTHTGEKPYECKLCGKTFSFSSSLREHEKIHTGNKPFECKQCGKAFLRSSQIRLHERTHTGEKPYQCKQCGKAFISSSKFRMHERTHTGEKPYRCKQCGKAFRFSSSVRIHERSHTGEKPYECKQCGKAFISSSHFRLHERTHMGEKV

SEQ ID NO: 5584 - protein, 379 aa, Homo sapiens
MESEKIYMTANPYLCTECGKGYTCLASLTQHQKTHIGEKPYECKICGKSFTRNSNLVQHQRIHTGEKPYECNECGKAFSQSTNLIQHQRVHTGEKPYECNECEKTFSHRSSLRNHERIHTGEKPYPCNECGKAFSHISALTQHHRIHTGKKPYECTECGKTFSRSTHLIEHQGIHSEEKSYQCKQCRKVFCHSTSLIRHQRTHTGEKPYECNECGKAFSHTPAFIQHQRIHTGEKPYECNACGKAFNRSAHLTEHQRTHTGEKPYVCKECGKTFSRSTHLTEHLKIHSCVKPYQCNECQKLFCYRTSLIRHQRTHTGEKPYQCNECGKSFSLSSALTKHKRIHTRERPYQCTKCGDVFCHSTSLIRHQKTHFRKETLAE

SEQ ID NO: 5585 - protein, 395 aa, Homo sapiens
MRNIMYFGGTCQSPALPALVRPPAPPLQPSLDIKPFLPFPLDTAAAVNLFPNFNAMDPIQKAVINHTFGVPLPHRRKQIISCNICQLRFNSDSQAAAHYKGTKHAKKLKALEAMKNKQKSVTAKDSAKTTFTSITTNTINTSSDKTDGTAGTPAISTTTTVEIRKSSVMTTEITSKVEKSPTTATGNSSCPSTETEEEKAKRLLYCSLCKVAVNSASQLEAHNSGTKHKTMLEARNGSGTIKAFPRAGVKGKGPVNKGNTGLQNKTFHCEICDVHVNSETQLKQHISSRRHKDRAAGKPPKPKYSPYNKLQKTAHPLGVKLVFSKEPSKPLAPRILPNPLAAAAAAAAVAVSSPFSLRTAPAATLFQTSALPPALLRPAPGPIRTAHTPVLFAPY

SEQ ID NO: 5586 - protein, 683 aa, Homo sapiens
MSPHPEAITDCVTLNTVGQLAEGGYPLRFSTLFQEQQKMNISQASVSFKDVTIEFTQEEWQQMAPVQKNLYRDVMLENYSNLVSVGYCCFKPEVIFKLEQGEEPWFSEEEFSNQSHPKDYRGDDLIKQNKKIKDKHLEQAICINNKTLTTEEEKVLGKPFTLHVAAVASTKMSCKCNSWEVNLQSISEFIINNRNYSTKKIGCGNVCENSPFKINFEKTQTGEKFYEHNKNMKALNYNENLPKHPKFQTLEQAFECNKIGKAFNDKANCVKHNSSHTGETSSKDDEFRKNCDKKTLFDHRRTGTGKKHLHLNQCGKSFEKSTVEEYNKLNMGIKHYELNPSGNNFNRKAHLTDPQTAVIEENPLVSNDRTQTWVKSSEYHENKKSYQTSVHRVRRRSHSMMKPYKCNECGKSFCQKGHLIQHQRTHTGEKPFECSECGKTFSQKSHLSTHQRIHTAEKPYKCNECGKTFVQKSTLRGHQRIHTGEKPYECSECGKTFVQKSTLRDHHRIHTGEKSFQCNQCGKTFGQKSNLRIHQRTHTGEKTYQCNECEKSFWRKDHLIQHQKTHTGEKPFKCNECGKTFARTSTLRVHQRIHTGEKPFKCNECGKKFVRKAILSDHQRIHTGEKPFQCNKCGKTFGQKSNLRIHQRTHSGEKSYECNEYGKLCKKSTLSLYQKIQGEGNPY

SEQ ID NO: 5587 - protein, 418 aa, Homo sapiens
MAQESVMFSDVSVDFSQEEWECLNDDQRDLYRDVMLENYSNLVSMGHSISKPNVISYLEQGKEPWLADRELTRGQWPVLESRCETKKLFLKKEIYEIESTQWEIMEKLTRRDFQCSSFRDDWECNRQFKKELGSQGGHFNQLVFTHEDLPTLSHHPSFTLQQIINSKKKFCASKEYRKTFRHGSQFATHEIIHTIEKPYECKECGKSFRHPSRLTHHQKIHTGKKPFECKECGKTFICGSDLTRHHRIHTGEKPYECKECGKAFSSGSNFTRHQRIHTGEKPYECKECGKAFSSGSNFTQHQRIHTGEKPYECKECGNAFSQSSQLIKHQRIHTGEKPYECKECEKAFRSGSDLTRHQRIHTGEKPYECKICGKAYSQSSQLISHHRIHTSEKPYEYRECGKNFNYDPQLIQHQNLYW

SEQ ID NO: 5588 - protein, 419 aa, Homo sapiens
MAQESVMFSDVSVDFSQEEWECLNDDQRDLYRDVMLENYSNLVSMAGHSISKPNVISYLEQGKEPWLADRELTRGQWPVLESRCETKKLFLKKEIYEIESTQWEIMEKLTRRDFQCSSFRDDWECNRQFKKELGSQGGHFNQLVFTHEDLPTLSHHPSFTLQQIINSKKKFCASKEYRKTFRHGSQFATHEIIHTIEKPYECKECGKSFRHPSRLTHHQKIHTGKKPFECKECGKTFICGSDLTRHHRIHTGEKPYECKECGKAFSSGSNFTRHQRIHTGEKPYECKECGKAFSSGSNFTQHQRIHTGEKPYECKECGNAFSQSSQLIKHQRIHTGEKPYECKECEKAFRSGSDLTRHQRIHTGEKPYECKICGKAYSQSSQLISHHRIHTSEKPYEYRECGKNFNYDPQLIQHQNLYW

SEQ ID NO: 5589 - protein, 81 aa, Homo sapiens [sequence omitted]

SEQ ID NO: 5590 - protein, 139 aa, Homo sapiens [sequence omitted]

SEQ ID NO: 5591 - protein, 207 aa, Homo sapiens
MSPLLRRLLLAALLQLAPAQAPVSQPDAPGHQRKVVSWIDVYTRATCQPREVVVPLTVELMGTVAKQLVPSCVTVQRCGGCCPDDGLECVPTGQHQVRMQILMIRYPSSQLGEMSLEEHSQCECRPKKKDSAVKPDRAATPHHRPQPRSVPGWDSAPGAPSPADITHPTPAPGPSAHAAPSTTSALTPGPAAAAADAAASSVAKGGA

SEQ ID NO: 5592 - protein, 188 aa, Homo sapiens
MSPLLRRLLLAALLQLAPAQAPVSQPDAPGHQRKVVSWIDVYTRATCQPREVVVPLTVELMGTVAKQLVPSCVTVQRCGGCCPDDGLECVPTGQHQVRMQILMIRYPSSQLGEMSLEEHSQCECRPKKKDSAVKPDSPRPLCPRCTQHHQRPDPRTCRCRCRRRSFLRCQGRGLELNPDTCRCRKLRR

SEQ ID NO: 5593 - protein, 627 aa, Homo sapiens
MAAAELTAPAQGIVTFEDVAVYFSWKEWGLLDEAQKCLYHDVMLENLTLTTSLGGSGAGDEEAPYQQSTSPQRVSQVRIPKALPSPQKTNPCEICGPVLRQILHLVEHQGTHHGQKLYTDGACRKQLQFTAYLHQHQKQHVGQKHFRSNGGRDMFLSSCTFEVSGKPFTCKEVGKDFLVRSRFLQQQAAHTRKKSNRTKSAVAFHSVKNHYNWGECVKAFSYKHVRVQHQGDLIRERSYMCSECGKSFSTSCSLSDHLRVHTSEKPYTCGECGKSYRQSSSLITHRRIHTGVRPHQCDECGKLFNRKYDLLIHQRVHTGERPYKCSECGKSFSHSSSLITHQRIHTGMRPYECSECGKSFIHSSSLITHQRVHTGTRPYMCSECGKSFSQSCHLIKHRRLHIGEGPYECSECGKLFTYRSRFFQHQRVHTGVRSHECHECGKLFSRKFDLIVHERVHTGERPYECSECGKSFTCKSYLISHWKVHTGARPYECGECGKSFTHSSTLLQHQRVHTGERPYECNECGKFFSQSSSLIRHRRSHTGERPYECSECWKSFSNHSSLVKHRRVHTGERPYECSECGKSFSQSSNLTNHQRIHSGERPYECSDCGKFFTFNSNLLKHQNVHKG

SEQ ID NO: 5594 - protein, 474 aa, Homo sapiens
MFLSSCTFEVSGKPFTCKEVGKDFLVRSRFLQQQAAHTRKKSNRTKSAVAFHSVKNHYNWGECVKAFSYKHVRVQHQGDLIRERSYMCSECGKSFSTSCSLSDHLRVHTSEKPYTCGECGKSYRQSSSLITHRRIHTGVRPHQCDECGKLFNRKYDLLIHQRVHTGERPYKCSECGKSFSHSSSLITHQRIHTGMRPYECSECGKSFIHSSSLITHQRVHTGTRPYMCSECGKSFSQSCHLIKHRRLHIGEGPYECSECGKLFTYRSRFFQHQRVHTGVRSHECHECGKLFSRKFDLIVHERVHTGERPYECSECGKSFTCKSYLISHWKVHTGARPYECGECGKSFTHSSTLLQHQRVHTGERPYECNECGKFFSQSSSLIRHRRSHTGERPYECSECWKSFSNHSSLVKHRRVHTGERPYECSECGKSFSQSSNLTNHQRIHSGERPYECSDCGKFFTFNSNLLKHQNVHKG

SEQ ID NO: 5595 - protein, 2104 aa, Homo sapiens
MESQEFIVLYTHQKMKKSKVWQDGILKITHLGNKAILYDDKGACLESLFLKCLEVKPGDDLESDRYLITVEEVKVAGAIGIVKQNVNKEAPELNSRTFISSGRSLGCQPSGLKRKFTGFQGPRQVPKKMVIMESGESAASHEAKKTGPTIFSPFCSMPPLFPTVGKKDVNNILADPENIVTYKNRERNAMDFSSVFSPSFQINPEVLCEENYFCSPVNSGNKLSDSLLTNEPVKRDSLASHYSGVSQNIRSKAQILALLKSESSSSCEELNSEMTEHFPQKQPQGSLKIATKPKYLIQQEECAEMKSTENLYYQHQSENTMRNKSRWAMYLSSQSSPIHSSTVDGNDTERKPKAQEDDVNSNLKDLSLQKIIQFVETYAEERKKYNVDQSVGNNDPSWNQEVKLEIPSFNESSSLQVTCSSAENDGILSESDIQEDNKIPFNQNDKGCIKGSVLIKENAQEVNTCGTLEKEYEQSESSLPELKHLQIESSNNSRISDDITDMISESKMDNESLNSIHESLSNVTQPFLEVTFNLNNFETSDTEEESQESNKISQDSESWVKDILVNDGNSCFQKRSENTNCEEIEGEHLPFLTSVSDKPTVTFPVKETLPSQFCDKTYVGFDMGICKTENTGKEIEEYSDTLSNFESFKWTDAVYGDNKEDANKPIQEVRINYDFALPPNKSKGINMNLHIPHIQNQIAENSNLFSEDAQPQPFILGSDLDKNDEHVLPSTSSSDNSVQLLNTNQNHYECIALDKSNTHISNSLFYPLGKKHLISKDTEAHISEPEDLGKIRSPPPDHVEVETAREGKQYWNPRNSSELSGLVNTISILKSLCEHSTALDSLEILKKKNTVFQQGTQQTYEPDSPPEVRKPFITVVSPKSPHLHKDSQQILKEDEVELSEPLQSVQFSSSGSKEETAFQAVIPKQIERKTCDPKPVEFQGHQVKGSATSGVMVRGHSSQLGCSQFPDSTEYENFMTETPELPSTCMQIDFLQVTSPEENISTLSPVSTFSLNSRDEDFMVEFSETSLKARTLPDDLHFLNLEGMKKSRSLENENLQRLSLLSRTQVPLITLPRTDGPPDLDSHSYMINSNTYESSGSPMLNLCEKSAVLSFSIEPEDQNETFFSEESREVNPGDVSLNNISTQSKWLKYQNTSQCNVATPNRVDKRITDGFFAEAVSGMHFRDTSERQSDAVNESSLDSVHLQMIKGMLYQQRQDFSSQDSVSRKKVLSLNLKQTSKTEEIKNVLGGSTCYNYSVKDLQEISGSELCFPSGQKIKSAYLPQRQIHIPAVFQSPAHYKQTFTSCLIEHLNILLFGLAQNLQKALSKVDISFYTSLKGEKLKNAENNVPSCHHSQPAKLVMVKKEGPNKGRLFYTCDGPKADRCKFFKWLEDVTPGYSTQEGARPGMVLSDIKSIGLYLRSQKIPLYEECQLLVRKGFDFQRKQYGKLKKFTTVNPEFYNEPKTKLYLKLSRKERSSAYSKNDLWVVSKTLDFELDTFIACSAFFGPSSINEIEILPLKGYFPSNWPTNMVVHALLVCNASTELTTLKNIQDYFNPATLPLTQYLLTTSSPTIVSNKRVSKRKFIPPAFTNVSTKFELLSLGATLKLASELIQVHKLNKDQATALIQIAQMMASHESIEEVKELQTHTFPITIIHGVFGAGKSYLLAVVILFFVQLFEKSEAPTIGNARPWKLLISSSTNVAVDRVLLGLLSLGFENFIRVGSVRKIAKPILPYSLHAGSENESEQLKELHALMKEDLTPTERVYVRKSIEQHKLGTNRTLLKQVRVVGVTCAACPFPCMNDLKFPVVVLDECSQITEPASLLPIARFECEKLILVGDPKQLPPTIQGSDAAHENGLEQTLFDRLCLMGHKPILLRTQYRCHPAISAIANDLFYKGALMNGVTEIERSPLLEWLPTLCFYNVKGLEQIERDNSFHNVAEATFTLKLIQSLIASGIAGSMIGVITLYKSQMYKLCHLLSAVDFHHPDIKTVQVSTVDAFQGAEKEIIILSCVRTRQVGFIDSEKRMNVALTRGKRHLLIVGNLACLRKNQLWGRVIQHCEGREDGLQHANQYEPQLNHLLKDYFEKQVEEKQKKKSEKEKSKDKSHS

SEQ ID NO: 5596 - protein, 239 aa, Homo sapiens
MGHKPILLRTQYRCHPAISAIANDLFYKGALMNGVTEIERSPLLEWLPTLCFYNVKGLEQIERDNSFHNVAEATFTLKLIQSLIASGIAGSMIGVITLYKSQMYKLCHLLSAVDFHHPDIKTVQVSTVDAFQGAEKEIIILSCVRTRQVGFIDSEKRMNVALTRGKRHLLIVGNLACLRKNQLWGRVIQHCEGREDGLQHANQYEPQLNHLLKDYFEKQVEEKQKKKSEKEKSKDKSHS

SEQ ID NO: 5597 - protein, 832 aa, Homo sapiens
MESQEFIVLYTHQKMKKSKVWQDGILKITHLGNKAILYDDKGACLESLFLKCLEVKPGDDLESDRYLITVEEVKVAGAIGIVKQNVNKEAPELNSRTFISSGRSLGCQPSGLKRKFTGFQGPRQVPKKMVIMESGESAASHEAKKTGPTIFSPFCSMPPLFPTVGKKDVNNILADPENIVTYKNRERNAMDFSSVFSPSFQINPEVLCEENYFCSPVNSGNKLSDSLLTNEPVKRDSLASHYSGVSQNIRSKAQILALLKSESSSSCEELNSEMTEHFPQKQPQGSLKIATKPKYLIQQEECAEMKSTENLYYQHQSENTMRNKSRWAMYLSSQSSPIHSSTVDGNDTERKPKAQEDDVNSNLKDLSLQKIIQFVETYAEERKKYNVDQSVGNNDPSWNQEVKLEIPSFNESSSLQVTCSSAENDGILSESDIQEDNKIPFNQNDKGCIKGSVLIKENAQEVNTCGTLEKEYEQSESSLPELKHLQIESSNNSRISDDITDMISESKMDNESLNSIHESLSNVTQPFLEVTFNLNNFETSDTEEESQESNKISQDSESWVKDILVNDGNSCFQKRSENTNCEEIEGEHLPFLTSVSDLDKNDEHVLPSTSSSDNSVQLLNTNQNHYECIALDKSNTHISNSLFYPLGKKHLISKDTEAHISEPEDLGKIRSPPPDHVEVETAREGKQYWNPRNSSELSGLVNTISILKSLCEHSTALDSLEILKKKNTVFQQGTQQTYEPDSPPEVRKPFITVVSPKSPHLHKDSQQILKEDEVELSEPLQSVQFSSSGSKEETAFQAVIPKQIERKTCDPKVKFVKNIDLFNQLHFLFCLK

SEQ ID NO: 5598 - protein, 1062 aa, Homo sapiens
MESQEFIVLYTHQKMKKSKVWQDGILKITHLGNKAILYDDKGACLESLFLKCLEVKPGDDLESDRYLITVEEVKVAGAIGIVKQNVNKEAPELNSRTFISSGRSLGCQPSGLKRKFTGFQGPRQVPKKMVIMESGESAASHEAKKTGPTIFSPFCSMPPLFPTVGKKDVNNILADPENIVTYKNRERNAMDFSSVFSPSFQINPEVLCEENYFCSPVNSGNKLSDSLLTNEPVKRDSLASHYSGVSQNIRSKAQILALLKSESSSSCEELNSEMTEHFPQKQPQGSLKIATKPKYLIQQEECAEMKSTENLYYQHQSENTMRNKSRWAMYLSSQSSPIHSSTVDGNDTERKPKAQEDDVNSNLKDLSLQKIIQFVETYAEERKKYNVDQSVGNNDPSWNQEVKLEIPSFNESSSLQVTCSSAENDGILSESDIQEDNKIPFNQNDKGCIKGSVLIKENAQEVNTCGTLEKEYEQSESSLPELKHLQIESSNNSRISDDITDMISESKMDNESLNSIHESLSNVTQPFLEVTFNLNNFETSDTEEESQESNKISQDSESWVKDILVNDGNSCFQKRSENTNCEEIEGEHLPFLTSVSDKPTVTFPVKETLPSQFCDKTYVGFDMGICKTENTGKEIEEYSDTLSNFESFKWTDAVYGDNKEDANKPIQEVRINYDFALPPNKSKGINMNLHIPHIQNQIAENSNLFSEDAQPQPFILGSDLDKNDEHVLPSTSSSDNSVQLLNTNQNHYECIALDKSNTHISNSLFYPLGKKHLISKDTEAHISEPEDLGKIRSPPPDHVEVETAREGKQYWNPRNSSELSGLVNTISILKSLCEHSTALDSLEILKKKNTVFQQGTQQTYEPDSPPEVRKPFITVVSPKSPHLHKDSQQILKEDEVELSEPLQSVQFSSSGSKEETAFQAVIPKQIERKTCDPKPVEFQGHQVKGSATSGVMVRGHSSQLGCSQFPDSTEYENFMTETPELPSTCMQIDFLQVTSPEENISTLSPVSTFSLNSRDEDFMVEFSETSLKARTLPDDLHFLNLEGSRYHIALISVYSFKMKFFI

SEQ ID NO: 5599 - protein, 927 aa, Homo sapiens
MESQEFIVLYTHQKMKKSKVWQDGILKITHLGNKAILYDDKGACLESLFLKCLEVKPGDDLESDRYLITVEEVKVAGAIGIVKQNVNKEAPELNSRTFISSGRSLGCQPSGLKRKFTGFQGPRQVPKKMVIMESGESAASHEAKKTGPTIFSPFCSMPPLFPTVGKKDVNNILADPENIVTYKNRERNAMDFSSVFSPSFQINPEVLCEENYFCSPVNSGNKLSDSLLTNEPVKRDSLASHYSGVSQNIRSKAQILALLKSESSSSCEELNSEMTEHFPQKQPQGSLKIATKPKYLIQQEECAEMKSTENLYYQHQSENTMRNKSRWAMYLSSQSSPIHSSTVDGNDTERKPKAQEDDVNSNLKDLSLQKIIQFVETYAEERKKYNVDQSVGNNDPSWNQEVKLEIPSFNESSSLQVTCSSAENDGILSESDIQEDNKIPFNQNDKGCIKGSVLIKENAQEVNTCGTLEKEYEQSESSLPELKHLQIESSNNSRISDDITDMISESKMDNESLNSIHESLSNVTQPFLEVTFNLNNFETSDTEEESQESNKISQDSESWVKDILVNDGNSCFQKRSENTNCEEIEGEHLPFLTSVSDKPTVTFPVKETLPSQFCDKTYVGFDMGICKTENTGKEIEEYSDTLSNFESFKWTDAVYGDNKEDANKPIQEVRINYDFALPPNKSKGINMNLHIPHIQNQIAENSNLFSEDAQPQPFILGSDLDKNDEHVLPSTSSSDNSVQLLNTNQNHYECIALDKSNTHISNSLFYPLGKKHLISKDTEAHISEPEDLGKIRSPPPDHVEVETAREGKQYWNPRNSSELSGLVNTISILKSLCEHSTALDSLEILKKKNTVFQQGTQQTYEPDSPPEVRKPFITVVSPKSPHLHKDSQQILKEDEVELSEPLQSVQTGSYSVTQTRVQWHSHSSLQP

SEQ ID NO: 5600 - protein, 915 aa, Homo sapiens
MFQAILYDDKGACLESLFLKCLEVKPGDDLESDRYLITVEEVKVAGAIGIVKQNVNKEAPELNSRTFISSGRSLGCQPSGLKRKFTGFQGPRQVPKKMVIMESGESAASHEAKKTGPTIFSPFCSMPPLFPTVGKKDVNNILADPENIVTYKNRERNAMDFSSVFSPSFQINPEVLCEENYFCSPVNSGNKLSDSLLTNEPVKRDSLASHYSGVSQNIRSKAQILALLKSESSSSCEELNSEMTEHFPQKQPQGSLKIATKPKYLIQQEECAEMKSTENLYYQHQSENTMRNKSRWAMYLSSQSSPIHSSTVDGNDTERKPKAQEDDVNSNLKDLSLQKIIQFVETYAEERKKYNVDQSVGNNDPSWNQEVKLEIPSFNESSSLQVTCSSAENDGILSESDIQEDNKIPFNQNDKGCIKGSVLIKENAQEVNTCGTLEKEYEQSESSLPELKHLQIESSNNSRISDDITDMISESKMDNESLNSIHESLSNVTQPFLEVTFNLNNFETSDTEEESQESNKISQDSESWVKDILVNDGNSCFQKRSENTNCEEIEGEHLPFLTSVSDKPTVTFPVKETLPSQFCDKTYVGFDMGICKTENTGKEIEEYSDTLSNFESFKWTDAVYGDNKEDANKPIQEVRINYDFALPPNKSKGINMNLHIPHIQNQIAENSNLFSEDAQPQPFILGSDLDKNDEHVLPSTSSSDNSVQLLNTNQNHYECIALDKSNTHISNSLFYPLGKKHLISKDTEAHISEPEDLGKIRSPPPDHVEVETAREGKQYWNPRNSSELSGLVNTISILKSLCEHSTALDSLEILKKKNTVFQQGTQQTYEPDSPPEVRKPFITVVSPKSPHLHKDSQQKTVKKKIKPTLPLRIFINVSRFFCVQLKKMVRLMYINSFISFPLNIVVLSYIINNSS

SEQ ID NO: 5601 - protein, 562 aa, Homo sapiens
MNYSTHLFQMPLFLKLFICFIFIRSSPTIVSNKRVSKRKFIPPAFTNVSTKFELLSLGATLKLASELIQVHKLNKDQATALIQIAQMMASHESIEEVKELQTHTFPITIIHGVFGAGKSYLLAVVILFFVQLFEKSEAPTIGNARPWKLLISSSTNVAVDRVLLGLLSLGFENFIRVGSVRKIAKPILPYSLHAGSENESEQLKELHALMKEDLTPTERVYVRKSIEQHKLGTNRTLLKQVRVVGVTCAACPFPCMNDLKFPVVVLDECSQITEPASLLPIARFECEKLILVGDPKQLPPTIQGSDAAHENGLEQTLFDRLCLMGHKPILLRTQYRCHPAISAIANDLFYKGALMNGVTEIERSPLLEWLPTLCFYNVKGLEQIERDNSFHNVAEATFTLKLIQSLIASGIAGSMIGVITLYKSQMYKLCHLLSAVDFHHPDIKTVQVSTVDAFQGAEKEIIILSCVRTRQVGFIDSEKRMNVALTRGKRHLLIVGNLACLRKNQLWGRVIQHCEGREDGLQHANQYEPQLNHLLKDYFEKQVEEKQKKKSEKEKSKDKSHS

SEQ ID NO: 5602 - protein, 325 aa, Homo sapiens
MEGLEENGGVVQVGELLPCKICGRTFFPVALKKHGPICQKTATKKRKTFDSSRQRAEGTDIPTVKPLKPRPEPPKKPSNWRRKHEEFIATIRAAKGLDQALKEGGKLPPPPPPSYDPDYIQCPYCQRRFNENAADRHINFCKEQAARISNKGKFSTDTKGKPTSRTQVYKPPALKKSNSPGTASSGSSRLPQPSGAGKTVVGVPSGKVSSSSSSLGNKLQTLSPSHKGIAAPHAGANVKPRNSTPPSLARNPAPGVLTNKRKTYTESYIARPDGDCASSLNGGNIKGIEGHSPGNLPKFCHECGTKYPVEWAKFCCECGIRRMIL

SEQ ID NO: 5603 - protein, 653 aa, Homo sapiens
MASRLPTAWSCEPVTFEDVTLGFTPEEWGLLDLKQKSLYREVMLENYRNLVSVEHQLSKPDVVSQLEEAEDFWPVERGIPQDTIPEYPELQLDPKLDPLPAESPLMNIEVVEVLTLNQEVAGPRNAQIQALYAEDGSLSADAPSEQVQQQGKHPGDPEAARQRFRQFRYKDMTGPREALDQLRELCHQWLQPKARSKEQILELLVLEQFLGALPVKLRTWVESQHPENCQEVVALVEGVTWMSEEEVLPAGQPAEGTTCCLEVTAQQEEKQEDAAICPVTVLPEEPVTFQDVAVDFSREEWGLLGPTQRTEYRDVMLETFGHLVSVGWETTLENKELAPNSDIPEEEPAPSLKVQESSRDCALSSTLEDTLQGGVQEVQDTVLKQMESAQEKDLPQKKHFDNRESQANSGALDTNQVSLQKIDNPESQANSGALDTNQVLLHKIPPRKRLRKRDSQVKSMKHNSRVKIHQKSCERQKAKEGNGCRKTFSRSTKQITFIRIHKGSQVCRCSECGKIFRNPRYFSVHKKIHTGERPYVCQDCGKGFVQSSSLTQHQRVHSGERPFECQECGRTFNDRSAISQHLRTHTGAKPYKCQDCGKAFRQSSHLIRHQRTHTGERPYACNKCGKAFTQSSHLIGHQRTHNRTKRKKKQPTS

SEQ ID NO: 5604 - protein, 621 aa, Homo sapiens
MASRLPTAWSCEPVTFEDVTLGFTPEEWGLLDLKQKSLYREVMLENYRNLVSVEYPELQLDPKLDPLPAESPLMNIEVVEVLTLNQEVAGPRNAQIQALYAEDGSLSADAPSEQVQQQGKHPGDPEAARQRFRQFRYKDMTGPREALDQLRELCHQWLQPKARSKEQILELLVLEQFLGALPVKLRTWVESQHPENCQEVVALVEGVTWMSEEEVLPAGQPAEGTTCCLEVTAQQEEKQEDAAICPVTVLPEEPVTFQDVAVDFSREEWGLLGPTQRTEYRDVMLETFGHLVSVGWETTLENKELAPNSDIPEEEPAPSLKVQESSRDCALSSTLEDTLQGGVQEVQDTVLKQMESAQEKDLPQKKHFDNRESQANSGALDTNQVSLQKIDNPESQANSGALDTNQVLLHKIPPRKRLRKRDSQVKSMKHNSRVKIHQKSCERQKAKEGNGCRKTFSRSTKQITFIRIHKGSQVCRCSECGKIFRNPRYFSVHKKIHTGERPYVCQDCGKGFVQSSSLTQHQRVHSGERPFECQECGRTFNDRSAISQHLRTHTGAKPYKCQDCGKAFRQSSHLIRHQRTHTGERPYACNKCGKAFTQSSHLIGHQRTHNRTKRKKKQPTS

SEQ ID NO: 5605 - protein, 548 aa, Homo sapiens
MNIEVVEVLTLNQEVAGPRNAQIQALYAEDGSLSADAPSEQVQQQGKHPGDPEAARQRFRQFRYKDMTGPREALDQLRELCHQWLQPKARSKEQILELLVLEQFLGALPVKLRTWVESQHPENCQEVVALVEGVTWMSEEEVLPAGQPAEGTTCCLEVTAQQEEKQEDAAICPVTVLPEEPVTFQDVAVDFSREEWGLLGPTQRTEYRDVMLETFGHLVSVGWETTLENKELAPNSDIPEEEPAPSLKVQESSRDCALSSTLEDTLQGGVQEVQDTVLKQMESAQEKDLPQKKHFDNRESQANSGALDTNQVSLQKIDNPESQANSGALDTNQVLLHKIPPRKRLRKRDSQVKSMKHNSRVKIHQKSCERQKAKEGNGCRKTFSRSTKQITFIRIHKGSQVCRCSECGKIFRNPRYFSVHKKIHTGERPYVCQDCGKGFVQSSSLTQHQRVHSGERPFECQECGRTFNDRSAISQHLRTHTGAKPYKCQDCGKAFRQSSHLIRHQRTHTGERPYACNKCGKAFTQSSHLIGHQRTHNRTKRKKKQPTS

SEQ ID NO: 5606 - protein, 372 aa, Homo sapiens
MLQEPVTFQDVAVDFSREEWGLLGPTQRTEYRDVMLETFGHLVSVGWETTLENKELAPNSDIPEEEPAPSLKVQESSRDCALSSTLEDTLQGGVQEVQDTVLKQMESAQEKDLPQKKHFDNRESQANSGALDTNQVSLQKIDNPESQANSGALDTNQVLLHKIPPRKRLRKRDSQVKSMKHNSRVKIHQKSCERQKAKEGNGCRKTFSRSTKQITFIRIHKGSQVCRCSECGKIFRNPRYFSVHKKIHTGERPYVCQDCGKGFVQSSSLTQHQRVHSGERPFECQECGRTFNDRSAISQHLRTHTGAKPYKCQDCGKAFRQSSHLIRHQRTHTGERPYACNKCGKAFTQSSHLIGHQRTHNRTKRKKKQPTS

SEQ ID NO: 5607 - protein, 371 aa, Homo sapiens
MDTRSGSQCSVTPEAIRNNEELVLPPRISRVNGWSLPLHYFRVVTWAVFVGLSLATFRIFIPLLPHSWKYIAYVVTGGIFSFHLVVHLIASCIDPADSNVRLMKNYSQPMPLFDRSKHAHVIQNQFCHLCKVTVNKKTKHCISCNKCVSGFDHHCKWINNCVGSRNYWFFFSTVASATAGMLCLIAILLYVLVQYLVNPRVLRTDPRYEDVKNMNTWLLFLPLFPVQVQTLIVVIIRMLVLLLDLLGLVQLGQLLIFHIYLKAKKMTTFEYLINTRKEESSKHQAVRKDPYVQMDKGFLQQGAGALGSSAQGVKAKSSLLIYKCPCHFCTSVNQDGDSKAQEADDAPSTSTLGLQQETTEPMKTDSAESED

SEQ ID NO: 5608 - protein, 222 aa, Homo sapiens
MAGAEPFLADGNQELFPCEVCGRRFAADVLERHGPICKKLFNRKRKPFSSLKQRLQGTDIPTVKKTPQSKSPPVRKSNWRQQHEDFINAIRSAKQCMLAIKEGRPLPPPPPPSLNPDYIQRPYCMRRFNESAAERHTNFCKDQSSRRVFNPAQTAAKLASRAQGRAQMGPKKEPTVTSAVGALLQNRVLVATNEVPTKSGLAMDPASGAKLRQGFSKSSKKD

SEQ ID NO: 5609 - protein, 391 aa, Homo sapiens
MLRPGGAEEAAQLPLRRASAPVPVPSPAAPDGSRASARLGLACLLLLLLLTLPARVDTSWWYIGALGARVICDNIPGLVSRQRQLCQRYPDIMRSVGEGAREWIRECQHQFRHHRWNCTTLDRDHTVFGRVMLRSSREAAFVYAISSAGVVHAITRACSQGELSVCSCDPYTRGRHHDQRGDFDWGGCSDNIHYGVRFAKAFVDAKEKRLKDARALMNLHNNRCGRTAVRRFLKLECKCHGVSGSCTLRTCWRALSDFRRTGDYLRRRYDGAVQVMATQDGANFTAARQGYRRATRTDLVYFDNSPDYCVLDKAAGSLGTAGRVCSKTSKGTDGCEIMCCGRGYDTTRVTRVTQCECKFHWCCAVRCKECRNTVDVHTCKAPKKAEWLDQT

SEQ ID NO: 5610 - protein, 372 aa, Homo sapiens
MLDGLGVVAISIFGIQLKTEGSLRTAVPGIPTQSAFNKCLQRYIGALGARVICDNIPGLVSRQRQLCQRYPDIMRSVGEGAREWIRECQHQFRHHRWNCTTLDRDHTVFGRVMLRSSREAAFVYAISSAGVVHAITRACSQGELSVCSCDPYTRGRHHDQRGDFDWGGCSDNIHYGVRFAKAFVDAKEKRLKDARALMNLHNNRCGRTAVRRFLKLECKCHGVSGSCTLRTCWRALSDFRRTGDYLRRRYDGAVQVMATQDGANFTAARQGYRRATRTDLVYFDNSPDYCVLDKAAGSLGTAGRVCSKTSKGTDGCEIMCCGRGYDTTRVTRVTQCECKFHWCCAVRCKECRNTVDVHTCKAPKKAEWLDQT

SEQ ID NO: 5611 - protein, 241 aa, Homo sapiens
MWTVRTEGGHFPLHSPTFSWRNVAFLLLLSLALEWTSAMLTKKIKHKPGLCPKERLTCTTELPDSCNTDFDCKEYQKCCFFACQKKCMDPFQEPCMLPVRHGNCNHEAQRWHFDFKNYRCTPFKYRGCEGNANNFLNEDACRTACMLIVKDGQCPLFPFTERKECPPSCHSDIDCPQTDKCCESRCGFVCARAWTVKKGFCPRKPLLCTKIDKPKCLQDEECPLVEKCCSHCGLKCMDPRR

SEQ ID NO: 5612 - protein, 333 aa, Homo sapiens
MESSGNPESTTFFYYDLQSQPCENQAWVFATLATTVLYCLVFLLSLVGNSLVLWVLVKYESLESLTNIFILNLCLSDLVFACLLPVWISPYHWGWVLGDFLCKLLNMIFSISLYSSIFFLTIMTIHRYLSVVSPLSTLRVPTLRCRVLVTMAVWVASILSSILDTIFHKVLSSGCDYSELTWYLTSVYQHNLFFLLSLGIILFCYVEILRTLFRSRSKRRHRTVKLIFAIVVAYFLSWGPYNFTLFLQTLFRTQIIRSCEAKQQLEYALLICRNLAFSHCCFNPVLYVFVGVKFRTHLKHVLRQFWFCRLQAPSPASIPHSPGAFAYEGASFY

SEQ ID NO: 5613 - protein, 357 aa, Homo sapiens
MRPPPALALAGLCLLALPAAAASYFGLTGREVLTPFPGLGTAAAPAQGGAHLKQCDLLKLSRRQKQLCRREPGLAETLRDAAHLGLLECQFQFRHERWNCSLEGRMGLLKRGFKETAFLYAVSSAALTHTLARACSAGRMERCTCDDSPGLESRQAWQWGVCGDNLKYSTKFLSNFLGSKRGNKDLRARADAHNTHVGIKAVKSGLRTTCKCHGVSGSCAVRTCWKQLSPFRETGQVLKLRYDSAVKVSSATNEALGRLELWAPARQGSLTKGLAPRSGDLVYMEDSPSFCRPSKYSPGTAGRVCSREASCSSLCCGRGYDTQSRLVAFSCHCQVQWCCYVECQQCVQEELVYTCKH

SEQ ID NO: 5614 - protein, 609 aa, Homo sapiens
MSGWESYYKTEGDEEAEEEQEENLEASGDYKYSGRDSLIFLVDASKAMFESQSEDELTPFDMSIQCIQSVYISKIISSDRDLLAVVFYGTEKDKNSVNFKNIYVLQELDNPGAKRILELDQFKGQQGQKRFQDMMGHGSDYSLSEVLWVCANLFSDVQFKMSHKRIMLFTNEDNPHGNDSAKASRARTKAGDLRDTGIFLDLMHLKKPGGFDISLFYRDIISIAEDEDLRVHFEESSKLEDLLRKVRAKETRKRALSRLKLKLNKDIVISVGIYNLVQKALKPPPIKLYRETNEPVKTKTRTFNTSTGGLLLPSDTKRSQIYGSRQIILEKEETEELKRFDDPGLMLMGFKPLVLLKKHHYLRPSLFVYPEESLVIGSSTLFSALLIKCLEKEVAALCRYTPRRNIPPYFVALVPQEEELDDQKIQVTPPGFQLVFLPFADDKRKMPFTEKIMATPEQVGKMKAIVEKLRFTYRSDSFENPVLQQHFRNLEALALDLMEPEQAVDLTLPKVEAMNKRLGSLVDEFKELVYPPDYNPEGKVTKRKHDNEGSGSKRPKVEYSEEELKTHISKGTLGKFTVPMLKEACRAYGLKSGLKKQELLEALTKHFQD

SEQ ID NO: 5615 - protein, 568 aa, Homo sapiens
MSGWESYYKTEGDEEAEEEQEENLEASGDYKYSGRDSLIFLVDASKAMFESQSEDELTPFDMSIQELDNPGAKRILELDQFKGQQGQKRFQDMMGHGSDYSLSEVLWVCANLFSDVQFKMSHKRIMLFTNEDNPHGNDSAKASRARTKAGDLRDTGIFLDLMHLKKPGGFDISLFYRDIISIAEDEDLRVHFEESSKLEDLLRKVRAKETRKRALSRLKLKLNKDIVISVGIYNLVQKALKPPPIKLYRETNEPVKTKTRTFNTSTGGLLLPSDTKRSQIYGSRQIILEKEETEELKRFDDPGLMLMGFKPLVLLKKHHYLRPSLFVYPEESLVIGSSTLFSALLIKCLEKEVAALCRYTPRRNIPPYFVALVPQEEELDDQKIQVTPPGFQLVFLPFADDKRKMPFTEKIMATPEQVGKMKAIVEKLRFTYRSDSFENPVLQQHFRNLEALALDLMEPEQAVDLTLPKVEAMNKRLGSLVDEFKELVYPPDYNPEGKVTKRKHDNEGSGSKRPKVEYSEEELKTHISKGTLGKFTVPMLKEACRAYGLKSGLKKQELLEALTKHFQD

SEQ ID NO: 5616 - protein, 380 aa, Homo sapiens
MKKSIGILSPGVALGMAGSAMSSKFFLVALAIFFSFAQVVIEANSWWSLGMNNPVQMSEVYIIGAQPLCSQLAGLSQGQKKLCHLYQDHMQYIGEGAKTGIKECQYQFRHRRWNCSTVDNTSVFGRVMQIGSRETAFTYAVSAAGVVNAMSRACREGELSTCGCSRAARPKDLPRDWLWGGCGDNIDYGYRFAKEFVDARERERIHAKGSYESARILMNLHNNEAGRRTVYNLADVACKCHGVSGSCSLKTCWLQLADFRKVGDALKEKYDSAAAMRLNSRGKLVQVNSRFNSPTTQDLVYIDPSPDYCVRNESTGSLGTQGRLCNKTSEGMDGCELMCCGRGYDQFKTVQTERCHCKFHWCCYVKCKKCTEIVDQFVCK

SEQ ID NO: 5617 - protein, 365 aa, Homo sapiens
MAGSAMSSKFFLVALAIFFSFAQVVIEANSWWSLGMNNPVQMSEVYIIGAQPLCSQLAGLSQGQKKLCHLYQDHMQYIGEGAKTGIKECQYQFRHRRWNCSTVDNTSVFGRVMQIGSRETAFTYAVSAAGVVNAMSRACREGELSTCGCSRAARPKDLPRDWLWGGCGDNIDYGYRFAKEFVDARERERIHAKGSYESARILMNLHNNEAGRRTVYNLADVACKCHGVSGSCSLKTCWLQLADFRKVGDALKEKYDSAAAMRLNSRGKLVQVNSRFNSPTTQDLVYIDPSPDYCVRNESTGSLGTQGRLCNKTSEGMDGCELMCCGRGYDQFKTVQTERCHCKFHWCCYVKCKKCTEIVDQFVCK

SEQ ID NO: 5618 - protein, 421 aa, Homo sapiens
MASFPPRVNEKEIVRLRTIGELLAPAAPFDKKCGRENWTVAFAPDGSYFAWSQGHRTVKLVPWSQCLQNFLLHGTKNVTNSSSLRLPRQNSDGGQKNKPREHIIDCGDIVWSLAFGSSVPEKQSRCVNIEWHRFRFGQDQLLLATGLNNGRIKIWDVYTGKLLLNLVDHTEVVRDLTFAPDGSLILVSASRDKTLRVWDLKDDGNMMKVLRGHQNWVYSCAFSPDSSMLCSVGASKAVFLWNMDKYTMIRKLEGHHHDVVACDFSPDGALLATASYDTRVYIWDPHNGDILMEFGHLFPPPTPIFAGGANDRWVRSVSFSHDGLHVASLADDKMVRFWRIDEDYPVQVAPLSNGLCCAFSTDGSVLAAGTHDGSVYFWATPRQVPSLQHLCRMSIRRVMPTQEVQELPIPSKLLEFLSYRI

SEQ ID NO: 5619 - protein, 275 aa, Homo sapiens
MASFPPRVNEKEIGKLLLNLVDHTEVVRDLTFAPDGSLILVSASRDKTLRVWDLKDDGNMMKVLRGHQNWVYSCAFSPDSSMLCSVGASKAVFLWNMDKYTMIRKLEGHHHDVVACDFSPDGALLATASYDTRVYIWDPHNGDILMEFGHLFPPPTPIFAGGANDRWVRSVSFSHDGLHVASLADDKMVRFWRIDEDYPVQVAPLSNGLCCAFSTDGSVLAAGTHDGSVYFWATPRQVPSLQHLCRMSIRRVMPTQEVQELPIPSKLLEFLSYRI

SEQ ID NO: 5620 - protein, 244 aa, Homo sapiens
MASFPPRVNEKEIVRLRTIGELLAPAAPFDKKCGRENWTVAFAPDGSYFAWSQGHRTVKLVPWSQCLQNFLLHGTKNVTNSSSLRLPRQNSDGGQKNKPREHIIDCGDIVWSLAFGSSVPEKQSRCVNIEWHRFRFGQDQLLLATGLNNGRIKIWDVYTGKLLLNLVDHTEVVRDLTFAPDGSLILVSASRDKTLRVWDLKDDGNMMKVLRGHQNWVYSCAFSPDSSMLCSVGASKAVVAAILV

SEQ ID NO: 5621 - protein, 219 aa, Homo sapiens
MLNIILIKFSSFSIRCAILSSVCLNEAITFAFLLQVFLWNMDKYTMIRKLEGHHHDVVACDFSPDGALLATASYDTRVYIWDPHNGDILMEFGHLFPPPTPIFAGGANDRWVRSVSFSHDGLHVASLADDKMVRFWRIDEDYPVQVAPLSNGLCCAFSTDGSVLAAGTHDGSVYFWATPRQVPSLQHLCRMSIRRVMPTQEVQELPIPSKLLEFLSYRI

SEQ ID NO: 5622 - protein, 449 aa, Homo sapiens
MDRVYEIPEEPNVDPVSSLEEDVIRGANPRFTFPFSILFSTFLYCGEAASALYMVRIYRKNSETYWMTYTFSFFMFSSIMVQLTLIFVHRDLAKDKPLSLFMHLILLGPVIRCLEAMIKYLTLWKKEEQEEPYVSLTRKKMLIDGEEVLIEWEVGHSIRTLAMHRNAYKRMSQIQAFLGSVPQLTYQLYVSLISAEVPLGRVVLMVFSLVSVTYGATLCNMLAIQIKYDDYKIRLGPLEVLCITIWRTLEITSRLLILVLFSATLKLKAVPFLVLNFLIILFEPWIKFWRSGAQMPNNIEKNFSRVGTLVVLISVTILYAGINFSCWSALQLRLADRDLVDKGQNWGHMGLHYSVRLVENVIMVLVFKFFGVKVLLNYCHSLIALQLIIAYLISIGFMLLFFQYLHPLRSLFTHNVVDYLHCVCCHQHPRTRVENSEPPFETEARQSVV

SEQ ID NO: 5623 - protein, 245 aa, Homo sapiens
MVFSLVSVTYGATLCNMLAIQIKYDDYKIRLGPLEVLCITIWRTLEITSRLLILVLFSATLKLKAVPFLVLNFLIILFEPWIKFWRSGAQMPNNIEKNFSRVGTLVVLISVTILYAGINFSCWSALQLRLADRDLVDKGQNWGHMGLHYSVRLVENVIMVLVFKFFGVKVLLNYCHSLIALQLIIAYLISIGFMLLFFQYLHPLRSLFTHNVVDYLHCVCCHQHPRTRVENSEPPFETEARQSVV

SEQ ID NO: 5624 - protein, 677 aa, Homo sapiens
MAAGGGGSCDPLAPAGVPCAFSPHSQAYFALASTDGHLRVWETANNRLHQEYVPSAHLSGTCTCLAWAPARLQAKESPQRKKRKSEAVGMSNQTDLLALGTAVGSILLYSTVKGELHSKLISGGHDNRVNCIQWHQDSGCLYSCSDDKHIVEWNVQTCKVKCKWKGDNSSVSSLCISPDGKMLLSAGRTIKLWVLETKEVYRHFTGHATPVSSLMFTTIRPPNESQPFDGITGLYFLSGAVHDRLLNVWQVRSENKEKSAVMSFTVTDEPVYIDLTLSENKEEPVKLAVVCRDGQVHLFEHILNGYCKKPLTSNCTIQIATPGKGKKSTPKPIPILAAGFCSDKMSLLLVYGSWFQPTIERVALNSREPHMCLVRDISNCWAPKVETAITKVRTPVMNSEAKVLVPGIPGHHAAIKPAPPQTEQVESKRKSGGNEVSIEERLGAMDIDTHKKGKEDLQTNSFPVLLTQGLESNDFEMLNKVLQTRNVNLIKKTVLRMPLHTIIPLLQELTKRLQGHPNSAVLMVQWLKCVLTVHASYLSTLPDLVPQLGTLYQLMESRVKTFQKLSHLHGKLILLITQVTASEKTKGATSPGQKAKLVYEEESSEEESDDEIADKDSEDNWDEDEEESESEKDEDVEEEDEDAEGKDEENGEDRDTASEKELNGDSDLDPENESEEE

SEQ ID NO: 5625 - protein, 664 aa, Homo sapiens
MPLRDKYCQTDHHHHGCCEPVYILEPGDPPLLQQPLQTSKSGIQQIIECFRSGTKQLKHILLKDVDTIFECKLCRSLFRGLPNLITHKKFYCPPSLQMDDNLPDVNDKQSQAINDLLEAIYPSVDKREYIIKLEPIETNQNAVFQYISRTDNPIEVTESSSTPEQTEVQIQETSTEQSKTVPVTDTEVETVEPPPVEIVTDEVAPTSDEQPQESQADLETSDNSDFGHQLICCLCRKEFNSRRGVRRHIRKVHKKKMEELKKYIETRKNPNQSSKGRSKNVLVPLSRSCPVCCKSFATKANVRRHFDEVHRGLRRDSITPDIATKPGQPLFLDSISPKKSFKTRKQKSSSKAEYNLTACKCLLCKRKYSSQIMLKRHMQIVHKITLSGTNSKREKGPNNTANSSEIKVKVEPADSVESSPPSITHSPQNELKGTNHSNEKKNTPAAQKNKVKQDSESPKSTSPSAAGGQQKTRKPKLSAGFDFKQLYCKLCKRQFTSKQNLTKHIELHTDGNNIYVKFYKCPLCTYETRRKRDVIRHITVVHKKSSRYLGKITASLEIRAIKKPIDFVLNKVAKRGPSRDEAKHSDSKHDGTSNSPSKKYEVADVGIEVKVTKNFSLHRCNKCGKAFAKKTYLEHHKKTHKANASNSPEGNKTKGRSTRSKALV

SEQ ID NO: 5626 - protein, 577 aa, Homo sapiens
MEESHFNSNPYFWPSIPTVSGQIENTMFINKMKDQLLPEKGCGLAPPHYPTLLTVPASVSLPSGISMDTESKSDQLTPHSQASVTQNITVVPVPSTGLMTAGVSCSQRWRREGSQSRGPGLVITSPSGSLVTTASSAQTFPISAPMIVSALPPGSQALQVVPDLSKKVASTLTEEGGGGGGGGGSVAPKPPRGRKKKRMLESGLPEMNDPYVLSPEDDDDHQKDGKTYRCRMCSLTFYSKSEMQIHSKSHTETKPHKCPHCSKTFANSSYLAQHIRIHSGAKPYSCNFCEKSFRQLSHLQQHTRIHSKMHTETIKPHKCPHCSKTFANTSYLAQHLRIHSGAKPYNCSYCQKAFRQLSHLQQHTRIHTGDRPYKCAHPGCEKAFTQLSNLQSHRRQHNKDKPFKCHNCHRAYTDAASLEVHLSTHTVKHAKVYTCTICSRAYTSETYLMKHMRKHNPPDLQQQVQAAAAAAAVAQAQAQAQAQAQAQAQAQAQAQASQASQQQQQQQQQQQQQQQQPPPHFQSPGAAPQGGGGGDSNPNPPPQCSFDLTPYKTAEHHKDICLTVTTSTIQVEHLASS

SEQ ID NO: 5627 - protein, 516 aa, Homo sapiens
MEESHFNSNPYFWPSIPTVSGQIENTMFINKMKDQLLPEKGCGLAPPHYPTLLTVPASVSLPSGISMDTESKSDQLTPHSQASVTQNITVVPVPSTGLMTAGVSCSQRWRREGSQSRGPGLVITSPSGSLVTTASSAQTFPISAPMIVSALPPGSQALQVVPDLSKKVASTLTEEGGGGGGGGGSVAPKPPRGRKKKRMLESGLPEMNDPYVLSPEDDDDHQKDGKTYRCRMCSLTFYSKSEMQIHSKSHTETKPHKCPHCSKTFANSSYLAQHIRIHSGAKPYSCNFCEKSFRQLSHLQQHTRIHTGDRPYKCAHPGCEKAFTQLSNLQSHRRQHNKDKPFKCHNCHRAYTDAASLEVHLSTHTVKHAKVYTCTICSRAYTSETYLMKHMRKHNPPDLQQQVQAAAAAAAVAQAQAQAQAQAQAQAQAQAQAQASQASQQQQQQQQQQQQQQQQPPPHFQSPGAAPQGGGGGDSNPNPPPQCSFDLTPYKTAEHHKDICLTVTTSTIQVEHLASS

SEQ ID NO: 5628 - protein, 461 aa, Homo sapiens
MEESHFNSNPYFWPSIPTVSGQIENTMFINKMKDQLLPEKGCGLAPPHYPTLLTVPASVSLPSGISMDTESKSDQLTPHSQASVTQNITVVPVPSTGLMTAALQVVPDLSKKVASTLTEEGGGGGGGGGSVAPKPPRGRKKKRMLESGLPEMNDPYVLSPEDDDDHQKDGKTYRCRMCSLTFYSKSEMQIHSKSHTETKPHKCPHCSKTFANSSYLAQHIRIHSGAKPYSCNFCEKSFRQLSHLQQHTRIHTGDRPYKCAHPGCEKAFTQLSNLQSHRRQHNKDKPFKCHNCHRAYTDAASLEVHLSTHTVKHAKVYTCTICSRAYTSETYLMKHMRKHNPPDLQQQVQAAAAAAAVAQAQAQAQAQAQAQAQAQAQAQASQASQQQQQQQQQQQQQQQQPPPHFQSPGAAPQGGGGGDSNPNPPPQCSFDLTPYKTAEHHKDICLTVTTSTIQVEHLASS

SEQ ID NO: 5629 - protein, 145 aa, Homo sapiens
MEFPDLGKHCSEKTCKQLDFLPVKCDACKQDFCKDHFPYAAHKCPFAFQKDVHVPVCPLCNTPIPVKKGQIPDVVVGDHIDRDCDSHPGKKKEKIFTYRCSKEGCKKKEMLQMVCAQCHGNFCIQHRHPLDHSCRHGSRPTIKAG

SEQ ID NO: 5630 - protein, 646 aa, Homo sapiens
MNECNVHKEGYNELNQYLTTTQSKIFQCDKYVKVFHKLLNSNRHNTKHTGKKPFKCKKCGKSFCMLLHLCQHKRIHIRENSYRCEECGKAFIWFSTLTRHRRVHTGEKSYKYECGKSFNQDSNLTTHKRIHTGQKPYKCEECGTSFYQFSYLTRHKLIHTREKPYKCEQYGKTFNQSSTLTGHKIIHNGEKPYKCEECGKAFSIFSTPTKHKIIHTEEKSHRCEEYCKAYKESSHLTTHKRIHTGEKPYKCEECGKAFSIFSTLTKHKIIHTEEKSHRCEECGKAYKESSHLTTHKRIHTGEKPYKCEECGKTFSVFSILTKHKIIHTEEKPYKCEECGKAFKRSSTLTKHRIIHTEEKPYKCEECGKAFNQSSTLSIHKIIHTGEKPYKCEECGKAFKRSSTLTIHKMIHTGEKPYKCEECGKAFNRSSHLTTHKRIHTGHKPYKCKECGKSFSVFSTLTKHKIIHTDKKPYKCEECGKAFNRSSILSIHKKIHTGEKPYKCEECGKAFKRSSHLAGHKQIHSVQKPYKCEECGKAFSIFSTLTKHKIIHTEEKPYKCEKCGKTFYRFSNLNTHKIIHTGEKPCKCEECGKAFNHSSNLIKHKLIHTGDKPYKCEACGKAFRRSSHLSRHKIIHIGIHTEETVQK

SEQ ID NO: 5631 - protein, 774 aa, Homo sapiens
MPGPPESLDMGPLTFRDVAIEFSLEEWQCLDTAQQDLYRKVMLENYRNLVFLGIAVSKPDLVTCLEQGKDPWNMKGHSTVVKPPVICSHFAEDFCPGPGIKDSFQKVILREYVKCGHKDLQLRKGCKSMNECNVHKEGYNELNQYLTTTQSKIFQCDKYVKVFHKLLNSNRHNTKHTGKKPFKCKKCGKSFCMLLHLCQHKRIHIRENSYRCEECGKAFIWFSTLTRHRRVHTGEKSYKYECGKSFNQDSNLTTHKRIHTGQKPYKCEECGTSFYQFSYLTRHKLIHTREKPYKCEQYGKTFNQSSTLTGHKIIHNGEKPYKCEECGKAFSIFSTPTKHKIIHTEEKSHRCEEYCKAYKESSHLTTHKRIHTGEKPYKCEECGKAFSIFSTLTKHKIIHTEEKSHRCEECGKAYKESSHLTTHKRIHTGEKPYKCEECGKTFSVFSILTKHKIIHTEEKPYKCEECGKAFKRSSTLTKHRIIHTEEKPYKCEECGKAFNQSSTLSIHKIIHTGEKPYKCEECGKAFKRSSTLTIHKMIHTGEKPYKCEECGKAFNRSSHLTTHKRIHTGHKPYKCKECGKSFSVFSTLTKHKIIHTDKKPYKCEECGKAFNRSSILSIHKKIHTGEKPYKCEECGKAFKRSSHLAGHKQIHSVQKPYKCEECGKAFSIFSTLTKHKIIHTEEKPYKCEKCGKTFYRFSNLNTHKIIHTGEKPCKCEECGKAFNHSSNLIKHKLIHTGDKPYKCEACGKAFRRSSHLSRHKIIHIGIHTEETVQK

SEQ ID NO: 5632 - protein, 103 aa, Homo sapiens
MPGPPESLDMGPLTFRDVAIEFSLEEWQCLDTAQQDLYRKVMLENYRNLVFLAGIAVSKPDLVTCLEQGKDPWNMKGHSTVVKPPVETGFHRFSQDGLYLLTS

SEQ ID NO: 5633 - protein, 277 aa, Homo sapiens
MVRLPLQCVLWGCLLTAVHPEPPTACREKQYLINSQCCSLCQPGQKLVSDCTEFTETECLPCGESEFLDTWNRETHCHQHKYCDPNLGLRVQQKGTSETDTICTCEEGWHCTSEACESCVLHRSCSPGFGVKQIATGVSDTICEPCPVGFFSNVSSAFEKCHPWTSCETKDLVVQQAGTNKTDVVCGPQDRLRALVVIPIIFGILFAILLVLVFIKKVAKKPTNKAPHPKQEPQEINFPDDLPGSNTAAPVQETLHGCQPVTQEDGKESRISVQERQ

SEQ ID NO: 5634 - protein, 203 aa, Homo sapiens
MVRLPLQCVLWGCLLTAVHPEPPTACREKQYLINSQCCSLCQPGQKLVSDCTEFTETECLPCGESEFLDTWNRETHCHQHKYCDPNLGLRVQQKGTSETDTICTCEEGWHCTSEACESCVLHRSCSPGFGVKQIATGVSDTICEPCPVGFFSNVSSAFEKCHPWTRSPGSAESPGGDPHHLRDPVCHPLGAGLYQKGGQEANQ

SEQ ID NO: 5635 - protein, 180 aa, Homo sapiens
MSRQANRGTESKKMSSELFTLTYGALVTQLCKDYENDEDVNKQLDKMGFNIGVRLIEDFLARSNVGRCHDFRETADVIAKVAFKMYLGITPSITNWSPAGDEFSLILENNPLVDFVELPDNHSSLIYSNLLCGVLRGALEMVQMAVEAKFVQDTLKGDGVTEIRMRFIRRIEDNLPAGEE

SEQ ID NO: 5636 - protein, 134 aa, Homo sapiens
MGFNIGVRLIEDFLARSNVGRCHDFRETADVIAKVAFKMYLGITPSITNWSPAGDEFSLILENNPLVDFVELPDNHSSLIYSNLLCGVLRGALEMVQMAVEAKFVQDTLKGDGVTEIRMRFIRRIEDNLPAGEE

SEQ ID NO: 5637 - protein, 210 aa, Homo sapiens
MVCGGFACSKNALCALNVVYMLVSLLLIGVAAWGKGLGLVSSIHIIGGVIAVGVFLLLIAVAGLVGAVNHHQVLLFFYMIILGLVFIFQFVISCSCLAINRSKQTDVINASWWVMSNKTRDELERSFDCCGLFNLTTLYQQDYDFCTAICKSQSPTCQMCGEKFLKHSDEALKILGGVGLFFSFTEILGVWLAMRFRNQKDPRANPSAFL

SEQ ID NO: 5638 - protein, 329 aa, Homo sapiens
MAEAGTGEPSPSVEGEHGTEYDTLPSDTVSLSDSDSDLSLPGGAEVEALSPMGLPGEEDSGPDEPPSPPSGLLPATVQPFHLRGMSSTFSQRSRDIFDCLEGAARRAPSSVAHTSMSDNGGFKRPLAPSGRSPVEGLGRAHRSPASPRVPPVPDYVAHPERWTKYSLEDVTEVSEQSNQATALAFLGSQSLAAPTDCVSSFNQDPSSCGEGRVIFTKPVRGVEARHERKRVLGKVGEPGRGGLGNPATDRGEGPVELAHLAGPGSPEAEEWGSHHGGLQEVEALSGSVHSGSVPGLPPVETVGFHGSRKRSRDHFRNKSSSPEDPGAEV

SEQ ID NO: 5639 - protein, 265 aa, Homo sapiens
MAEAGTGLLPATVQPFHLRGMSSTFSQRSRDIFDCLEGAARRAPSSVAHTSMSDNGGFKRPLAPSGRSPVEGLGRAHRSPASPRVPPVPDYVAHPERWTKYSLEDVTEVSEQSNQATALAFLGSQSLAAPTDCVSSFNQDPSSCGEGRVIFTKPVRGVEARHERKRVLGKVGEPGRGGLGNPATDRGEGPVELAHLAGPGSPEAEEWGSHHGGLQEVEALSGSVHSGSVPGLPPVETVGFHGSRKRSRDHFRNKSSSPEDPGAEV

SEQ ID NO: 5640 - protein, 51 aa, Homo sapiens
MVQECCSQSLYYEELHSYHIVPYASENAIYEMGYTSSHLEQNSQLLIYKMN

SEQ ID NO: 5641 - protein, 506 aa, Homo sapiens
MTSKPHSDWIPYSVLDDEGRNLRQQKLDRQRALLEQKQKKKRQEPLMVQANADGRPRSRRARQSEEQAPLVESYLSSSGSTSYQVQEADSLASVQLGATRPTAPASAKRTKAAATAGGQGGAARKEKKGKHKGTSGPAALAEDKSEAQGPVQILTVGQSDHAQDAGETAAGGGERPSGQDLRATMQRKGISSSMSFDEDEEDEEENSSSSSQLNSNTRPSSATSRKSVREAASAPSPTAPEQPVDVEVQDLEEFALRPAPQGITIKCRITRDKKGMDRGMYPTYFLHLDREDGKKVFLLAGRKRKKSKTSNYLISVDPTDLSRGGDSYIGKLRSNLMGTKFTVYDNGVNPQKASSSTLESGTLRQELAAVCYETNVLGFKGPRKMSVIVPGMNMVHERVSIRPRNEHETLLARWQNKNTESIIELQNKTPVWNDDTQSYVLNFHGRVTQASVKNFQIIHGNDPDYIVMQFGRVAEDVFTMDYNYPLCALQAFAIALSSFDSKLACE

SEQ ID NO: 5642 - protein, 561 aa, Homo sapiens
MGARTPLPSFWVSFFAETGILFPGGTPWPMGSQHSKQHRKPGPLKRGHRRDRRTTRRKYWKEGREIARVLDDEGRNLRQQKLDRQRALLEQKQKKKRQEPLMVQANADGRPRSRRARQSEEQAPLVESYLSSSGSTSYQVQEADSLASVQLGATRPTAPASAKRTKAAATAGGQGGAARKEKKGKHKGTSGPAALAEDKSEAQGPVQILTVGQSDHAQDAGETAAGGGERPSGQDLRATMQRKGISSSMSFDEDEEDEEENSSSSSQLNSNTRPSSATSRKSVREAASAPSPTAPEQPVDVEVQDLEEFALRPAPQGITIKCRITRDKKGMDRGMYPTYFLHLDREDGKKVFLLAGRKRKKSKTSNYLISVDPTDLSRGGDSYIGKLRSNLMGTKFTVYDNGVNPQKASSSTLESGTLRQELAAVCYETNVLGFKGPRKMSVIVPGMNMVHERVSIRPRNEHETLLARWQNKNTESIIELQNKTPVWNDDTQSYVLNFHGRVTQASVKNFQIIHGNDPDYIVMQFGRVAEDVFTMDYNYPLCALQAFAIALSSFDSKLACE

SEQ ID NO: 5643 - protein, 147 aa, Homo sapiens
MALKRIHKELNDLARDPPAQCSAGPVGDDMFHWQATIMGPNDSPYQGGVFFLTIHFPTDYPFKPPKVAFTTRIYHPNINSNGSICLDILRSQWSPALTISKVLLSICSLLCDPNPDDPLVPEIARIYKTDREKYNRIAREWTQKYAM

SEQ ID NO: 5644 - protein, 118 aa, Homo sapiens
MFHWQATIMGPNDSPYQGGVFFLTIHFPTDYPFKPPKVAFTTRIYHPNINSNGSICLDILRSQWSPALTISKVLLSICSLLCDPNPDDPLVPEIARIYKTDREKYNRIAREWTQKYAM

SEQ ID NO: 5645 - protein, 165 aa, Homo sapiens
MAGTALKRLMAEYKQLTLNPPEGIVAGPMNEENFFEWEALIMGPEDTCFEFGVFPAILSFPLDYPLSPPKMRFTCEMFHPNIYPDGRVCISILHAPGDDPMGYESSAERWSPVQSVEKILLSVVSMLAEPNDESGANVDASKMWRDDREQFYKIAKQIVQKSLGL

SEQ ID NO: 5646 - protein, 137 aa, Homo sapiens
MNEENFFEWEALIMGPEDTCFEFGVFPAILSFPLDYPLSPPKMRFTCEMFHPNIYPDGRVCISILHAPGDDPMGYESSAERWSPVQSVEKILLSVVSMLAEPNDESGANVDASKMWRDDREQFYKIAKQIVQKSLGL

SEQ ID NO: 5647 - protein, 530 aa, Homo sapiens
MEDDSLYLGGEWQFNHFSKLTSSRPDAAFAEIQRTSLPEKSPLSCETRVDLCDDLAPVARQLAPREKPPLSSRRPAAVGAGLQNMGNTCYVNASLQCLTYKPPLANYMLFREHSQTCHRHKGCMLCTMQAHITRALHIPGHVIQPSQALAAGFHRGKQEDAHEFLMFTVDAMRKACLPGHKQVDRHSKDTTLIHQIFGGYWRSQIKCLHCHGISDTFDPYLDIALDIQAAQSVQQALEQLVKPEELNGENAYHCGVCLQRAPASKTLTLHNSAKVLILVLKRFPDVTGNKIAKNVQYPECLDMQPYMSQQNTGPLVYVLYAVLVHAGWSCHNGHYSSYVKAQEGQWYKMDDAEVTASSITSVLSQQAYVLFYIQKSEWERHSESVSRGREPRALGVEDTDRRATQGELKRDHPCLQAPELDEHLVERATQESTLDHWKFLQEQNKTKPEFNVRRVEGTVPPDVLVIHQSKYKCRMKNHHPEQQSSLLNLSSTTPTDQESMNTGTLASLRGRTRRSKGKNKHSKRALLVCQ

SEQ ID NO: 5648 - protein, 530 aa, Homo sapiens
MEDDSLYLGGEWQFNHFSKLTSSRPDAAFAEIQRTSLPEKSPLSCETRVDLCDDLAPVARQLAPREKLPLSSRRPAAVGAGLQNMGNTCYVNASLQCLTYTPPLANYMLSREHSQTCHRHKGCMLCTMQAHITRALHNPGHVIQPSQALAAGFHRGKQEDAHEFLMFTVDAMKKACLPGHKQVDHHSKDTTLIHQIFGGYWRSQIKCLHCHGISDTFDPYLDIALDIQAAQSVQQALEQLVKPEELNGENAYHCGVCLQRAPASKTLTLHTSAKVLILVLKRFSDVTGNKIAKNVQYPECLDMQPYMSQTNTGPLVYVLYAVLVHAGWSCHNGHYFSYVKAQEGQWYKMDDAEVTASSITSVLSQQAYVLFYIQKSEWERHSESVSRGREPRALGAEDTDRRAKQGELKRDHPCLQAPELDEHLVERATQESTLDHWKFLQEQNKTKPEFNVRKVEGTLPPDVLVIHQSKYKCGMKNHHPEQQSSLLNLSSTTPTHQESMNTGTLASLRGRARRSKGKNKHSKRALLVCQ

SEQ ID NO: 5649 - protein, 358 aa, Homo sapiens
MDGVLFRAHQCQYVHPCVHVYVTVGLMDPLCERKEKASKQERENPLAHLAAWGLVGLHNIGQTCCLNSLIQVFVMNVDFARILKRITVPRGADEQRRSVPFQMLLLLEKMQDSRQKAVWPLELAYCLQKYNVPLFVQHDAAQLYLKLWNLIKDQIADVHLVERLQALYMIRMKDSLICLDCAMESSRNSSMLTLRLSFFDVDSKPLKTLEDALHCFFQPRELSSKSKCFCENCGKKTRGKQVLKLTHLPQTLTIHLMRFSIRNSQTRKICHSLYFPQSLDFSQILPMKRESCDAEEQSGGQYELFAVIAHVGMADSGHYCVYIRNAVDGKWFCFNDSNICLVSWEDIQCTYGNPNYHW

SEQ ID NO: 5650 - protein, 131 aa, Homo sapiens
MEEAGLCGLREKADMLCNSESHDILQHQDSNCSATSNKHLLEDEEGRDFITKNRSWVSPVHCTQESRRELPEQEVAPPSGQQALQCNRNKEKVLGKEVLLLMQALNTLSTPEEKLAALCKKYADLGNSPLL

SEQ ID NO: 5651 - protein, 1684 aa, Homo sapiens
MSWKRNYFSGGRGSVQGMFAPRSSTSIAPSKGLSNEPGQNSCFLNSALQVLWHLDIFRRSFRQLTTHKCMGDSCIFCALKGIFNQFQCSSEKVLPSDTLRSALAKTFQDEQRFQLGIMDDAAECFENLLMRIHFHIADETKEDICTAQHCISHQKFAMTLFEQCVCTSCGATSDPLPFIQMVHYISTTSLCNQAICMLERREKPSPSMFGELLQNASTMGDLRNCPSNCGERIRIRRVLMNAPQIITIGLVWDSDHSDLAEDVIHSLGTCLKLGDLFFRVTDDRAKQSELYLVGMICYYGKHYSTFFFQTKIRKWMYFDDAHVKEIGPKWKDVVTKCIKGHYQPLLLLYADPQGTPVSTQDLPPQAEFQSYSRTCYDSEDSGREPSISSDTRTDSSTESYPYKHSHHESVVSHFSSDSQGTVIYNVENDSMSQSSRDTGHLTDSECNQKHTSKKGSLIERKRSSGRVRRKGDEPQASGYHSEGETLKEKQAPRNASKPSSSTNRLRDFKETVSNMIHNRPSLASQTNVGSHCRGRGGDQPDKKPPRTLPLHSRDWEIESTSSESKSSSSSKYRPTWRPKRESLNIDSIFSKDKRKHCGYTQLSPFSEDSAKEFIPDEPSKPPSYDIKFGGPSPQYKRWGPARPGSHLLEQHPRLIQRMESGYESSERNSSSPVSLDAALPESSNVYRDPSAKRSAGLVPSWRHIPKSHSSSILEVDSTASMGGWTKSQPFSGEEISSKSELDELQEEVARRAQEQELRRKREKELEAAKGFNPHPSRFMDLDELQNQGRSDGFERSLQEAESVFEESLHLEQKGDCAAALALCNEAISKLRLALHGASCSTHSRALVDKKLQISIRKARSLQDRMQQQQSPQQPSQPSACLPTQAGTLSQPTSEQPIPLQVLLSQEAQLESGMDTEFGASSFFHSPASCHESHSSLSPESSAPQHSSPSRSALKLLTSVEVDNIEPSAFHRQGLPKAPGWTEKNSHHSWEPLDAPEGKLQGSRCDNSSCSKLPPQEGRGIAQEQLFQEKKDPANPSPVMPGIATSERGDEHSLGCSPSNSSAQPSLPLYRTCHPIMPVASSFVLHCPDPVQKTNQCLQGQSLKTSLTLKVDRGSEETYRPEFPSTKGLVRSLAEQFQRMQGVSMRDSTGFKDRSLSGSLRKNSSPSDSKPPFSQGQEKGHWPWAKQQSSLEGGDRPLSWEESTEHSSLALNSGLPNGETSSGGQPRLAEPDIYQEKLSQVRDVRSKDLGSSTDLGTSLPLDSWVNITRFCDSQLKHGAPRPGMKSSPHDSHTCVTYPERNHILLHPHWNQDTEQETSELESLYQASLQASQAGCSGWGQQDTAWHPLSQTGSADGMGRRLHSAHDPGLSKTSTAEMEHGLHEARTVRTSQATPCRGLSRECGEDEQYSAENLRRISRSLSGTVVSEREEAPVSSHSFDSSNVRKPLETGHRCSSSSSLPVIHDPSVFLLGPQLYLPQPQFLSPDVLMPTMAGEPNRLPGTSRSVQQFLAMCDRGETSQGAKYTGRTLNYQSLPHRSRTDNSWAPWSETNQHIGTRFLTTPGCNPQLTYTATLPERSKGLQVPHTQSWSDLFHSPSHPPIVHPVYPPSSSLHVPLRSAWNSDPVPGSRTPGPRRVDMPPDDDWRQSSYASHSGHRRTVGEGFLFVLSDAPRREQIRARVLQHSQW

SEQ ID NO: 5652 - protein, 403 aa, Homo sapiens
MSWKRNYFSGGRGSVQGMFAPRSSTSIAPSKGLSNEPGQNSCFLNSALQVLWHLDIFRRSFRQLTTHKCMGDSCIFCALKGIFNQFQCSSEKVLPSDTLRSALAKTFQDEQRFQLGIMDDAAECFENLLMRIHFHIADETKEDICTAQHCISHQKFAMTLFEQCVCTSCGATSDPLPFIQMVHYISTTSLCNQAICMLERREKPSPSMFGELLQNASTMGDLRNCPSNCGERIRIRRVLMNAPQIITIGLVWDSDHSDLAEDVIHSLGTCLKLGDLFFRVTDDRAKQSELYLVGMICYYGKHYSTFFFQTKIRKWMYFDDAHVKEIGPKWKDVVTKCIKGHYQPLLLLYADPQGTPVSTQDLPPQAEFQSYSRTCYDSEDSGEQPGSLPLLSPHPMRSNSWDS

SEQ ID NO: 5653 - protein, 893 aa, Homo sapiens
MSWKRNYFSGGRGSVQGMFAPRSSTSIAPSKGLSNEPGQNSCFLNSALQVLWHLDIFRRSFRQLTTHKCMGDSCIFCALKGIFNQFQCSSEKVLPSDTLRSALAKTFQDEQRFQLGIMDDAAECFENLLMRIHFHIADETKEDICTAQHCISHQKFAMTLFEQCVCTSCGATSDPLPFIQMVHYISTTSLCNQAICMLERREKPSPSMFGELLQNASTMGDLRNCPSNCGERIRIRRVLMNAPQIITIGLVWDSDHSDLAEDVIHSLGTCLKLGDLFFRVTDDRAKQSELYLVGMICYYGKHYSTFFFQTKIRKWMYFDDAHVKEIGPKWKDVVTKCIKGHYQPLLLLYADPQGTPVSTQDLPPQAEFQSYSRTCYDSEDSGREPSISSDTRTDSSTESYPYKHSHHESVVSHFSSDSQGTVIYNVENDSMSQSSRDTGHLTDSECNQKHTSKKGSLIERKRSSGRVRRKGDEPQASGYHSEGETLKEKQAPRNASKPSSSTNRLRDFKETVSNMIHNRPSLASQTNVGSHCRGRGGDQPDKKPPRTLPLHSRDWEIESTSSESKSSSSSKYRPTWRPKRESLNIDSIFSKDKRKHCGYTQLSPFSEDSAKEFIPDEPSKPPSYDIKFGGPSPQYKRWGPARPGSHLLEQHPRLIQRMESGYESSERNSSSPVSLDAALPESSNVYRDPSAKRSAGLVPSWRHIPKSHSSSILEVDSTASMGGWTKSQPFSGEEISSKSELDELQEEVARRAQEQELRRKREKELEAAKGFNPHPSRFMDLDELQNQGRSDGFERSLQEAESVFEESLHLEQKGDCAAALALCNEAISKLRLALHGASCSTHSRALVDKKLQISIRKARSLQDRMQQQQSPQQPSQPSACLPTQAGTLSQPTR

SEQ ID NO: 5654 - protein, 1534 aa, Homo sapiens
MSWKRNYFSGGRGSVQGMFAPRSSTSIAPSKGLSNEPGQNSCFLNSALQVLWHLDIFRRSFRQLTTHKCMGDSCIFCALKGIFNQFQCSSEKVLPSDTLRSALAKTFQDEQRFQLGIMDDAAECFLFFRVTDDRAKQSELYLVGMICYYGKHYSTFFFQTKIRKWMYFDDAHVKEIGPKWKDVVTKCIKGHYQPLLLLYADPQGTPVSTQDLPPQAEFQSYSRTCYDSEDSGREPSISSDTRTDSSTESYPYKHSHHESVVSHFSSDSQGTVIYNVENDSMSQSSRDTGHLTDSECNQKHTSKKGSLIERKRSSGRVRRKGDEPQASGYHSEGETLKEKQAPRNASKPSSSTNRLRDFKETVSNMIHNRPSLASQTNVGSHCRGRGGDQPDKKPPRTLPLHSRDWEIESTSSESKSSSSSKYRPTWRPKRESLNIDSIFSKDKRKHCGYTQLSPFSEDSAKEFIPDEPSKPPSYDIKFGGPSPQYKRWGPARPGSHLLEQHPRLIQRMESGYESSERNSSSPVSLDAALPESSNVYRDPSAKRSAGLVPSWRHIPKSHSSSILEVDSTASMGGWTKSQPFSGEEISSKSELDELQEEVARRAQEQELRRKREKELEAAKGFNPHPSRFMDLDELQNQGRSDGFERSLQEAESVFEESLHLEQKGDCAAALALCNEAISKLRLALHGASCSTHSRALVDKKLQISIRKARSLQDRMQQQQSPQQPSQPSACLPTQAGTLSQPTSEQPIPLQVLLSQEAQLESGMDTEFGASSFFHSPASCHESHSSLSPESSAPQHSSPSRSALKLLTSVEVDNIEPSAFHRQGLPKAPGWTEKNSHHSWEPLDAPEGKLQGSRCDNSSCSKLPPQEGRGIAQEQLFQEKKDPANPSPVMPGIATSERGDEHSLGCSPSNSSAQPSLPLYRTCHPIMPVASSFVLHCPDPVQKTNQCLQGQSLKTSLTLKVDRGSEETYRPEFPSTKGLVRSLAEQFQRMQGVSMRDSTGFKDRSLSGSLRKNSSPSDSKPPFSQGQEKGHWPWAKQQSSLEGGDRPLSWEESTEHSSLALNSGLPNGETSSGGQPRLAEPDIYQEKLSQVRDVRSKDLGSSTDLGTSLPLDSWVNITRFCDSQLKHGAPRPGMKSSPHDSHTCVTYPERNHILLHPHWNQDTEQETSELESLYQASLQASQAGCSGWGQQDTAWHPLSQTGSADGMGRRLHSAHDPGLSKTSTAEMEHGLHEARTVRTSQATPCRGLSRECGEDEQYSAENLRRISRSLSGTVVSEREEAPVSSHSFDSSNVRKPLETGHRCSSSSSLPVIHDPSVFLLGPQLYLPQPQFLSPDVLMPTMAGEPNRLPGTSRSVQQFLAMCDRGETSQGAKYTGRTLNYQSLPHRSRTDNSWAPWSETNQHIGTRFLTTPGCNPQLTYTATLPERSKGLQVPHTQSWSDLFHSPSHPPIVHPVYPPSSSLHVPLRSAWNSDPVPGSRTPGPRRVDMPPDDDWRQSSYASHSGHRRTVGEGFLFVLSDAPRREQIRARVLQHSQW

SEQ ID NO: 5655 - protein, 772 aa, Homo sapiens
MDTEFGASSFFHSPASCHESHSSLSPESSAPQHSSPSRSALKLLTSVEVDNIEPSAFHRQGLPKAPGWTEKNSHHSWEPLDAPEGKLQGSRCDNSSCSKLPPQEGRGIAQEQLFQEKKDPANPSPVMPGIATSERGDEHSLGCSPSNSSAQPSLPLYRTCHPIMPVASSFVLHCPDPVQKTNQCLQGQSLKTSLTLKVDRGSEETYRPEFPSTKGLVRSLAEQFQRMQGVSMRDSTGFKDRSLSGSLRKNSSPSDSKPPFSQGQEKGHWPWAKQQSSLEGGDRPLSWEESTEHSSLALNSGLPNGETSSGGQPRLAEPDIYQEKLSQVRDVRSKDLGSSTDLGTSLPLDSWVNITRFCDSQLKHGAPRPGMKSSPHDSHTCVTYPERNHILLHPHWNQDTEQETSELESLYQASLQASQAGCSGWGQQDTAWHPLSQTGSADGMGRRLHSAHDPGLSKTSTAEMEHGLHEARTVRTSQATPCRGLSRECGEDEQYSAENLRRISRSLSGTVVSEREEAPVSSHSFDSSNVRKPLETGHRCSSSSSLPVIHDPSVFLLGPQLYLPQPQFLSPDVLMPTMAGEPNRLPGTSRSVQQFLAMCDRGETSQGAKYTGRTLNYQSLPHRSRTDNSWAPWSETNQHIGTRFLTTPGCNPQLTYTATLPERSKGLQVPHTQSWSDLFHSPSHPPIVHPVYPPSSSLHVPLRSAWNSDPVPGSRTPGPRRVDMPPDDDWRQSSYASHSGHRRTVGEGFLFVLSDAPRREQIRARVLQHSQW

SEQ ID NO: 5656 - protein, 725 aa, Homo sapiens
MDTEFGASSFFHSPASCHESHSSLSPESSAPQHSSPSRSALKLLTSVEVDNIEPSAFHRQGLPKAPGWTEKNSHHSWEPLDAPEGKLQGSRCDNSSCSKLPPQEGRGIAQEQLFQEKKDPANPSPVMPGIATSERGDEHSLGCSPSNSSAQPSLPLYRTCHPIMPVASSFVLHCPDPVQKTNQCLQGQSLKTSLTLKVDRGSEETYRPEFPSTKGLVRSLAEQFQRMQGVSMRDSTGFKDRSLSGSLRKNSSPSDSKPPFSQGQEKGHWPWAKQQSSLEGGDRPLSWEESTEHSSLALNSGLPNGETSSGGQPRLAEPDIYQEKLSQVRDVRSKDLGSSTDLGTSLPLDSWVNITRFCDSQLKHGAPRPGMKSSPHDSHTCVTYPERNHILLHPHWNQDTEQETSELESLYQASLQASQAGCSGWGQQDTAWHPLSQTGSADGMGRRLHSAHDPGLSKTSTAEMEHGLHEARTVRTSQDSSNVRKPLETGHRCSSSSSLPVIHDPSVFLLGPQLYLPQPQFLSPDVLMPTMAGEPNRLPGTSRSVQQFLAMCDRGETSQGAKYTGRTLNYQSLPHRSRTDNSWAPWSETNQHIGTRFLTTPGCNPQLTYTATLPERSKGLQVPHTQSWSDLFHSPSHPPIVHPVYPPSSSLHVPLRSAWNSDPVPGSRTPGPRRVDMPPDDDWRQSSYASHSGHRRTVGEGFLFVLSDAPRREQIRARVLQHSQW

SEQ ID NO: 5657 - protein, 767 aa, Homo sapiens
MDTEFGASSFFHSPASCHESHSSLSPESSAPQHSSPSRSALKLLTSVEVDNIEPSAFHRQGLPKAPGWTEKNSHHSWEPLDAPEGKLQGSRCDNSSCSKLPPQEGRGIAQEQLFQEKKDPANPSPVMPGIATSERGDEHSLGCSPSNSSAQPSLPLYRTCHPIMPVASSFVLHCPDPVQKTNQCLQGQSLKTSLTLKVDRGSEETYRPEFPSTKGLVRSLAEQFQRMQGVSMRDSTGFKDRSLSGSLRKNSSPSDSKPPFSQGQEKGHWPWAKQQSSLEGGDRPLSWEESTEHSSLALNSGLPNGETSSGGQPRLAEPDIYQEKLSQVRDVRSKDLGSSTDLGTSLPLDSWVNITRFCDSQLKHGAPRPGMKSSPHDSHTCVTYPERNHILLHPHWNQDTEQETSELESLYQASLQASQAGCSGWGQQDTAWHPLSQTGSADGMGRRLHSAHDPGLSKTSTAEMEHGLHEARTATPCRGLSRECGEDEQYSAENLRRISRSLSGTVVSEREEAPVSSHSFDSSNVRKPLETGHRCSSSSSLPVIHDPSVFLLGPQLYLPQPQFLSPDVLMPTMAGEPNRLPGTSRSVQQFLAMCDRGETSQGAKYTGRTLNYQSLPHRSRTDNSWAPWSETNQHIGTRFLTTPGCNPQLTYTATLPERSKGLQVPHTQSWSDLFHSPSHPPIVHPVYPPSSSLHVPLRSAWNSDPVPGSRTPGPRRVDMPPDDDWRQSSYASHSGHRRTVGEGFLFVLSDAPRREQIRARVLQHSQW

SEQ ID NO: 5658 - protein, 623 aa, Homo sapiens
MPPKVTSELLRQLRQAMRNSEYVTEPIQAYIIPSGDAHQSEYIAPCDCRRAFVSGFDGSAGTAIITEEHAAMWTDGRYFLQAAKQMDSNWTLMKMGLKDTPTQEDWLVSVLPEGSRVGVDPLIIPTDYWKKMAKVLRSAGHHLIPVKENLVDKIWTDRPERPCKPLLTLGLDYTGISWKDKVADLRLKMAERNVMWFVVTALDEIAWLFNLRGSDVEHNPVFFSYAIIGLETIMLFIDGDRIDAPSVKEHLLLDLGLEAEYRIQVHPYKSILSELKALCADLSPREKVWVSDKASYAVSETIPKDHRCCMPYTPICIAKAVKNSAESEGMRRAHIKDAVALCELFNWLEKEVPKGGVTEISAADKAEEFRRQQADFVDLSFPTISSTGPNGAIIHYAPVPETNRTLSLDEVYLIDSGAQYKDGTTDVTRTMHFGTPTAYEKECFTYVLKGHIAVSAAVFPTGTKGHLLDSFARSALWDSGLDYLHGTGHGVGSFLNVHEGPCGISYKTFSDEPLEAGMIVTDEPGYYEDGAFGIRIENVVLVVPVKTKYNFNNRGSLTFEPLTLVPIQTKMIDVDSLTDKECDWLNNYHLTCRDVIGKELQKQGRQEALEWLIRETQPISKQH

SEQ ID NO: 5659 - protein, 599 aa, Homo sapiens
MPPKVTSELLRQLRQAMRNSEYVTEPIQAYIIPSGDAHQSEYIAPCDCRRAFVSGFDGSAGTAIITEEHAAMWTDGRYFLQAAKQMDSNWTLMKMGLKDTPTQEDWLVSVLPEGSRVGVDPLIIPTDYWKKMAKVLRSAGHHLIPVKENLVDKIWTDRPERPCKPLLTLGLDYTGISWKDKVADLRLKMAERNVMWFVVTALDEIAWLFNLRGSDVEHNPVFFSYAIIGLETIMLFIDGDRIDAPSVKEHLLLDLGLEAEYRIQVHPYKSILSELKALCADLSPREKVWVSDKASYAVSETIPKDHRCCMPYTPICIAKAVKNSAESEGMRRAHIKDAVALCELFNWLEKEVPKGGVTEISAADKAEEFRRQQADFVDLSFPTISSTGPNGAIIHYADGTTDVTRTMHFGTPTAYEKECFTYVLKGHIAVSAAVFPTGTKGHLLDSFARSALWDSGLDYLHGTGHGVGSFLNVHEGPCGISYKTFSDEPLEAGMIVTDEPGYYEDGAFGIRIENVVLVVPVKTKYNFNNRGSLTFEPLTLVPIQTKMIDVDSLTDKECDWLNNYHLTCRDVIGKELQKQGRQEALEWLIRETQPISKQH

SEQ ID NO: 5660 - protein, 666 aa, Homo sapiens
MAASRKPPRVRVNHQDFQLRNLRIIEPNEVTHSGDTGVETDGRMPPKVTSELLRQLRQAMRNSEYVTEPIQAYIIPSGDAHQSEYIAPCDCRRAFVSGFDGSAGTAIITEEHAAMWTDGRYFLQAAKQMDSNWTLMKMGLKDTPTQEDWLVSVLPEGSRVGVDPLIIPTDYWKKMAKVLRSAGHHLIPVKENLVDKIWTDRPERPCKPLLTLGLDYTGISWKDKVADLRLKMAERNVMWFVVTALDEIAWLFNLRGSDVEHNPVFFSYAIIGLETIMLFIDGDRIDAPSVKEHLLLDLGLEAEYRIQVHPYKSILSELKALCADLSPREKVWVSDKASYAVSETIPKDHRCCMPYTPICIAKAVKNSAESEGMRRAHIKDAVALCELFNWLEKEVPKGGVTEISAADKAEEFRRQQADFVDLSFPTISSTGPNGAIIHYAPVPETNRTLSLDEVYLIDSGAQYKDGTTDVTRTMHFGTPTAYEKECFTYVLKGHIAVSAAVFPTGTKGHLLDSFARSALWDSGLDYLHGTGHGVGSFLNVHEGPCGISYKTFSDEPLEAGMIVTDEPGYYEDGAFGIRIENVVLVVPVKTKYNFNNRGSLTFEPLTLVPIQTKMIDVDSLTDKECDWLNNYHLTCRDVIGKELQKQGRQEALEWLIRETQPISKQH

SEQ ID NO: 5661 - protein, 642 aa, Homo sapiens
MAASRKPPRVRVNHQDFQLRNLRIIEPNEVTHSGDTGVETDGRMPPKVTSELLRQLRQAMRNSEYVTEPIQAYIIPSGDAHQSEYIAPCDCRRAFVSGFDGSAGTAIITEEHAAMWTDGRYFLQAAKQMDSNWTLMKMGLKDTPTQEDWLVSVLPEGSRVGVDPLIIPTDYWKKMAKVLRSAGHHLIPVKENLVDKIWTDRPERPCKPLLTLGLDYTGISWKDKVADLRLKMAERNVMWFVVTALDEIAWLFNLRGSDVEHNPVFFSYAIIGLETIMLFIDGDRIDAPSVKEHLLLDLGLEAEYRIQVHPYKSILSELKALCADLSPREKVWVSDKASYAVSETIPKDHRCCMPYTPICIAKAVKNSAESEGMRRAHIKDAVALCELFNWLEKEVPKGGVTEISAADKAEEFRRQQADFVDLSFPTISSTGPNGAIIHYADGTTDVTRTMHFGTPTAYEKECFTYVLKGHIAVSAAVFPTGTKGHLLDSFARSALWDSGLDYLHGTGHGVGSFLNVHEGPCGISYKTFSDEPLEAGMIVTDEPGYYEDGAFGIRIENVVLVVPVKTKYNFNNRGSLTFEPLTLVPIQTKMIDVDSLTDKECDWLNNYHLTCRDVIGKELQKQGRQEALEWLIRETQPISKQH

SEQ ID NO: 5662 - protein, 472 aa, Homo sapiens
MASPPRCSPTAHDRECKLPPPSAPASEYCPGKLSWGTMARALGRFKLSIPHTHLLATLDPLALDREPPPHLLPEKHQVPEKLIWGDQDPLSKIPFKILSGHEHAVSTCHFCVDDTKLLSGSYDCTVKLWDPVDGSVVRDFEHRPKAPVVECSITGDSSRVIAASYDKTVRAWDLETGKLLWKVRYDTFIVSCKFSPDGKYVVSGFDVDHGICIMDAENITTVSVIKDHHTRSITSCCFDPDSQRVASVSLDRCIKIWDVTSQATLLTITKAHSNAISNCCFTFSGHFLCTSSWDKNLKIWNVHTGEFRNCGACVTLMQGHEGSVSSCHFARDSSFLISGGFDRTVAIWDVAEGYRKLSLKGHNDWVMDVAISNNKKWILSASKDRTMRLWNIEEIDEIPLVIKYKKAVGLKLKQCERCDRPFSIFKSDTSSEMFTQCVFCRIDTRGLPADTSSSSSSSERENSPPPRGSKDD

SEQ ID NO: 5663 - protein, 426 aa, Homo sapiens
MASPPRCSPTAHDRECKLPPPSAPASEYCPGKLSWGTMARALGRFKLSIPHTHLLATLDPLALDREPPPHLLPEKHQVPEKLIWGDQDPLSKIPFKILSGHEHAVSTCHFCVDDTKLLSGSYDCTVKLWDPVDGSVVRDFEHRPKAPVVECSITGDSSRVIAASYDKTVRAWDLETGKLLWKVRYDTFIVSCKFSPDGKYVVSGFDVDHGICIMDAENITTVSVIKDHHTRSITSCCFDPDSQRVASVSLDRCIKIWDVTSQATLLTITKAHSNAISNCCFTFSGHFLCTSSWDKNLKIWNVHTGEFRNCGACVTLMQGHEGSVSSCHFARDSSFLISGGFDRTVAIWDVAEGYRKLSLKGHNDWVMDVAISNNKKWILSASKDRTMRLWNIEEIDEIPLVIKYKKAVGLKLKQEKKEAYLKLKQG

SEQ ID NO: 5664 - protein, 744 aa, Homo sapiens
MQKEMKMIKDEDVHFDLAVKKTPSFPHCLQPVASRGKAPQRHPFPEALRGPFSQFRYEPPPGDLDGFPGVFEGAGSRKRKSMPTKMPYNHPAEEVTLALHSEENKNHGLPNLPLLFPQPPRPKYDSQMIDLCNVGFQFYRSLEHFGGKPVKQEPIKPSAVWPQPTPTPFLPTPYPYYPKVHPGLMFPFFVPSSSPFPFSRHTFLPKQPPEPLLPRKAEPQESEETKQKVERVDVNVQIDDSYYVDVGGSQKRWQCPTCEKSYTSKYNLVTHILGHSGIKPHACTHCGKLFKQLSHLHTHMLTHQGTRPHKCQVCHKAFTQTSHLKRHMMQHSEVKPHNCRVCGRGFAYPSELKAHEAKHASGRENICVECGLDFPTLAQLKRHLTTHRGPIQYNCSECDKTFQYPSQLQNHMMKHKDIRPYICSECGMEFVQPHHLKQHSLTHKGVKEHKCGICGREFTLLANMKRHVLIHTNIRAYQCHLCYKSFVQKQTLKAHMIVHSDVKPFKCKLCGKEFNRMHNLMGHMHLHSDSKPFKCLYCPSKFTLKGNLTRHMKVKHGVMERGLHSQGLGRGRIALAQTAGVLRSLEQEEPFDLSQKRRAKVPVFQSDGESAQGSHCHEEEEEDNCYEVEPYSPGLAPQSQQLCTPEDLSTKSEHAPEVLEEACKEEKEDASKGEWEKRSKGDLGAEGGQERDCAGRDECLSLRAFQSTRRGPSFSDYLYFKHRDESLKELLERKMEKQAVLLGI

SEQ ID NO: 5665 - protein, 121 aa, Homo sapiens
MGRIFLDHIGGTRLFSCANCDTILTNRSELISTRFTGATGRAFLFNKVVNLQYSEVQDRVMLTGRHMVRDVSCKNCNSKLGWIYEFATEDSQRYKEGRVILERALVRESEGFEEHVPSDNS

SEQ ID NO: 5666 - protein, 524 aa, Homo sapiens
MAKRPGPPGSREMGLLTFRDIAIEFSLEEWQCLDCAQRNLYRDVMLENYRNLVSLGIAVSKPDLITCLEQNKESQNIKRNEMVAKHPVTRSHFTQDLQPEQGIKDSLQKVIPRTYGKCGHEKLQFKKCCKSVGEYEVHKGGYSEVNQCLSTTQNKIFQTHKYVKVFGKFSNSNRDKTRYTGNKHFKCNKYGKSFCMLSHLNQHQVIHTREKSYKCKECGKSFNCSSNHTTHKIIHTGEKPYRCEECGKAFSWSANLTRHKRTHTGEKPYTCEECGQAFRRSSALTNHKRIHTGERPYKCEECGKAFSVSSTLTDHKRIHTGEKPCRCEECGKAFSWSSNLTRHKRIHTREKPYACEECGQAFSLSSNLMRHRRIHTGEKPYTCEECGQDFRRSSALTIHKRIHTGERPYKCEECGKVFSLSSTLTDHKRIHTGERPYKCEECGKAFSLSSTLTDHKRIHTGERPYTCEECGKAFNCSSTLMQHKRIHTGEKPYKCEECEQAFKWHSSLAKHKIIHTGEKPYKCE

SEQ ID NO: 5667 - protein, 936 aa, Homo sapiens
MALTQGPLTFRDVAIEFSQEEWKSLDPVQKALYWDVMLENYRNLVFLGILPKCMTKELPPIGNSNTGEKCQTVTLERHECYDVENFYLREIQKNLQDLEFQWKDGEINYKEVPMTYKNNLNGKRGQHSQEDVENKCIENQLTLSFQSRLTELQKFQTEGKIYECNQSEKTVNNSSLVSPLQRILPSVQTNISKKYENEFLQLSLPTQLEKTHIREKPYMCKGCGKAFRVSSSLINHQMVHTTEKPYKCNECGKAFHRGSLLTIHQIVHTRGKPYQCGVCGKIFRQNSDLVNHRRSHTGEKPYKCNECGKSFSQSYNLAIHQRIHTGEKPYKCNECGKTFKQGSCLTTHQIIHTGEKPYQCDICGKVFRQNSNLVNHQRIHTGEKPYKCNICGKSFSQSSNLATHQTVHSGNKPYKCDECGKTFKRSSSLTTHQIIHTGEKPYTCDVCDKVFSQRSQLARHQRSHTGEKPYKCNECGKVFSQTSHLVGHRRIHTGEKPYKCDKCGKAFKQGSLLTRHKIIHTREKRYQCGECGKVFSENSCLVRHLRIHTGEQPYKCNVCGKVFNYSGNLSIHKRIHTGEKPFQCNECGTVFRNYSCLARHLRIHTGQKPYKCNVCGKVFNDSGNLSNHKRIHTGEKPFQCNECGKVFSYYSCLARHRKIHTGEKPYKCNDCGKAYTQRSSLTKHLIIHTGEKPYNCNEFGGAFIQSSKLARYHRNPTGEKPHKCSHCGRTFSHITGLTYHQRRHTGEMPYKCIECGQVFNSTSNLARHRRIHTGEKPYKCNECGKVFRHQSTLARHRSIHTGEKPYVCNECGKAFRVRSILVNHQKMHTGDKPYKCNECGKAFIERSKLVYHQRNHTGEKPYKCIECGKAFGRFSCLNKHQMIHSGEKPYKCNECGKSFISRSGLTKHQTKHTAESLKTKFNVEKPLDVLLTSGFK

SEQ ID NO: 5668 - protein, 402 aa, Homo sapiens
MAVVATLRLSAQGTVTFEDVAVKFTQEEWNLLSEAQRCLYRDVTLENLALMSSLGCWCGVEDEAAPSKQSIYIQRETQVRTPVTGVSPKKAHPCEMCGPILGDILHVADHQGTHHKQKLHRCEAWGNKLYDSGNFHQHQNEHIGEKPYRGSVEEALFVKRCKLHVSGESSVFSESGKDFLPRSGLLQQEASHTGEKSNSKTECVSPFQCGGAHYSHGDSMKHFSTKHILSQHQRLLPREECYVCCECGKSFSKYVSFSNHQRVHSGKRPYECGECEKSFSQKSSLIQHQQFHTGGKPYGCEECGKYFSLEGYLRRHQKVHAGKGPYECGECGKSFSSNVNLKSHQRIHTGERPYKCGECEKSFSRKPSLSYHQRFGRPRWVDHKDRKEFKTSLGNIVKSCLF

SEQ ID NO: 5669 - protein, 527 aa, Homo sapiens
MYQPEDDNNSDVTSDDDMTRNRRESSPPHSVHSFSGDRDWDRRGRSRDMEPRDRWSHTRNPRSRMPPRDLSLPVVAKTSFEMDREDDRDSRAYESRSQDAESYQNVVDLAEDRKPHNTIQDNMENYRKLLSLGFLAQDSVPAEKRNTEMLDNLPSAGSQFPDFKHLGTFLVFEELVTFEDVLVDFSPEELSSLSAAQRNLYREVMLENYRNLVSLGHQFSKPDIISRLEEEESYAMETDSRHTVICQGESHDDPLEPHQGNQEKLLTPITMNDPKTLTPERSYGSDEFERSSNLSKQSKDPLGKDPQEGTAPGICTSPQSASQENKHNRCEFCKRTFSTQVALRRHERIHTGKKPYECKQCAEAFYLMPHLNRHQKTHSGRKTSGCNEGRKPSVQCANLCERVRIHSQEDYFECFQCGKAFLQNVHLLQHLKAHEAARVLPPGLSHSKTYLIRYQRKHDYVGERACQCCDCGRVFSRNSYLIQHYRTHTQERPYQCQLCGKCFGRPSYLTQHYQLHSQEKTVECDHC

SEQ ID NO: 5670 - protein, 539 aa, Homo sapiens
MRRGPWERWSLASHRLDAGLCTCPREESREIRAGQIVLKAMAQGLVTFRDVAIEFSLEEWKCLEPAQRDLYREVTLENFGHLASLGLSISKPDVVSLLEQGKEPWMIANDVTGPWCPDLESRCEKFLQKDIFEIGAFNWEIMESLKCSDLEGSDFRADWECEGQFERQVNEECYFKQVNVTYGHMPVFQHHTSHTVRQSRETGEKLMECHECGKAFSRGSHLIQHQKIHTGEKPFGCKECGKAFSRASHLVQHQRIHTGEKPYDCKDCGKAFGRTSELILHQRLHTGVKPYECKECGKTFRQHSQLILHQRTHTGEKPYVCKDCGKAFIRGSQLTVHRRIHTGARPYECKECGKAFRQHSQLTVHQRIHTGEKPYECKECGKGFIHSSEVTRHQRIHSGEKPYECKECGKAFRQHAQLTRHQRVHTGDRPYECKDCGKAFSRSSYLIQHQRIHTGDKPYECKECGKAFIRVSQLTHHQRIHTCEKPYECRECGMAFIRSSQLTEHQRIHPGIKPYECRECGQAFILGSQLIEHYRIHTG

SEQ ID NO: 5671 - protein, 499 aa, Homo sapiens
MAQGLVTFRDVAIEFSLEEWKCLEPAQRDLYREVTLENFGHLASLGLSISKPDVVSLLEQGKEPWMIANDVTGPWCPDLESRCEKFLQKDIFEIGAFNWEIMESLKCSDLEGSDFRADWECEGQFERQVNEECYFKQVNVTYGHMPVFQHHTSHTVRQSRETGEKLMECHECGKAFSRGSHLIQHQKIHTGEKPFGCKECGKAFSRASHLVQHQRIHTGEKPYDCKDCGKAFGRTSELILHQRLHTGVKPYECKECGKTFRQHSQLILHQRTHTGEKPYVCKDCGKAFIRGSQLTVHRRIHTGARPYECKECGKAFRQHSQLTVHQRIHTGEKPYECKECGKGFIHSSEVTRHQRIHSGEKPYECKECGKAFRQHAQLTRHQRVHTGDRPYECKDCGKAFSRSSYLIQHQRIHTGDKPYECKECGKAFIRVSQLTHHQRIHTCEKPYECRECGMAFIRSSQLTEHQRIHPGIKPYECRECGQAFILGSQLIEHYRIHTG

SEQ ID NO: 5672 - protein, 515 aa, Homo sapiens
MEAREPGRPTPTYHLVPNTSQSQVEEDVSSPPQRSSETMQLKKEISLLNGVSLVVGNMIGSGIFVSPKGVLVHTASYGMSLIVWAIGGLFSVVGALCYAELGTTITKSGASYAYILEAFGGFIAFIRLWVSLLVVEPTGQAIIAITFANYIIQPSFPSCDPPYLACRLLAAACICLLTFVNCAYVKWGTRVQDTFTYAKVVALIAIIVMGLVKLCQGHSEHFQDAFEGSSWDMGNLSLALYSALFSYSGWDTLNFVTEEIKNPERNLPLAIGISMPIVTLIYILTNVAYYTVLNISDVLSSDAVAVTFADQTFGMFSWTIPIAVALSCFGGLNASIFASSRLFFVGSREGHLPDLLSMIHIERFTPIPALLFNCTMALIYLIVEDVFQLINYFSFSYWFFVGLSVVGQLYLRWKEPKRPRPLKLSVFFPIVFCICSVFLVIVPLFTDTINSLIGIGIALSGVPFYFMGVYLPESRRPLFIRNVLAAITRGTQQLCFCVLTELDVAEEKKDERKTD

SEQ ID NO: 5673 - protein, 752 aa, Homo sapiens
MAEPASVTVTFDDVALYFSEQEWEILEKWQKQMYKQEMKTNYETLDSLGYAFSKPDLITWMEQGRMLLISEQGCLDKTRRTTSPPTDEQLNMKNTGKLLCFDDEGTPRTKEEDCRLNGPQKQDLCAALRGKERKILLAQTATFQSPSLRETEILNKKVSITAYDPDKKDLRHKPRETPGRLEIPTGPRCYSCYVCRKVFQVRRDLLKHKRSHSKSQLCRYPKYKNSSRGKSELRRTQRLLCQKKRFQCSECEKSYFLKGSLVTHQVVHTGQRPYPCPECDKTFRYRANLKKHLCLHRGERPFCCGECGRAFVQQCELTEHLRLHSGEKPFQCPQCDRCFRLKRGMKVHLTQHSGKRPFHCPECGRSFSRKAALKTHQRTHSEEKPFSCGECGRKFIYKIKLDEHIRVHTGEKPFSCPECNKSFRLKRSLKAHGLQHIGKRPFQCPECSRGFFWRNAMRAHQRLHSEQKPFPCAECGKRFTRPSKLACHTRVHDRQKEFPCGECKKTFSQQSRLTQHLKVHTTEKPFSCAECGRSFRRRAHLTEHTRLHSGEEPFQCPECDKSFSWKASMKFHQRMHRDEKPFACGECDKTYTHQSQLTEHLRLHSGEKPYQCPECEKTFRLKGNLKSHLLQHSGQKPFSCVMCGKSFTQQYRLTEHIRVHSGEKPFQCPECDKSYCIRGSLKVHLYKHSGERPFQCPECGKGFLQKRSLKAHLCLHSGERPFSCDECGRSFTYVGALKTHIAVHAKEKPSSL

SEQ ID NO: 5674 - protein, 919 aa, Homo sapiens
MEELTIWEQHTATLSKDPRRGFGIAISGGRDRPGGSMVVSDVVPGGPAEGRLQTGDHIVMVNGVSMENATSAFAIQILKTCTKMANITVKRPRRIHLPATKASPSSPGRQDSDEDDGPQRVEEVDQGRGYDGDSSSGSGRSWDERSRRPRPGRRGRAGSHGRRSPGGGSEANGLALVSGFKRLPRQDVQMKPVKSVLVKRRDSEEFGVKLGSQIFIKHITDSGLAARHRGLQEGDLILQINGVSSQNLSLNDTRRLIEKSEGKLSLLVLRDRGQFLVNIPPAVSDSDSSPLEDISDLASELSQAPPSHIPPPPRHAQRSPEASQTDSPVESPRLRRESSVDSRTISEPDEQRSELPRESSYDIYRVPSSQSMEDRGYSPDTRVVRFLKGKSIGLRLAGGNDVGIFVSGVQAGSPADGQGIQEGDQILQVNDVPFQNLTREEAVQFLLGLPPGEEMELVTQRKQDIFWKMVQSRVGDSFYIRTHFELEPSPPSGLGFTRGDVFHVLDTLHPGPGQSHARGGHWLAVRMGRDLREQERGIIPNQSRAEQLASLEAAQRAVGVGPGSSAGSNARAEFWRLRGLRRGAKKTTQRSREDLSALTRQGRYPPYERVVLREASFKRPVVILGPVADIAMQKLTAEMPDQFEIAETVSRTDSPSKIIKLDTVRVIAEKDKHALLDVTPSAIERLNYVQYYPIVVFFIPESRPALKALRQWLAPASRRSTRRLYAQAQKLRKHSSHLFTATIPLNGTSDTWYQELKAIIREQQTRPIWTAEDQLDGSLEDNLDLPHHGLADSSADLSCDSRVNSDYETDGEGGAYTDGEGYTDGEGGPYTDVDDEPPAPALARSSEPVQADESQSPRDRGRISAHQGAQVDSRHPQGQWRQDSMRTYEREALKKKFMRVHDAESSDEDGYDWGPATDL

SEQ ID NO: 5675 - protein, 938 aa, Homo sapiens
MNLCGLMPIFPAPLDQVADMEELTIWEQHTATLSKDPRRGFGIAISGGRDRPGGSMVVSDVVPGGPAEGRLQTGDHIVMVNGVSMENATSAFAIQILKTCTKMANITVKRPRRIHLPATKASPSSPGRQDSDEDDGPQRVEEVDQGRGYDGDSSSGSGRSWDERSRRPRPGRRGRAGSHGRRSPGGGSEANGLALVSGFKRLPRQDVQMKPVKSVLVKRRDSEEFGVKLGSQIFIKHITDSGLAARHRGLQEGDLILQINGVSSQNLSLNDTRRLIEKSEGKLSLLVLRDRGQFLVNIPPAVSDSDSSPLEDISDLASELSQAPPSHIPPPPRHAQRSPEASQTDSPVESPRLRRESSVDSRTISEPDEQRSELPRESSYDIYRVPSSQSMEDRGYSPDTRVVRFLKGKSIGLRLAGGNDVGIFVSGVQAGSPADGQGIQEGDQILQVNDVPFQNLTREEAVQFLLGLPPGEEMELVTQRKQDIFWKMVQSRVGDSFYIRTHFELEPSPPSGLGFTRGDVFHVLDTLHPGPGQSHARGGHWLAVRMGRDLREQERGIIPNQSRAEQLASLEAAQRAVGVGPGSSAGSNARAEFWRLRGLRRGAKKTTQRSREDLSALTRQGRYPPYERVVLREASFKRPVVILGPVADIAMQKLTAEMPDQFEIAETVSRTDSPSKIIKLDTVRVIAEKDKHALLDVTPSAIERLNYVQYYPIVVFFIPESRPALKALRQWLAPASRRSTRRLYAQAQKLRKHSSHLFTATIPLNGTSDTWYQELKAIIREQQTRPIWTAEDQLDGSLEDNLDLPHHGLADSSADLSCDSRVNSDYETDGEGGAYTDGEGYTDGEGGPYTDVDDEPPAPALARSSEPVQADESQSPRDRGRISAHQGAQVDSRHPQGQWRQDSMRTYEREALKKKFMRVHDAESSDEDGYDWGPATDL

SEQ ID NO: 5676 - protein, 928 aa, Homo sapiens
MAVRFQVADMEELTIWEQHTATLSKDPRRGFGIAISGGRDRPGGSMVVSDVVPGGPAEGRLQTGDHIVMVNGVSMENATSAFAIQILKTCTKMANITVKRPRRIHLPATKASPSSPGRQDSDEDDGPQRVEEVDQGRGYDGDSSSGSGRSWDERSRRPRPGRRGRAGSHGRRSPGGGSEANGLALVSGFKRLPRQDVQMKPVKSVLVKRRDSEEFGVKLGSQIFIKHITDSGLAARHRGLQEGDLILQINGVSSQNLSLNDTRRLIEKSEGKLSLLVLRDRGQFLVNIPPAVSDSDSSPLEDISDLASELSQAPPSHIPPPPRHAQRSPEASQTDSPVESPRLRRESSVDSRTISEPDEQRSELPRESSYDIYRVPSSQSMEDRGYSPDTRVVRFLKGKSIGLRLAGGNDVGIFVSGVQAGSPADGQGIQEGDQILQVNDVPFQNLTREEAVQFLLGLPPGEEMELVTQRKQDIFWKMVQSRVGDSFYIRTHFELEPSPPSGLGFTRGDVFHVLDTLHPGPGQSHARGGHWLAVRMGRDLREQERGIIPNQSRAEQLASLEAAQRAVGVGPGSSAGSNARAEFWRLRGLRRGAKKTTQRSREDLSALTRQGRYPPYERVVLREASFKRPVVILGPVADIAMQKLTAEMPDQFEIAETVSRTDSPSKIIKLDTVRVIAEKDKHALLDVTPSAIERLNYVQYYPIVVFFIPESRPALKALRQWLAPASRRSTRRLYAQAQKLRKHSSHLFTATIPLNGTSDTWYQELKAIIREQQTRPIWTAEDQLDGSLEDNLDLPHHGLADSSADLSCDSRVNSDYETDGEGGAYTDGEGYTDGEGGPYTDVDDEPPAPALARSSEPVQADESQSPRDRGRISAHQGAQVDSRHPQGQWRQDSMRTYEREALKKKFMRVHDAESSDEDGYDWGPATDL

SEQ ID NO: 5677 - protein, 883 aa, Homo sapiens
MVVSDVVPGGPAEGRLQTGDHIVMVNGVSMENATSAFAIQILKTCTKMANITVKRPRRIHLPATKASPSSPGRQDSDEDDGPQRVEEVDQGRGYDGDSSSGSGRSWDERSRRPRPGRRGRAGSHGRRSPGGGSEANGLALVSGFKRLPRQDVQMKPVKSVLVKRRDSEEFGVKLGSQIFIKHITDSGLAARHRGLQEGDLILQINGVSSQNLSLNDTRRLIEKSEGKLSLLVLRDRGQFLVNIPPAVSDSDSSPLEDISDLASELSQAPPSHIPPPPRHAQRSPEASQTDSPVESPRLRRESSVDSRTISEPDEQRSELPRESSYDIYRVPSSQSMEDRGYSPDTRVVRFLKGKSIGLRLAGGNDVGIFVSGVQAGSPADGQGIQEGDQILQVNDVPFQNLTREEAVQFLLGLPPGEEMELVTQRKQDIFWKMVQSRVGDSFYIRTHFELEPSPPSGLGFTRGDVFHVLDTLHPGPGQSHARGGHWLAVRMGRDLREQERGIIPNQSRAEQLASLEAAQRAVGVGPGSSAGSNARAEFWRLRGLRRGAKKTTQRSREDLSALTRQGRYPPYERVVLREASFKRPVVILGPVADIAMQKLTAEMPDQFEIAETVSRTDSPSKIIKLDTVRVIAEKDKHALLDVTPSAIERLNYVQYYPIVVFFIPESRPALKALRQWLAPASRRSTRRLYAQAQKLRKHSSHLFTATIPLNGTSDTWYQELKAIIREQQTRPIWTAEDQLDGSLEDNLDLPHHGLADSSADLSCDSRVNSDYETDGEGGAYTDGEGYTDGEGGPYTDVDDEPPAPALARSSEPVQADESQSPRDRGRISAHQGAQVDSRHPQGQWRQDSMRTYEREALKKKFMRVHDAESSDEDGYDWGPATDL

SEQ ID NO: 5678 - protein, 916 aa, Homo sapiens
MGKAAAPSRGGGCGGRSRGLSSLFTVVPCLSCHTAAPGMSASTSGSGPEPKPQPQPVPEPERGPLSEQVSEAVSEAVPRSEPVSETTSEPEPGAGQPSELLQGSRPGSESSSGVGAGPFTKAASEPLSRAVGSATFLRPESGSLPALKPLPLLRPGQAKTPLGVPMSGTGTTSSAPLALLPLDSFEGWLLKWTNYLKGYQRRWFVLGNGLLSYYRNQGEMAHTCRGTINLSTAHIDTEDSCGILLTSGARSYHLKASSEVDRQQWITALELAKAKAVRVMNTHSDDSGDDDEATTPADKSELHHTLKNLSLKLDDLSTCNDLIAKHGAALQRSLTELDGLKIPSESGEKLKVVNERATLFRITSNAMINACRDFLELAEIHSRKWQRALQYEQEQRVHLEETIEQLAKQHNSLERAFHSAPGRPANPSKSFIEGSLLTPKGEDSEEDEDTEYFDAMEDSTSFITVITEAKEDSRKAEGSTGTSSVDWSSADNVLDGASLVPKGSSKVKRRVRIPNKPNYSLNLWSIMKNCIGRELSRIPMPVNFNEPLSMLQRLTEDLEYHHLLDKAVHCTSSVEQMCLVAAFSVSSYSTTVHRIAKPFNPMLGETFELDRLDDMGLRSLCEQVSHHPPSAAHYVFSKHGWSLWQEITISSKFRGKYISIMPLGAIHLEFQASGNHYVWRKSTSTVHNIIVGKLWIDQSGDIEIVNHKTNDRCQLKFLPYSYFSKEAARKVTGVVSDSQGKAHYVLSGSWDEQMECSKVMHSSPSSPSSDGKQKTVYQTLSAKLLWKKYPLPENAENMYYFSELALTLNEHEEGVAPTDSRLRPDQRLMEKGRWDEANTEKQRLEEKQRLSRRRRLEACGPGSSCSSEEEKEADAYTPLWFEKRLDPLTGEMACVYKGGYWEAKEKQDWHMCPNIF

SEQ ID NO: 5679 - protein, 915 aa, Homo sapiens
MGKAAAPSRGGGCGGRSRGLSSLFTVVPCLSCHTAAPGMSASTSGSGPEPKPQPQPVPEPERGPLSEQVSEAVSEAVPRSEPVSETTSEPEPGAGQPSELLQGSRPGSESSSGVGAGPFTKAASEPLSRAVGSATFLRPESGSLPALKPLPLLRPGQAKTPLGVPMSGTGTTSSAPLALLPLDSFEGWLLKWTNYLKGYQRRWFVLGNGLLSYYRNQGEMAHTCRGTINLSTAHIDTEDSCGILLTSGARSYHLKASSEVDRQQWITALELAKAKAVRVMNTHSDDSGDDDEATTPADKSELHHTLKNLSLKLDDLSTCNDLIAKHGAALQRSLTELDGLKIPSESGEKLKVVNERATLFRITSNAMINACRDFLELAEIHSRKWQRALQYEQEQRVHLEETIEQLAKQHNSLERAFHSAPGRPANPSKSFIEGSLLTPKGEDSEEDEDTEYFDAMEDSTSFITVITEAKEDRKAEGSTGTSSVDWSSADNVLDGASLVPKGSSKVKRRVRIPNKPNYSLNLWSIMKNCIGRELSRIPMPVNFNEPLSMLQRLTEDLEYHHLLDKAVHCTSSVEQMCLVAAFSVSSYSTTVHRIAKPFNPMLGETFELDRLDDMGLRSLCEQVSHHPPSAAHYVFSKHGWSLWQEITISSKFRGKYISIMPLGAIHLEFQASGNHYVWRKSTSTVHNIIVGKLWIDQSGDIEIVNHKTNDRCQLKFLPYSYFSKEAARKVTGVVSDSQGKAHYVLSGSWDEQMECSKVMHSSPSSPSSDGKQKTVYQTLSAKLLWKKYPLPENAENMYYFSELALTLNEHEEGVAPTDSRLRPDQRLMEKGRWDEANTEKQRLEEKQRLSRRRRLEACGPGSSCSSEEEKEADAYTPLWFEKRLDPLTGEMACVYKGGYWEAKEKQDWHMCPNIF

SEQ ID NO: 5680 - protein, 750 aa, Homo sapiens
MHRQRTRTMSSLAAKRLGMNRRPAGSGGGGGEAATWGHRFWRPQERPTDRNQGEMAHTCRGTINLSTAHIDTEDSCGILLTSGARSYHLKASSEVDRQQWITALELAKAKAVRVMNTHSDDSGDDDEATTPADKSELHHTLKNLSLKLDDLSTCNDLIAKHGAALQRSLTELDGLKIPSESGEKLKVVNERATLFRITSNAMINACRDFLELAEIHSRKWQRALQYEQEQRVHLEETIEQLAKQHNSLERAFHSAPGRPANPSKSFIEGSLLTPKGEDSEEDEDTEYFDAMEDSTSFITVITEAKEDRKAEGSTGTSSVDWSSADNVLDGASLVPKGSSKVKRRVRIPNKPNYSLNLWSIMKNCIGRELSRIPMPVNFNEPLSMLQRLTEDLEYHHLLDKAVHCTSSVEQMCLVAAFSVSSYSTTVHRIAKPFNPMLGETFELDRLDDMGLRSLCEQVSHHPPSAAHYVFSKHGWSLWQEITISSKFRGKYISIMPLGAIHLEFQASGNHYVWRKSTSTVHNIIVGKLWIDQSGDIEIVNHKTNDRCQLKFLPYSYFSKEAARKVTGVVSDSQGKAHYVLSGSWDEQMECSKVMHSSPSSPSSDGKQKTVYQTLSAKLLWKKYPLPENAENMYYFSELALTLNEHEEGVAPTDSRLRPDQRLMEKGRWDEANTEKQRLEEKQRLSRRRRLEACGPGSSCSSEEEKEADAYTPLWFEKRLDPLTGEMACVYKGGYWEAKEKQDWHMCPNIF

SEQ ID NO: 5681 - protein, 549 aa, Homo sapiens
MINACRDFLELAEIHSRKWQRALQYEQEQRVHLEETIEQLAKQHNSLERAFHSAPGRPANPSKSFIEGSLLTPKGEDSEEDEDTEYFDAMEDSTSFITVITEAKEDRKAEGSTGTSSVDWSSADNVLDGASLVPKGSSKVKRRVRIPNKPNYSLNLWSIMKNCIGRELSRIPMPVNFNEPLSMLQRLTEDLEYHHLLDKAVHCTSSVEQMCLVAAFSVSSYSTTVHRIAKPFNPMLGETFELDRLDDMGLRSLCEQVSHHPPSAAHYVFSKHGWSLWQEITISSKFRGKYISIMPLGAIHLEFQASGNHYVWRKSTSTVHNIIVGKLWIDQSGDIEIVNHKTNDRCQLKFLPYSYFSKEAARKVTGVVSDSQGKAHYVLSGSWDEQMECSKVMHSSPSSPSSDGKQKTVYQTLSAKLLWKKYPLPENAENMYYFSELALTLNEHEEGVAPTDSRLRPDQRLMEKGRWDEANTEKQRLEEKQRLSRRRRLEACGPGSSCSSEEEKEADAYTPLWFEKRLDPLTGEMACVYKGGYWEAKEKQDWHMCPNIF

SEQ ID NO: 5682 - protein, 460 aa, Homo sapiens
MEDSTSFITVITEAKEDRKAEGSTGTSSVDWSSADNVLDGASLVPKGSSKVKRRVRIPNKPNYSLNLWSIMKNCIGRELSRIPMPVNFNEPLSMLQRLTEDLEYHHLLDKAVHCTSSVEQMCLVAAFSVSSYSTTVHRIAKPFNPMLGETFELDRLDDMGLRSLCEQVSHHPPSAAHYVFSKHGWSLWQEITISSKFRGKYISIMPLGAIHLEFQASGNHYVWRKSTSTVHNIIVGKLWIDQSGDIEIVNHKTNDRCQLKFLPYSYFSKEAARKVTGVVSDSQGKAHYVLSGSWDEQMECSKVMHSSPSSPSSDGKQKTVYQTLSAKLLWKKYPLPENAENMYYFSELALTLNEHEEGVAPTDSRLRPDQRLMEKGRWDEANTEKQRLEEKQRLSRRRRLEACGPGSSCSSEEEKEADAYTPLWFEKRLDPLTGEMACVYKGGYWEAKEKQDWHMCPNIF

SEQ ID NO: 5683 - protein, 659 aa, Homo sapiens
MKGRGCWDTASVRSFCSSGCLNKFKKDDSGDDDEATTPADKSELHHTLKNLSLKLDDLSTCNDLIAKHGAALQRSLTELDGLKIPSESGEKLKVVNERATLFRITSNAMINACRDFLELAEIHSRKWQRALQYEQEQRVHLEETIEQLAKQHNSLERAFHSAPGRPANPSKSFIEGSLLTPKGEDSEEDEDTEYFDAMEDSTSFITVITEAKEDSRKAEGSTGTSSVDWSSADNVLDGASLVPKGSSKVKRRVRIPNKPNYSLNLWSIMKNCIGRELSRIPMPVNFNEPLSMLQRLTEDLEYHHLLDKAVHCTSSVEQMCLVAAFSVSSYSTTVHRIAKPFNPMLGETFELDRLDDMGLRSLCEQVSHHPPSAAHYVFSKHGWSLWQEITISSKFRGKYISIMPLGAIHLEFQASGNHYVWRKSTSTVHNIIVGKLWIDQSGDIEIVNHKTNDRCQLKFLPYSYFSKEAARKVTGVVSDSQGKAHYVLSGSWDEQMECSKVMHSSPSSPSSDGKQKTVYQTLSAKLLWKKYPLPENAENMYYFSELALTLNEHEEGVAPTDSRLRPDQRLMEKGRWDEANTEKQRLEEKQRLSRRRRLEACGPGSSCSSEEAEKEADAYTPLWFEKRLDPLTGEMACVYKGGYWEAKEKQDWHMCPNIF

SEQ ID NO: 5684 - protein, 318 aa, Homo sapiens
MMSFAPNASHSPVFLLLGFSRANISYTLLFFLFLAIYLTTILGNVTLVLLISWDSRLHSPMYYLLRGLSVIDMGLSTVTLPQLLAHLVSHYPTIPAARCLAQFFFFYAFGVTDTLVIAVMALDRYVAICDPLHYALVMNHQRCACLLALSWVVSILHTMLRVGLVLPLCWTGDAGGNVNLPHFFCDHRPLLRASCSDIHSNELAIFFEGGFLMLGPCALIVLSYVRIGAAILRLPSAAGRRRAVSTCGSHLTMVGFLYGTIICVYFQPPFQNSQYQDMVASVMYTAITPLANPFVYSLHNKDVKGALCRLLEWVKVDP

SEQ ID NO: 5685 - protein, 312 aa, Homo sapiens
MSGTNQSSVSEFLLLGLSRQPQQQHLLFVFFLSMYLATVLGNLLIILSVSIDSCLHTPMYFFLSNLSFVDICFSFTTVPKMLANHILETQTISFCGCLTQMYFVFMFVDMDNFLLAVMAYDHFVAVCHPLHYTAKMTHQLCALLVAGLWVVANLNVLLHTLLMAPLSFCADNAITHFFCDVTPLLKLSCSDTHLNEVIILSEGALVMITPFLCILASYMHITCTVLKVPSTKGRWKAFSTCGSHLAVVLLFYSTIIAVYFNPLSSHSAEKDTMATVLYTVVTPMLNPFIYSLRNRYLKGALKKVVGRVVFSV

SEQ ID NO: 5686 - protein, 330 aa, Homo sapiens
MEGFYLRRSHELQGMGKPGRVNQTTVSDFLLLGLSEWPEEQPLLFGIFLGMYLVTMVGNLLIILAISSDPHLHTPMYFFLANLSLTDACFTSASIPKMLANIHTQSQIISYSGCLAQLYFLLMFGGLDNCLLAVMAYDRYVAICQPLHYSTSMSPQLCALMLGVCWVLTNCPALMHTLLLTRVAFCAQKAIPHFYCDPSALLKLACSDTHVNELMIITMGLLFLTVPLLLIVFSYVRIFWAVFVISSPGGRWKAFSTCGSHLTVVLLFYGSLMGVYLLPPSTYSTERESRAAVLYMVIIPTLNPFIYSLRNRDMKEALGKLFVSGKTFFL

SEQ ID NO: 5687 - protein, 332 aa, Homo sapiens
MRLLAFLSLLALVLQETGTASLPRKERKRREEQMPREGDSFEVLPLRNDVLNPDNYGEVIDLSNYEELTDYGDQLPEVKVTSLAPATSISPAKSTTAPGTPSSNPTMTRPTTAGLLLSSQPNHGLPTCLVCVCLGSSVYCDDIDLEDIPPLPRRTAYLYARFNRISRIRAEDFKGLTKLKRIDLSNNLISSIDNDAFRLLHALQDLILPENQLEALPVLPSGIEFLDVRLNRLQSSGIQPAAFRAMEKLQFLYLSDNLLDSIPGPLPLSLRSVHLQNNLIETMQRDVFCDPEEHKHTRRQLEDIRLDGNPINLSLFPSAYFCLPRLPIGRFT

SEQ ID NO: 5688 - protein, 711 aa, Homo sapiens
MATSSMSKGCFVFKPNSKKRKISLPIEDYFNKGKNEPEDSKLRFETYQLIWQQMKSENERLQEELNKNLFDNLIEFLQKSHSGFQKNSRDLGGQIKLREIPTAALVLGVNVTDHDLTFGSLTEALQNNVTPYVVSLQAKDCPDMKHFLQKLISQLMDCCVDIKSKEEESVHVTQRKTHYSMDSLSSWYMTVTQKTDPKMLSKKRTTSSQWQSPPVVVILKDMESFATKVLQDFIIISSQHLHEFPLILIFGIATSPIIIHRLLPHAVSSLLCIELFQSLSCKEHLTTVLDKLLLTTQFPFKINEKVLQVLTNIFLYHDFSVQNFIKGLQLSLLEHFYSQPLSVLCCNLPEAKRRINFLSNNQCENIRRLPSFRRYVEKQASEKQVALLTNERYLKEETQLLLENLHVYHMNYFLVLRCLHKFTSSLPKYPLGRQIRELYCTCLEKNIWDSEEYASVLQLLRMLAKDELMTILEKCFKVFKSYCENHLGSTAKRIEEFLAQFQSLDETKEEEDASGSQPKGLQKTDLYHLQKSLLEMKELRRSKKQTKFEVLRENVVNFIDCLVREYLLPPETQPLHEVVYFSAAHALREHLNAAPRIALHTALNNPYYYLKNEALKSEEGCIPNIAPDICIAYKLHLECSRLINLVDWSEAFATVVTAAEKMDANSATSEEMNEIIHARFIRAVSELELLGFIKPTKQKTDHVARLTWGGC

SEQ ID NO: 5689 - protein, 712 aa, Homo sapiens
MATSSMSKGCFVFKPNSKKRKISLPIEDYFNKGKNEPEDSKLRFETYQLIWQQMKSENERLQEELNKNLFDNLIEFLQKSHSGFQKNSRDLGGQIKLREIPTAALVLGVNVTDHDLTFGSLTEALQNNVTPYVVSLQAKDCPDMKHFLQKLISQLMDCCVDIKSKEEESVHVTQRKTHYSMDSLSSWYMTVTQKTDPKMLSKKRTTSSQWQSPPVVVILKDMESFATKVLQDFIIISSQHLHEFPLILIFGIATSPIIIHRLLPHAVSSLLCIELFQSLSCKEHLTTVLDKLLLTTQFPFKINEKVLQVLTNIFLYHDFSVQNFIKGLQLSLLEHFYSQPLSVLCCNLPEAKRRINFLSNNQCENIRRLPSFRRYVEKQASEKQVALLTNERYLKEETQLLLENLHVYHMNYFLVLRCLHKFTSSLPKYPLGRQIRELYCTCLEKNIWDSEEYASVLQLLRMLAKDELMTILEKCFKVFKSYCENHLGSTAKRIEEFLAQFQSLDAETKEEEDASGSQPKGLQKTDLYHLQKSLLEMKELRRSKKQTKFEVLRENVVNFIDCLVREYLLPPETQPLHEVVYFSAAHALREHLNAAPRIALHTALNNPYYYLKNEALKSEEGCIPNIAPDICIAYKLHLECSRLINLVDWSEAFATVVTAAEKMDANSATSEEMNEIIHARFIRAVSELELLGFIKPTKQKTDHVARLTWGGC

SEQ ID NO: 5690 - protein, 568 aa, Homo sapiens
MKHFLQKLISQLMDCCVDIKSKEEESVHVTQRKTHYSMDSLSSWYMTVTQKTDPKMLSKKRTTSSQWQSPPVVVILKDMESFATKVLQDFIIISSQHLHEFPLILIFGIATSPIIIHRLLPHAVSSLLCIELFQSLSCKEHLTTVLDKLLLTTQFPFKINEKVLQVLTNIFLYHDFSVQNFIKGLQLSLLEHFYSQPLSVLCCNLPEAKRRINFLSNNQCENIRRLPSFRRYVEKQASEKQVALLTNERYLKEETQLLLENLHVYHMNYFLVLRCLHKFTSSLPKYPLGRQIRELYCTCLEKNIWDSEEYASVLQLLRMLAKDELMTILEKCFKVFKSYCENHLGSTAKRIEEFLAQFQSLDETKEEEDASGSQPKGLQKTDLYHLQKSLLEMKELRRSKKQTKFEVLRENVVNFIDCLVREYLLPPETQPLHEVVYFSAAHALREHLNAAPRIALHTALNNPYYYLKNEALKSEEGCIPNIAPDICIAYKLHLECSRLINLVDWSEAFATVVTAAEKMDANSATSEEMNEIIHARFIRAVSELELLGFIKPTKQKTDHVARLTWGGC

SEQ ID NO: 5691 - protein, 423 aa, Homo sapiens
MAICQFFLQGRCRFGDRCWNEHPGARGAGGGRQQPQQQPSGNNRRGWNTTSQRYSNVIQPSSFSKSTPWGGSRDQEKPYFSSFDSGASTNRKEGFGLSENPFASLSPDEQKDEKKLLEGIVKDMEVWESSGQWMFSVYSPVKKKPNISGFTDISPEELRLEYHNFLTSNNLQSYLNSVQRLINQWRNRVNELKSLNISTKVALLSDVKDGVNQAAPAFGFGSSQAATFMSPGFPVNNSSSDNAQNFSFKTNSGFAAASSGSPAGFGSSPAFGAAASTSSGISTSAPAFGFGKPEVTSAASFSFKSPAASSFGSPGFSGLPASLATGPVRAPVAPAFGGGSSVAGFGSPGSHSHTAFSKPSSDTFGNSSISTSLSASSSIIATDNVLFTPRDKLTVEELEQFQSKKFTLGKIPLKPPPLELLNV

SEQ ID NO: 5692 - protein, 224 aa, Homo sapiens
MAICQFFLQGRCRFGDRCWNEHPGARGAGGGRQQPQQQPSGNNRRGWNTTSQRYSNVIQPSSFSKSTPWGGSRDQEKPYFSSFDSGASTNRKEGFGLSENPFASLSPDEQKDEKKLLEGIVKDMEVWESSGQWMFSVYSPVKKKPNISGFTDISPEELRLEYHNFLTSNNLQSYLNSVQRLINQWRNRVNELKSLNISTKVALKCLWKIYTHLSPKIYGPDCAL

SEQ ID NO: 5693 - protein, 195 aa, Homo sapiens
MSPGFPVNNSSSDNAQNFSFKTNSGFAAASSGSPAGFGSSPAFGAAASTSSGISTSAPAFGFGKPEVTSAASFSFKSPAASSFGSPGFSGLPASLATGPVRAPVAPAFGGGSSVAGFGSPGSHSHTAFSKPSSDTFGNSSISTSLSASSSIIATDNVLFTPRDKLTVEELEQFQSKKFTLGKIPLKPPPLELLNV

SEQ ID NO: 5694 - protein, 250 aa, Homo sapiens
MAALSCLLDSVRRDIKKVDRELRQLRCIDEFSTRCLCDLYMHPYCCCDLHPYPYCLCYSKRSRSCGLCDLYPCCLCDYKLYCLRPSLRSLERKAIRAIEDEKRELAKLRRTTNRILASSCCSSNILGSVNVCGFEPDQVKVRVKDGKVCVSAERENRYDCLGSKKYSYMNICKEFSLPPCVDEKDVTYSYGLGSCVKIESPCYPCTSPCSPCSPCSPCNPCSPCNPCSPYDPCNPCYPCGSRFSCRKMIL

SEQ ID NO: 5695 - protein, 547 aa, Homo sapiens
MSSNTMLQKTLLILISFSVVTWMIFIISQNFTKLWSALNLSISVHYWNNSAKSLFPKTSLIPLKPLTETELRIKEIIEKLDQQIPPRPFTHVNTTTSATHSTATILNPRDTYCRGDQLDILLEVRDHLGQRKQYGGDFLRARMSSPALTAGASGKVMDFNNGTYLVSFTLFWEGQVSLSLLLIHPSEGASALWRARNQGYDKIIFKGKFVNGTSHVFTECGLTLNSNAELCEYLDDRDQEAFYCMKPQHMPCEALTYMTTRNREVSYLTDKENSLFHRSKVGVEMMKDRKHIDVTNCNKREKIEETCQVGMKPPVPGGYTLQGKWITTFCNQVQLDTIKINGCLKGKLIYLLGDSTLRQWIYYFPKVVKTLKFFDLHETGIFKKHLLLDAERHTQIQWKKHSYPFVTFQLYSLIDHDYIPREIDRLSGDKNTAIVITFGQHFRPFPIDIFIRRAIGVQKAIERLFLRSPATKVIIKTENIREMHIETERFGDFHGYIHYLIMKDIFKDLNVGIIDAWDMTIAYGTDTIHPPDHVIGNQINMFLNYIC

SEQ ID NO: 5696 - protein, 405 aa, Homo sapiens
MSSPALTAGASGKVMDFNNGTYLVSFTLFWEGQVSLSLLLIHPSEGASALWRARNQGYDKIIFKGKFVNGTSHVFTECGLTLNSNAELCEYLDDRDQEAFYCMKPQHMPCEALTYMTTRNREVSYLTDKENSLFHRSKVGVEMMKDRKHIDVTNCNKREKIEETCQVGMKPPVPGGYTLQGKWITTFCNQVQLDTIKINGCLKGKLIYLLGDSTLRQWIYYFPKVVKTLKFFDLHETGIFKKHLLLDAERHTQIQWKKHSYPFVTFQLYSLIDHDYIPREIDRLSGDKNTAIVITFGQHFRPFPIDIFIRRAIGVQKAIERLFLRSPATKVIIKTENIREMHIETERFGDFHGYIHYLIMKDIFKDLNVGIIDAWDMTIAYGTDTIHPPDHVIGNQINMFLNYIC

SEQ ID NO: 5697 - protein, 328 aa, Homo sapiens
MFLTERNTTSEATFTLLGFSDYLELQIPLFFVFLAVYGFSVVGNLGMIVIIKINPKLHTPMYFFLNHLSFVDFCYSSIIAPMMLVNLVVEDRTISFSGCLVQFFFFCTFVVTELILFAVMAYDHFVAICNPLLYTVAISQKLCAMLVVVLYAWGVACSLTLACSALKLSFHGFNTINHFFCELSSLISLSYPDSYLSQLLLFTVATFNEISTLLIILTSYAFIIVTTLKMPSASGHRKVFSTCASHLTAITIFHGTILFLYCVPNSKNSRHTVKVASVFYTVVIPLLNPLIYSLRNKDVKDAIRKIINTKYFHIKHRHWYPFNFVIEQ

SEQ ID NO: 5698 - protein, 308 aa, Homo sapiens
MAEENHTMKNEFILTGFTDHPELKTLLFVVFFAIYLITVVGNISLVALIFTHRRLHTPMYIFLGNLALVDSCCACAITPKMLENFFSENKRISLYECAVQFYFLCTVETADCFLLAAMAYDRYVAICNPLQYHIMMSKKLCIQMTTGAFIAGNLHSMIHVGLVFRLVFCGSNHINHFYCDILPLYRLSCVDPYINELVLFIFSGSVQVFTIGSVLISYLYILLTIFKMKSKEGRAKAFSTCASHFLSVSLFYGSLFFMYVRPNLLEEGDKDIPAAILFTIVVPLLNPFIYSLRNREVISVLRKILMKK

SEQ ID NO: 5699 - protein, 326 aa, Homo sapiens
MCPLTLHVTGLMNVSEPNSSFAFVNEFILQGFSCEWTIQIFLFSLFTTIYALTITGNGAIAFVLWCDRRLHTPMYMFLGNFSFLEIWYVSSTVPKMLVNFLSEKKNISFAGCFLQFYFFFSLGTSECLLLTVMAFDQYLAICRPLLYPNIMTGHLYAKLVILCWVCGFLWFLIPIVLISQKPFCGPNIIDHVVCDPGPLFALDCVSAPRIQLFCYTLSSLVIFGNFLFIIGSYTLVLKAVLGMPSSTGRHKAFSTCGSHLAVVSLCYSPLMVMYVSPGLGHSTGMQKIETLFYAMVTPLFNPLIYSLQNKEIKAALRKVLGSSNII

SEQ ID NO: 5700 - protein, 307 aa, Homo sapiens
MAEENKILVTHFVLTGLTDHPGLQAPLFLVFLVIYLITLVGNLGLMALIWKDPHLHTPIYLFLGSLAFADACTSSSVTSKMLINFLSKNHMLSMAKCATQFYFFGSNATTECFLLVVMAYDRYVAICNPLLYPVVMSNSLCTQFIGISYFIGFLHSAIHVGLLFRLTFCRSNIIHYFYCEILQLFKISCTNPTVNILLIFIFSAFIQVFTFMTLIVSYSYILSAILKKKSEKGRSKAFSTCSAHLLSVSLFYGTLFFMYVSSRSGSAADQAKMYSLFYTIIIPLLNPFIYSLRNKEVIDALRRIMKK

SEQ ID NO: 5701 - protein, 312 aa, Homo sapiens
MRLANQTLGGDFFLLGIFSQISHPGRLCLLIFSIFLMAVSWNITLILLIHIDSSLHTPMYFFINQLSLIDLTYISVTVPKMLVNQLAKDKTISVLGCGTQMYFYLQLGGAECCLLAAMAYDRYVAICHPLRYSVLMSHRVCLLLASGCWFVGSVDGFMLTPIAMSFPFCRSHEIQHFFCEVPAVLKLSCSDTSLYKIFMYLCCVIMLLIPVTVISVSYYYIILTIHKMNSVEGRKKAFTTCSSHITVVSLFYGAAIYNYMLPSSYQTPEKDMMSSFFYTILTPVLNPIIYSFRNKDVTRALKKMLSVQKPPY

SEQ ID NO: 5702 - protein, 330 aa, Homo sapiens
MFFIIHSLVTSVFLTALGPQNRTMHFVTEFVLLGFHGQREMQSCFFSFILVLYLLTLLGNGAIVCAVKLDRRLHTPMYILLGNFAFLEIWYISSTVPNMLVNILSEIKTISFSGCFLQFYFFFSLGTTECFFLSVMAYDRYLAICRPLHYPSIMTGKFCIILVCVCWVGGFLCYPVPIVLISQLPFCGPNIIDHLVCDPGPLFALACISAPSTELICYTFNSMIIFGPFLSILGSYTLVIRAVLCIPSGAGRTKAFSTCGSHLMVVSLFYGTLMVMYVSPTSGNPAGMQKIITLVYTAMTPFLNPLIYSLRNKDMKDALKRVLGLTVSQN

SEQ ID NO: 5703 - protein, 317 aa, Homo sapiens
MEIDNQTWVREFILLGLSSDWCTQISLFSLFLVTYLMTVLGNCLIVLLIRLDSRLHTPMYFFLTNLSLVDVSYATSVVPQLLAHFLAEHKAIPFQSCAAQLFFSLALGGIEFVLLAVMAYDRHVAVSDRLRYSAIMHGGLCARLAITSWVSGSINSLVQTAITFQLPMCTNKFIDHISCELLAVVRLACVDTSSNEAAIMVSSIVLLMTPFCLVLLSYIRIISTILKIQSREGRKKAFHTCASHLTVVALCYGTTIFTYIQPHSGPSVLQEKLISVFYAIVMPLLNPVIYSLRNKEVKGAWHKLLEKFSGLTSKLGT

SEQ ID NO: 5704 - protein, 1948 aa, Homo sapiens
MAPTWGPGMVSVVGPMGLLVVLLVGGCAAEEPPRFIKEPKDQIGVSGGVASFVCQATGDPKPRVTWNKKGKKVNSQRFETIEFDESAGAVLRIQPLRTPRDENVYECVAQNSVGEITVHAKLTVLREDQLPSGFPNIDMGPQLKVVERTRTATMLCAASGNPDPEITWFKDFLPVDPSASNGRIKQLRSETFESTPIRGALQIESSEETDQGKYECVATNSAGVRYSSPANLYVRELREVRRVAPRFSILPMSHEIMPGGNVNITCVAVGSPMPYVKWMQGAEDLTPEDDMPVGRNVLELTDVKDSANYTCVAMSSLGVIEAVAQITVKSLPKAPGTPMVTENTATSITITWDSGNPDPVSYYVIEYKSKSQDGPYQIKEDITTTRYSIGGLSPNSEYEIWVSAVNSIGQGPPSESVVTRTGEQAPASAPRNVQARMLSATTMIVQWEEPVEPNGLIRGYRVYYTMEPEHPVGNWQKHNVDDSLLTTVGSLLEDETYTVRVLAFTSVGDGPLSDPIQVKTQQGVPGQPMNLRAEARSETSITLSWSPPRQESIIKYELLFREGDHGREVGRTFDPTTSYVVEDLKPNTEYAFRLAARSPQGLGAFTPVVRQRTLQSKPSAPPQDVKCVSVRSTAILVSWRPPPPETHNGALVGYSVRYRPLGSEDPEPKEVNGIPPTTTQILLEALEKWTQYRITTVAHTEVGPGPESSPVVVRTDEDVPSAPPRKVEAEALNATAIRVLWRSPAPGRQHGQIRGYQVHYVRMEGAEARGPPRIKDVMLADAQWETDDTAEYEMVITNLQPETAYSITVAAYTMKGDGARSKPKVVVTKGAVLGRPTLSVQQTPEGSLLARWEPPAGTAEDQVLGYRLQFGREDSTPLATLEFPPSEDRYTASGVHKGATYVFRLAARSRGGLGEEAAEVLSIPEDTPRGHPQILEAAGNASAGTVLLRWLPPVPAERNGAIVKYTVAVREAGALGPARETELPAAAEPGAENALTLQGLKPDTAYDLQVRAHTRRGPGPFSPPVRYRTFLRDQVSPKNFKVKMIMKTSVLLSWEFPDNYNSPTPYKIQYNGLTLDVDGRTTKKLITHLKPHTFYNFVLTNRGSSLGGLQQTVTAWTAFNLLNGKPSVAPKPDADGFIMVYLPDGQSPVPVQSYFIVMVPLRKSRGGQFLTPLGSPEDMDLEELIQDISRLQRRSLRHSRQLEVPRPYIAARFSVLPPTFHPGDQKQYGGFDNRGLEPGHRYVLFVLAVLQKSEPTFAASPFSDPFQLDNPDPQPIVDGEEGLIWVIGPVLAVVFIICIVIAILLYKNKPDSKRKDSEPRTKCLLNNADLAPHHPKDPVEMRRINFQTPDSGLRSPLREPGFHFESMLSHPPIPIADMAEHTERLKANDSLKLSQEYESIDPGQQFTWEHSNLEVNKPKNRYANVIAYDHSRVILQPIEGIMGSDYINANYVDGYRCQNAYIATQGPLPETFGDFWRMVWEQRSATIVMMTRLEEKSRIKCDQYWPNRGTETYGFIQVTLLDTIELATFCVRTFSLHKNGSSEKREVRQFQFTAWPDHGVPEYPTPFLAFLRRVKTCNPPDAGPIVVHCSAGVGRTGCFIVIDAMLERIKPEKTVDVYGHVTLMRSQRNYMVQTEDQYSFIHEALLEAVGCGNTEVPARSLYAYIQKLAQVEPGEHVTGMELEFKRLANSKAHTSRFISANLPCNKFKNRLVNIMPYESTRVCLQPIRGVEGSDYINASFIDGYRQQKAYIATQGPLAETTEDFWRMLWENNSTIVVMLTKLREMGREKCHQYWPAERSARYQYFVVDPMAEYNMPQYILREFKVTDARDGQSRTVRQFQFTDWPEQGVPKSGEGFIDFIGQVHKTKEQFGQDGPISVHCSAGVGRTGVFITLSIVLERMRYEGVVDIFQTVKMLRTQRPAMVQTEDEYQFCYQAALEYLGSFDHYAT

SEQ ID NO: 5705 - protein, 1939 aa, Homo sapiens
MAPTWGPGMVSVVGPMGLLVVLLVGGCAAEEPPRFIKEPKDQIGVSGGVASFVCQATGDPKPRVTWNKKGKKVNSQRFETIEFDESAGAVLRIQPLRTPRDENVYECVAQNSVGEITVHAKLTVLREDQLPSGFPNIDMGPQLKVVERTRTATMLCAASGNPDPEITWFKDFLPVDPSASNGRIKQLRSGALQIESSEETDQGKYECVATNSAGVRYSSPANLYVRELREVRRVAPRFSILPMSHEIMPGGNVNITCVAVGSPMPYVKWMQGAEDLTPEDDMPVGRNVLELTDVKDSANYTCVAMSSLGVIEAVAQITVKSLPKAPGTPMVTENTATSITITWDSGNPDPVSYYVIEYKSKSQDGPYQIKEDITTTRYSIGGLSPNSEYEIWVSAVNSIGQGPPSESVVTRTGEQAPASAPRNVQARMLSATTMIVQWEEPVEPNGLIRGYRVYYTMEPEHPVGNWQKHNVDDSLLTTVGSLLEDETYTVRVLAFTSVGDGPLSDPIQVKTQQGVPGQPMNLRAEARSETSITLSWSPPRQESIIKYELLFREGDHGREVGRTFDPTTSYVVEDLKPNTEYAFRLAARSPQGLGAFTPVVRQRTLQSKPSAPPQDVKCVSVRSTAILVSWRPPPPETHNGALVGYSVRYRPLGSEDPEPKEVNGIPPTTTQILLEALEKWTQYRITTVAHTEVGPGPESSPVVVRTDEDVPSAPPRKVEAEALNATAIRVLWRSPAPGRQHGQIRGYQVHYVRMEGAEARGPPRIKDVMLADAQWETDDTAEYEMVITNLQPETAYSITVAAYTMKGDGARSKPKVVVTKGAVLGRPTLSVQQTPEGSLLARWEPPAGTAEDQVLGYRLQFGREDSTPLATLEFPPSEDRYTASGVHKGATYVFRLAARSRGGLGEEAAEVLSIPEDTPRGHPQILEAAGNASAGTVLLRWLPPVPAERNGAIVKYTVAVREAGALGPARETELPAAAEPGAENALTLQGLKPDTAYDLQVRAHTRRGPGPFSPPVRYRTFLRDQVSPKNFKVKMIMKTSVLLSWEFPDNYNSPTPYKIQYNGLTLDVDGRTTKKLITHLKPHTFYNFVLTNRGSSLGGLQQTVTAWTAFNLLNGKPSVAPKPDADGFIMVYLPDGQSPVPVQSYFIVMVPLRKSRGGQFLTPLGSPEDMDLEELIQDISRLQRRSLRHSRQLEVPRPYIAARFSVLPPTFHPGDQKQYGGFDNRGLEPGHRYVLFVLAVLQKSEPTFAASPFSDPFQLDNPDPQPIVDGEEGLIWVIGPVLAVVFIICIVIAILLYKNKPDSKRKDSEPRTKCLLNNADLAPHHPKDPVEMRRINFQTPDSGLRSPLREPGFHFESMLSHPPIPIADMAEHTERLKANDSLKLSQEYESIDPGQQFTWEHSNLEVNKPKNRYANVIAYDHSRVILQPIEGIMGSDYINANYVDGYRCQNAYIATQGPLPETFGDFWRMVWEQRSATIVMMTRLEEKSRIKCDQYWPNRGTETYGFIQVTLLDTIELATFCVRTFSLHKNGSSEKREVRQFQFTAWPDHGVPEYPTPFLAFLRRVKTCNPPDAGPIVVHCSAGVGRTGCFIVIDAMLERIKPEKTVDVYGHVTLMRSQRNYMVQTEDQYSFIHEALLEAVGCGNTEVPARSLYAYIQKLAQVEPGEHVTGMELEFKRLANSKAHTSRFISANLPCNKFKNRLVNIMPYESTRVCLQPIRGVEGSDYINASFIDGYRQQKAYIATQGPLAETTEDFWRMLWENNSTIVVMLTKLREMGREKCHQYWPAERSARYQYFVVDPMAEYNMPQYILREFKVTDARDGQSRTVRQFQFTDWPEQGVPKSGEGFIDFIGQVHKTKEQFGQDGPISVHCSAGVGRTGVFITLSIVLERMRYEGVVDIFQTVKMLRTQRPAMVQTEDEYQFCYQAALEYLGSFDHYAT

SEQ ID NO: 5706 - protein, 1928 aa, Homo sapiens
MAPTWGPGMVSVVGPMGLLVVLLVGGCAAEEPPRFIKEPKDQIGVSGGVASFVCQATGDPKPRVTWNKKGKKVNSQRFETIEFDESAGAVLRIQPLRTPRDENVYECVAQNSVGEITVHAKLTVLREDQLPSGFPNIDMGPQLKVVERTRTATMLCAASGNPDPEITWFKDFLPVDPSASNGRIKQLRSETFESTPIRGALQIESSEETDQGKYECVATNSAGVRYSSPANLYVRVRRVAPRFSILPMSHEIMPGGNVNITCVAVGSPMPYVKWMQGAEDLTPEDDMPVGRNVLELTDVKDSANYTCVAMSSLGVIEAVAQITVKSLPKAPGTPMVTENTATSITITWDSGNPDPVSYYVIEYKSKSQDGPYQIKEDITTTRYSIGGLSPNSEYEIWVSAVNSIGQGPPSESVVTRTGEQAPASAPRNVQARMLSATTMIVQWEEPVEPNGLIRGYRVYYTMEPEHPVGNWQKHNVDDSLLTTVGSLLEDETYTVRVLAFTSVGDGPLSDPIQVKTQQGVPGQPMNLRAEARSETSITLSWSPPRQESIIKYELLFREGDHGREVGRTFDPTTSYVVEDLKPNTEYAFRLAARSPQGLGAFTPVVRQRTLQSKPSAPPQDVKCVSVRSTAILVSWRPPPPETHNGALVGYSVRYRPLGSEDPEPKEVNGIPPTTTQILLEALEKWTQYRITTVAHTEVGPGPESSPVVVRTDEDVPSAPPRKVEAEALNATAIRVLWRSPAPGRQHGQIRGYQVHYVRMEGAEARGPPRIKDVMLADAQWETDDTAEYEMVITNLQPETAYSITVAAYTMKGDGARSKPKVVVTKGAVLGRPTLSVQQTPEGSLLARWEPPAGTAEDQVLGYRLQFGREDSTPLATLEFPPSEDRYTASGVHKGATYVFRLAARSRGGLGEEAAEVLSIPEDTPRGHPQILEAAGNASAGTVLLRWLPPVPAERNGAIVKYTVAVREAGALGPARETELPAAAEPGAENALTLQGLKPDTAYDLQVRAHTRRGPGPFSPPVRYRTFLRDQVSPKNFKVKMIMKTSVLLSWEFPDNYNSPTPYKIQYNGLTLDVDGRTTKKLITHLKPHTFYNFVLTNRGSSLGGLQQTVTAWTAFNLLNGKPSVAPKPDADGFIMVYLPDGQSPVPVQSYFIVMVPLRKSRGGQFLTPLGSPEDMDLEELIQDISRLQRRSLRHSRQLEVPRPYIAARFSVLPPTFHPGDQKQYGGFDNRGLEPGHRYVLFVLAVLQKSEPTFAASPFSDPFQLDNPDPQPIVDGEEGLIWVIGPVLAVVFIICIVIAILLYKNKPDSKRKDSEPRTKCLLNNADLAPHHPKDPVEMRRINFQTPGMLSHPPIPIADMAEHTERLKANDSLKLSQEYESIDPGQQFTWEHSNLEVNKPKNRYANVIAYDHSRVILQPIEGIMGSDYINANYVDGYRCQNAYIATQGPLPETFGDFWRMVWEQRSATIVMMTRLEEKSRIKCDQYWPNRGTETYGFIQVTLLDTIELATFCVRTFSLHKNGSSEKREVRQFQFTAWPDHGVPEYPTPFLAFLRRVKTCNPPDAGPIVVHCSAGVGRTGCFIVIDAMLERIKPEKTVDVYGHVTLMRSQRNYMVQTEDQYSFIHEALLEAVGCGNTEVPARSLYAYIQKLAQVEPGEHVTGMELEFKRLANSKAHTSRFISANLPCNKFKNRLVNIMPYESTRVCLQPIRGVEGSDYINASFIDGYRQQKAYIATQGPLAETTEDFWRMLWENNSTIVVMLTKLREMGREKCHQYWPAERSARYQYFVVDPMAEYNMPQYILREFKVTDARDGQSRTVRQFQFTDWPEQGVPKSGEGFIDFIGQVHKTKEQFGQDGPISVHCSAGVGRTGVFITLSIVLERMRYEGVVDIFQTVKMLRTQRPAMVQTEDEYQFCYQAALEYLGSFDHYAT

SEQ ID NO: 5707 - protein, 1939 aa, Homo sapiens
MAPTWGPGMVSVVGPMGLLVVLLVGGCAAEEPPRFIKEPKDQIGVSGGVASFVCQATGDPKPRVTWNKKGKKVNSQRFETIEFDESAGAVLRIQPLRTPRDENVYECVAQNSVGEITVHAKLTVLREDQLPSGFPNIDMGPQLKVVERTRTATMLCAASGNPDPEITWFKDFLPVDPSASNGRIKQLRSETFESTPIRGALQIESSEETDQGKYECVATNSAGVRYSSPANLYVRELREVRRVAPRFSILPMSHEIMPGGNVNITCVAVGSPMPYVKWMQGAEDLTPEDDMPVGRNVLELTDVKDSANYTCVAMSSLGVIEAVAQITVKSLPKAPGTPMVTENTATSITITWDSGNPDPVSYYVIEYKSKSQDGPYQIKEDITTTRYSIGGLSPNSEYEIWVSAVNSIGQGPPSESVVTRTGEQAPASAPRNVQARMLSATTMIVQWEEPVEPNGLIRGYRVYYTMEPEHPVGNWQKHNVDDSLLTTVGSLLEDETYTVRVLAFTSVGDGPLSDPIQVKTQQGVPGQPMNLRAEARSETSITLSWSPPRQESIIKYELLFREGDHGREVGRTFDPTTSYVVEDLKPNTEYAFRLAARSPQGLGAFTPVVRQRTLQSKPSAPPQDVKCVSVRSTAILVSWRPPPPETHNGALVGYSVRYRPLGSEDPEPKEVNGIPPTTTQILLEALEKWTQYRITTVAHTEVGPGPESSPVVVRTDEDVPSAPPRKVEAEALNATAIRVLWRSPAPGRQHGQIRGYQVHYVRMEGAEARGPPRIKDVMLADAQEMVITNLQPETAYSITVAAYTMKGDGARSKPKVVVTKGAVLGRPTLSVQQTPEGSLLARWEPPAGTAEDQVLGYRLQFGREDSTPLATLEFPPSEDRYTASGVHKGATYVFRLAARSRGGLGEEAAEVLSIPEDTPRGHPQILEAAGNASAGTVLLRWLPPVPAERNGAIVKYTVAVREAGALGPARETELPAAAEPGAENALTLQGLKPDTAYDLQVRAHTRRGPGPFSPPVRYRTFLRDQVSPKNFKVKMIMKTSVLLSWEFPDNYNSPTPYKIQYNGLTLDVDGRTTKKLITHLKPHTFYNFVLTNRGSSLGGLQQTVTAWTAFNLLNGKPSVAPKPDADGFIMVYLPDGQSPVPVQSYFIVMVPLRKSRGGQFLTPLGSPEDMDLEELIQDISRLQRRSLRHSRQLEVPRPYIAARFSVLPPTFHPGDQKQYGGFDNRGLEPGHRYVLFVLAVLQKSEPTFAASPFSDPFQLDNPDPQPIVDGEEGLIWVIGPVLAVVFIICIVIAILLYKNKPDSKRKDSEPRTKCLLNNADLAPHHPKDPVEMRRINFQTPDSGLRSPLREPGFHFESMLSHPPIPIADMAEHTERLKANDSLKLSQEYESIDPGQQFTWEHSNLEVNKPKNRYANVIAYDHSRVILQPIEGIMGSDYINANYVDGYRCQNAYIATQGPLPETFGDFWRMVWEQRSATIVMMTRLEEKSRIKCDQYWPNRGTETYGFIQVTLLDTIELATFCVRTFSLHKNGSSEKREVRQFQFTAWPDHGVPEYPTPFLAFLRRVKTCNPPDAGPIVVHCSAGVGRTGCFIVIDAMLERIKPEKTVDVYGHVTLMRSQRNYMVQTEDQYSFIHEALLEAVGCGNTEVPARSLYAYIQKLAQVEPGEHVTGMELEFKRLANSKAHTSRFISANLPCNKFKNRLVNIMPYESTRVCLQPIRGVEGSDYINASFIDGYRQQKAYIATQGPLAETTEDFWRMLWENNSTIVVMLTKLREMGREKCHQYWPAERSARYQYFVVDPMAEYNMPQYILREFKVTDARDGQSRTVRQFQFTDWPEQGVPKSGEGFIDFIGQVHKTKEQFGQDGPISVHCSAGVGRTGVFITLSIVLERMRYEGVVDIFQTVKMLRTQRPAMVQTEDEYQFCYQAALEYLGSFDHYAT

SEQ ID NO: 5708 - protein, 1530 aa, Homo sapiens
MAPTWGPGMVSVVGPMGLLVVLLVGGCAAEEPPRFIKEPKDQIGVSGGVASFVCQATGDPKPRVTWNKKGKKVNSQRFETIEFDESAGAVLRIQPLRTPRDENVYECVAQNSVGEITVHAKLTVLREDQLPSGFPNIDMGPQLKVVERTRTATMLCAASGNPDPEITWFKDFLPVDPSASNGRIKQLRSETFESTPIRGALQIESSEETDQGKYECVATNSAGVRYSSPANLYVRELREVRRVAPRFSILPMSHEIMPGGNVNITCVAVGSPMPYVKWMQGAEDLTPEDDMPVGRNVLELTDVKDSANYTCVAMSSLGVIEAVAQITVKSLPKAPGTPMVTENTATSITITWDSGNPDPVSYYVIEYKSKSQDGPYQIKEDITTTRYSIGGLSPNSEYEIWVSAVNSIGQGPPSESVVTRTGEQAPASAPRNVQARMLSATTMIVQWEEPVEPNGLIRGYRVYYTMEPEHPVGNWQKHNVDDSLLTTVGSLLEDETYTVRVLAFTSVGDGPLSDPIQVKTQQGVPGQPMNLRAEARSETSITLSWSPPRQESIIKYELLFREGDHGREVGRTFDPTTSYVVEDLKPNTEYAFRLAARSPQGLGAFTPVVRQRTLQSISPKNFKVKMIMKTSVLLSWEFPDNYNSPTPYKIQYNGLTLDVDGRTTKKLITHLKPHTFYNFVLTNRGSSLGGLQQTVTAWTAFNLLNGKPSVAPKPDADGFIMVYLPDGQSPVPVQSYFIVMVPLRKSRGGQFLTPLGSPEDMDLEELIQDISRLQRRSLRHSRQLEVPRPYIAARFSVLPPTFHPGDQKQYGGFDNRGLEPGHRYVLFVLAVLQKSEPTFAASPFSDPFQLDNPDPQPIVDGEEGLIWVIGPVLAVVFIICIVIAILLYKNKPDSKRKDSEPRTKCLLNNADLAPHHPKDPVEMRRINFQTPDSGLRSPLREPGFHFESMLSHPPIPIADMAEHTERLKANDSLKLSQEYESIDPGQQFTWEHSNLEVNKPKNRYANVIAYDHSRVILQPIEGIMGSDYINANYVDGYRCQNAYIATQGPLPETFGDFWRMVWEQRSATIVMMTRLEEKSRIKCDQYWPNRGTETYGFIQVTLLDTIELATFCVRTFSLHKNGSSEKREVRQFQFTAWPDHGVPEYPTPFLAFLRRVKTCNPPDAGPIVVHCSAGVGRTGCFIVIDAMLERIKPEKTVDVYGHVTLMRSQRNYMVQTEDQYSFIHEALLEAVGCGNTEVPARSLYAYIQKLAQVEPGEHVTGMELEFKRLANSKAHTSRFISANLPCNKFKNRLVNIMPYESTRVCLQPIRGVEGSDYINASFIDGYRQQKAYIATQGPLAETTEDFWRMLWENNSTIVVMLTKLREMGREKCHQYWPAERSARYQYFVVDPMAEYNMPQYILREFKVTDARDGQSRTVRQFQFTDWPEQGVPKSGEGFIDFIGQVHKTKEQFGQDGPISVHCSAGVGRTGVFITLSIVLERMRYEGVVDIFQTVKMLRTQRPAMVQTEDEYQFCYQAALEYLGSFDHYAT

SEQ ID NO: 5709 - protein, 1910 aa, Homo sapiens
MAPTWGPGMVSVVGPMGLLVVLLVGGCAAEEPPRFIKEPKDQIGVSGGVASFVCQATGDPKPRVTWNKKGKKVNSQRFETIEFDESAGAVLRIQPLRTPRDENVYECVAQNSVGEITVHAKLTVLREDQLPSGFPNIDMGPQLKVVERTRTATMLCAASGNPDPEITWFKDFLPVDPSASNGRIKQLRSGALQIESSEETDQGKYECVATNSAGVRYSSPANLYVRVRRVAPRFSILPMSHEIMPGGNVNITCVAVGSPMPYVKWMQGAEDLTPEDDMPVGRNVLELTDVKDSANYTCVAMSSLGVIEAVAQITVKSLPKAPGTPMVTENTATSITITWDSGNPDPVSYYVIEYKSKSQDGPYQIKEDITTTRYSIGGLSPNSEYEIWVSAVNSIGQGPPSESVVTRTGEQAPASAPRNVQARMLSATTMIVQWEEPVEPNGLIRGYRVYYTMEPEHPVGNWQKHNVDDSLLTTVGSLLEDETYTVRVLAFTSVGDGPLSDPIQVKTQQGVPGQPMNLRAEARSETSITLSWSPPRQESIIKYELLFREGDHGREVGRTFDPTTSYVVEDLKPNTEYAFRLAARSPQGLGAFTPVVRQRTLQSKPSAPPQDVKCVSVRSTAILVSWRPPPPETHNGALVGYSVRYRPLGSEDPEPKEVNGIPPTTTQILLEALEKWTQYRITTVAHTEVGPGPESSPVVVRTDEDVPSAPPRKVEAEALNATAIRVLWRSPAPGRQHGQIRGYQVHYVRMEGAEARGPPRIKDVMLADAQEMVITNLQPETAYSITVAAYTMKGDGARSKPKVVVTKGAVLGRPTLSVQQTPEGSLLARWEPPAGTAEDQVLGYRLQFGREDSTPLATLEFPPSEDRYTASGVHKGATYVFRLAARSRGGLGEEAAEVLSIPEDTPRGHPQILEAAGNASAGTVLLRWLPPVPAERNGAIVKYTVAVREAGALGPARETELPAAAEPGAENALTLQGLKPDTAYDLQVRAHTRRGPGPFSPPVRYRTFLRDQVSPKNFKVKMIMKTSVLLSWEFPDNYNSPTPYKIQYNGLTLDVDGRTTKKLITHLKPHTFYNFVLTNRGSSLGGLQQTVTAWTAFNLLNGKPSVAPKPDADGFIMVYLPDGQSPVPVQSYFIVMVPLRKSRGGQFLTPLGSPEDMDLEELIQDISRLQRRSLRHSRQLEVPRPYIAARFSVLPPTFHPGDQKQYGGFDNRGLEPGHRYVLFVLAVLQKSEPTFAASPFSDPFQLDNPDPQPIVDGEEGLIWVIGPVLAVVFIICIVIAILLYKNKPDSKRKDSEPRTKCLLNNADLAPHHPKDPVEMRRINFQTPGMLSHPPIPIADMAEHTERLKANDSLKLSQEYESIDPGQQFTWEHSNLEVNKPKNRYANVIAYDHSRVILQPIEGIMGSDYINANYVDGYRCQNAYIATQGPLPETFGDFWRMVWEQRSATIVMMTRLEEKSRIKCDQYWPNRGTETYGFIQVTLLDTIELATFCVRTFSLHKNGSSEKREVRQFQFTAWPDHGVPEYPTPFLAFLRRVKTCNPPDAGPIVVHCSAGVGRTGCFIVIDAMLERIKPEKTVDVYGHVTLMRSQRNYMVQTEDQYSFIHEALLEAVGCGNTEVPARSLYAYIQKLAQVEPGEHVTGMELEFKRLANSKAHTSRFISANLPCNKFKNRLVNIMPYESTRVCLQPIRGVEGSDYINASFIDGYRQQKAYIATQGPLAETTEDFWRMLWENNSTIVVMLTKLREMGREKCHQYWPAERSARYQYFVVDPMAEYNMPQYILREFKVTDARDGQSRTVRQFQFTDWPEQGVPKSGEGFIDFIGQVHKTKEQFGQDGPISVHCSAGVGRTGVFITLSIVLERMRYEGVVDIFQTVKMLRTQRPAMVQTEDEYQFCYQAALEYLGSFDHYAT

SEQ ID NO: 5710 - protein, 1501 aa, Homo sapiens
MAPTWGPGMVSVVGPMGLLVVLLVGGCAAEEPPRFIKEPKDQIGVSGGVASFVCQATGDPKPRVTWNKKGKKVNSQRFETIEFDESAGAVLRIQPLRTPRDENVYECVAQNSVGEITVHAKLTVLREDQLPSGFPNIDMGPQLKVVERTRTATMLCAASGNPDPEITWFKDFLPVDPSASNGRIKQLRSGALQIESSEETDQGKYECVATNSAGVRYSSPANLYVRVRRVAPRFSILPMSHEIMPGGNVNITCVAVGSPMPYVKWMQGAEDLTPEDDMPVGRNVLELTDVKDSANYTCVAMSSLGVIEAVAQITVKSLPKAPGTPMVTENTATSITITWDSGNPDPVSYYVIEYKSKSQDGPYQIKEDITTTRYSIGGLSPNSEYEIWVSAVNSIGQGPPSESVVTRTGEQAPASAPRNVQARMLSATTMIVQWEEPVEPNGLIRGYRVYYTMEPEHPVGNWQKHNVDDSLLTTVGSLLEDETYTVRVLAFTSVGDGPLSDPIQVKTQQGVPGQPMNLRAEARSETSITLSWSPPRQESIIKYELLFREGDHGREVGRTFDPTTSYVVEDLKPNTEYAFRLAARSPQGLGAFTPVVRQRTLQSISPKNFKVKMIMKTSVLLSWEFPDNYNSPTPYKIQYNGLTLDVDGRTTKKLITHLKPHTFYNFVLTNRGSSLGGLQQTVTAWTAFNLLNGKPSVAPKPDADGFIMVYLPDGQSPVPVQSYFIVMVPLRKSRGGQFLTPLGSPEDMDLEELIQDISRLQRRSLRHSRQLEVPRPYIAARFSVLPPTFHPGDQKQYGGFDNRGLEPGHRYVLFVLAVLQKSEPTFAASPFSDPFQLDNPDPQPIVDGEEGLIWVIGPVLAVVFIICIVIAILLYKNKPDSKRKDSEPRTKCLLNNADLAPHHPKDPVEMRRINFQTPGMLSHPPIPIADMAEHTERLKANDSLKLSQEYESIDPGQQFTWEHSNLEVNKPKNRYANVIAYDHSRVILQPIEGIMGSDYINANYVDGYRCQNAYIATQGPLPETFGDFWRMVWEQRSATIVMMTRLEEKSRIKCDQYWPNRGTETYGFIQVTLLDTIELATFCVRTFSLHKNGSSEKREVRQFQFTAWPDHGVPEYPTPFLAFLRRVKTCNPPDAGPIVVHCSAGVGRTGCFIVIDAMLERIKPEKTVDVYGHVTLMRSQRNYMVQTEDQYSFIHEALLEAVGCGNTEVPARSLYAYIQKLAQVEPGEHVTGMELEFKRLANSKAHTSRFISANLPCNKFKNRLVNIMPYESTRVCLQPIRGVEGSDYINASFIDGYRQQKAYIATQGPLAETTEDFWRMLWENNSTIVVMLTKLREMGREKCHQYWPAERSARYQYFVVDPMAEYNMPQYILREFKVTDARDGQSRTVRQFQFTDWPEQGVPKSGEGFIDFIGQVHKTKEQFGQDGPISVHCSAGVGRTGVFITLSIVLERMRYEGVVDIFQTVKMLRTQRPAMVQTEDEYQFCYQAALEYLGSFDHYAT

SEQ ID NO: 5711 - protein, 122 aa, Homo sapiens
MEDTPLVISKQKTEVVCGVPTQVVCTAFSSHILVVVTQFGKMGTLVSLEPSSVASDVSKPVLTTKVLLGQDEPLIHVFAKNLVAFVSQEAGNRAVLLAVAVKDKSMEGLKALREVIRVCQVW

SEQ ID NO: 5712 - protein, 376 aa, Homo sapiens
MKDVPGFLQQSQNSGPGQPAVWHRLEELYTKKLWHQLTLQVLDFVQDPCFAQGDGLIKLYENFISEFEHRVNPLSLVEIILHVVRQMTDPNVALTFLEKTREKVKSSDEAVILCKTAIGALKLNIGDLQVTKETIEDVEEMLNNLPGVTSVHSRFYDLSSKYYQTIGNHASYYKDALRFLGCVDIKDLPVSEQQERAFTLGLAGLLGEGVFNFGELLMHPVLESLRNTDRQWLIDTLYAFNSGNVERFQTLKTAWGQQPDLAANEAQLLRKIQLLCLMEMTFTRPANHRQLTFEEIAKSAKITVNEVELLVMKALSVGLVKGSIDEVDKRVHMTWVQPRVLDLQQIKGMKDRLEFWCTDVKSMEMLVEHQAHDILT

SEQ ID NO: 5713 - protein, 378 aa, Homo sapiens
MKDVPGFLQQSQNSGPGQPAVWHRLEELYTKNFMKTLSVNLNTGKSLSSVFHFENECIDARRCSKAGGFYFRVNPLSLVEIILHVVRQMTDPNVALTFLEKTREKVKSSDEAVILCKTAIGALKLNIGDLQVTKETIEDVEEMLNNLPGVTSVHSRFYDLSSKYYQTIGNHASYYKDALRFLGCVDIKDLPVSEQQERAFTLGLAGLLGEGVFNFGELLMHPVLESLRNTDRQWLIDTLYAFNSGNVERFQTLKTAWGQQPDLAANEAQLLRKIQLLCLMEMTFTRPANHRQLTFEEIAKSAKITVNEVELLVMKALSVGLVKGSIDEVDKRVHMTWVQPRVLDLQQIKGMKDRLEFWCTDVKSMEMLVEHQAHDILT

SEQ ID NO: 5714 - protein, 114 aa, Homo sapiens
MAGLALQPGTALLCYSCKAQVSNEDCLQVENCTQLGEQCWTARIRAVGLLTVISKGCSLNCVDDSQDYYVGKKNITCCDTDLCNASGAHALQPAAAILALLPALGLLLWGPGQL

SEQ ID NO: 5715 - protein, 93 aa, Homo sapiens
MAKCTKKVGGIVSKYRTHHGASLWKMVKEIEISQHTKYTCSFCGKTKMKRRAVKIRHCNSCMKTVAGSAWTYNTTSAVMVKSAIRRLKELKDQ

SEQ ID NO: 5716 - protein, 288 aa, Homo sapiens [sequence omitted]

SEQ ID NO: 5717 - protein, 649 aa, Homo sapiens
MENDPSRRRESISLTPVAKGLENMGADFLESLEEGQLPRSDLSPAEIRSSWSEAAPKPFSRWRNLQPALRARSFCREHMQLFRWIGTGLLCTGLSAFLLVACLLDFQRALALFVLTCVVLTFLGHRLLKRLLGPKLRRFLKPQGHPRLLLWFKRGLALAAFLGLVLWLSLDTSQRPEQLVSFAGICVFVALLFACSKHHCAVSWRAVSWGLGLQFVLGLLVIRTEPGFIAFEWLGEQIRIFLSYTKAGSSFVFGEALVKDVFAFQVLPIIVFFSCVISVLYHVGLMQWVILKIAWLMQVTMGTTATETLSVAGNIFVSQTEAPLLIRPYLADMTLSEVHVVMTGGYATIAGSLLGAYISFGIDATSLIAASVMAAPCALALSKLVYPEVEESKFRREEGVKLTYGDAQNLIEAASTGAAISVKVVANIAANLIAFLAVLDFINAALSWLGDMVDIQGLSFQLICSYILRPVAFLMGVAWEDCPVVAELLGIKLFLNEFVAYQDLSKYKQRRLAGAEEWVGDRKQWISVRAEVLTTFALCGFANFSSIGIMLGGLTSMVPQRKSDFSQIVLRALFTGACVSLVNACMAGILYMPRGAEVDCMSLLNTTLSSSSFEIYQCCREAFQSVNPEFSPEALDNCCRFYNHTICAQ

SEQ ID NO: 5718 - protein, 175 aa, Homo sapiens
MENDPSRRRESISLTPVAKGLENMGADFLESLEEGQLPRSDLSPAEIRSSWSEAAPKPFSRWRNLQPALRARSFCREHMQLFRWIGTGLLCTGLSAFLLVACLLDFQRALALFVLTCVVLTFLGHRLLKRLLGPKLRRFLKPQGHPRLLLWFKRDPRPWSKEGPNQYLPQITWTV

SEQ ID NO: 5719 - protein, 378 aa, Homo sapiens
MEVKPPPGRPQPDSGRRRRRRGEEGHDPKEPEQLRKLFIGGLSFETTDDSLREHFEKWGTLTDCVVMRDPQTKRSRGFGFVTYSCVEEVDAAMCARPHKVDGRVVEPKRAVSREDSVKPGAHLTVKKIFVGGIKEDTEEYNLRDYFEKYGKIETIEVMEDRQSGKKRGFAFVTFDDHDTVDKIVVQKYHTINGHNCEVKKALSKQEMQSAGSQRGRGGGSGNFMGRGGNFGGGGGNFGRGGNFGGRGGYGGGGGGSRGSYGGGDGGYNGFGGDGGNYGGGPGYSSRGGYGGGGPGYGNQGGGYGGGGGYDGYNEGGNFGGGNYGGGGNYNDFGNYSGQQQSNYGPMKGGSFGGRSSGSPYGGGYGSGGGSGGYGSRRF

SEQ ID NO: 5720 - protein, 356 aa, Homo sapiens
MEGHDPKEPEQLRKLFIGGLSFETTDDSLREHFEKWGTLTDCVVMRDPQTKRSRGFGFVTYSCVEEVDAAMCARPHKVDGRVVEPKRAVSREDSVKPGAHLTVKKIFVGGIKEDTEEYNLRDYFEKYGKIETIEVMEDRQSGKKRGFAFVTFDDHDTVDKIVVQKYHTINGHNCEVKKALSKQEMQSAGSQRGRGGGSGNFMGRGGNFGGGGGNFGRGGNFGGRGGYGGGGGGSRGSYGGGDGGYNGFGGDGGNYGGGPGYSSRGGYGGGGPGYGNQGGGYGGGGGYDGYNEGGNFGGGNYGGGGNYNDFGNYSGQQQSNYGPMKGGSFGGRSSGSPYGGGYGSGGGSGGYGSRRF

SEQ ID NO: 5721 - protein, 305 aa, Homo sapiens
MENSQLCKLFIGGLNVQTSESGLRGHFEAFGTLTDCVVVVNPQTKRSRCFGFVTYSNVEEADAAMAASPHAVDGNTVELKRAVSREDSARPGAHAKVKKLFVGGLKGDVAEGDLIEHFSQFGTVEKAEIIADKQSGKKRGFGFVYFQNHDAADKAAVVKFHPIQGHRVEVKKAVPKEDIYSGGGGGGSRSSRGGRGGRGRGGGRDQNGLSKGGGGGYNSYGGYGGGGGGGYNAYGGGGGGSSYGGSDYGNGFGGFGSYSQHQSSYGPMKSGGGGGGGGSSWGGRSNSGPYRGGYGGGGGYGGSSF

SEQ ID NO: 5722 - protein, 1529 aa, Homo sapiens
MRGVGWQMLSLSLGLVLAILNKVAPQACPAQCSCSGSTVDCHGLALRSVPRNIPRNTERLDLNGNNITRITKTDFAGLRHLRVLQLMENKISTIERGAFQDLKELERLRLNRNHLQLFPELLFLGTAKLYRLDLSENQIQAIPRKAFRGAVDIKNLQLDYNQISCIEDGAFRALRDLEVLTLNNNNITRLSVASFNHMPKLRTFRLHSNNLYCDCHLAWLSDWLRQRPRVGLYTQCMGPSHLRGHNVAEVQKREFVCSGHQSFMAPSCSVLHCPAACTCSNNIVDCRGKGLTEIPTNLPETITEIRLEQNTIKVIPPGAFSPYKKLRRIDLSNNQISELAPDAFQGLRSLNSLVLYGNKITELPKSLFEGLFSLQLLLLNANKINCLRVDAFQDLHNLNLLSLYDNKLQTIAKGTFSPLRAIQTMHLAQNPFICDCHLKWLADYLHTNPIETSGARCTSPRRLANKRIGQIKSKKFRCSAKEQYFIPGTEDYRSKLSGDCFADLACPEKCRCEGTTVDCSNQKLNKIPEHIPQYTAELRLNNNEFTVLEATGIFKKLPQLRKINFSNNKITDIEEGAFEGASGVNEILLTSNRLENVQHKMFKGLESLKTLMLRSNRITCVGNDSFIGLSSVRLLSLYDNQITTVAPGAFDTLHSLSTLNLLANPFNCNCYLAWLGEWLRKKRIVTGNPRCQKPYFLKEIPIQDVAIQDFTCDDGNDDNSCSPLSRCPTECTCLDTVVRCSNKGLKVLPKGIPRDVTELYLDGNQFTLVPKELSNYKHLTLIDLSNNRISTLSNQSFSNMTQLLTLILSYNRLRCIPPRTFDGLKSLRLLSLHGNDISVVPEGAFNDLSALSHLAIGANPLYCDCNMQWLSDWVKSEYKEPGIARCAGPGEMADKLLLTTPSKKFTCQGPVDVNILAKCNPCLSNPCKNDGTCNSDPVDFYRCTCPYGFKGQDCDVPIHACISNPCKHGGTCHLKEGEEDGFWCICADGFEGENCEVNVDDCEDNDCENNSTCVDGINNYTCLCPPEYTGELCEEKLDFCAQDLNPCQHDSKCILTPKGFKCDCTPGYVGEHCDIDFDDCQDNKCKNGAHCTDAVNGYTCICPEGYSGLFCEFSPPMVLPRTSPCDNFDCQNGAQCIVRINEPICQCLPGYQGEKCEKLVSVNFINKESYLQIPSAKVRPQTNITLQIATDEDSGILLYKGDKDHIAVELYRGRVRASYDTGSHPASAIYSVETINDGNFHIVELLALDQSLSLSVDGGNPKIITNLSKQSTLNFDSPLYVGGMPGKSNVASLRQAPGQNGTSFHGCIRNLYINSELQDFQKVPMQTGILPGCEPCHKKVCAHGTCQPSSQAGFTCECQEGWMGPLCDQRTNDPCLGNKCVHGTCLPINAFSYSCKCLEGHGGVLCDEEEDLFNPCQAIKCKHGKCRLSGLGQPYCECSSGYTGDSCDREISCRGERIRDYYQKQQGYAACQTTKKVSRLECRGGCAGGQCCGPLRSKRRKYSFECTDGSSFVDEVEKVVKCGCTRCVS

SEQ ID NO: 5723 - protein, 1525 aa, Homo sapiens
MRGVGWQMLSLSLGLVLAILNKVAPQACPAQCSCSGSTVDCHGLALRSVPRNIPRNTERLDLNGNNITRITKTDFAGLRHLRVLQLMENKISTIERGAFQDLKELERLRLNRNHLQLFPELLFLGTAKLYRLDLSENQIQAIPRKAFRGAVDIKNLQLDYNQISCIEDGAFRALRDLEVLTLNNNNITRLSVASFNHMPKLRTFRLHSNNLYCDCHLAWLSDWLRQRPRVGLYTQCMGPSHLRGHNVAEVQKREFVCSDEEEGHQSFMAPSCSVLHCPAACTCSNNIVDCRGKGLTEIPTNLPETITEIRLEQNTIKVIPPGAFSPYKKLRRIDLSNNQISELAPDAFQGLRSLNSLVLYGNKITELPKSLFEGLFSLQLLLLNANKINCLRVDAFQDLHNLNLLSLYDNKLQTIAKGTFSPLRAIQTMHLAQNPFICDCHLKWLADYLHTNPIETSGARCTSPRRLANKRIGQIKSKKFRCSGTEDYRSKLSGDCFADLACPEKCRCEGTTVDCSNQKLNKIPEHIPQYTAELRLNNNEFTVLEATGIFKKLPQLRKINFSNNKITDIEEGAFEGASGVNEILLTSNRLENVQHKMFKGLESLKTLMLRSNRITCVGNDSFIGLSSVRLLSLYDNQITTVAPGAFDTLHSLSTLNLLANPFNCNCYLAWLGEWLRKKRIVTGNPRCQKPYFLKEIPIQDVAIQDFTCDDGNDDNSCSPLSRCPTECTCLDTVVRCSNKGLKVLPKGIPRDVTELYLDGNQFTLVPKELSNYKHLTLIDLSNNRISTLSNQSFSNMTQLLTLILSYNRLRCIPPRTFDGLKSLRLLSLHGNDISVVPEGAFNDLSALSHLAIGANPLYCDCNMQWLSDWVKSEYKEPGIARCAGPGEMADKLLLTTPSKKFTCQGPVDVNILAKCNPCLSNPCKNDGTCNSDPVDFYRCTCPYGFKGQDCDVPIHACISNPCKHGGTCHLKEGEEDGFWCICADGFEGENCEVNVDDCEDNDCENNSTCVDGINNYTCLCPPEYTGELCEEKLDFCAQDLNPCQHDSKCILTPKGFKCDCTPGYVGEHCDIDFDDCQDNKCKNGAHCTDAVNGYTCICPEGYSGLFCEFSPPMVLPRTSPCDNFDCQNGAQCIVRINEPICQCLPGYQGEKCEKLVSVNFINKESYLQIPSAKVRPQTNITLQIATDEDSGILLYKGDKDHIAVELYRGRVRASYDTGSHPASAIYSVETINDGNFHIVELLALDQSLSLSVDGGNPKIITNLSKQSTLNFDSPLYVGGMPGKSNVASLRQAPGQNGTSFHGCIRNLYINSELQDFQKVPMQTGILPGCEPCHKKVCAHGTCQPSSQAGFTCECQEGWMGPLCDQRTNDPCLGNKCVHGTCLPINAFSYSCKCLEGHGGVLCDEEEDLFNPCQAIKCKHGKCRLSGLGQPYCECSSGYTGDSCDREISCRGERIRDYYQKQQGYAACQTTKKVSRLECRGGCAGGQCCGPLRSKRRKYSFECTDGSSFVDEVEKVVKCGCTRCVS

SEQ ID NO: 5724 - protein, 1521 aa, Homo sapiens
MRGVGWQMLSLSLGLVLAILNKVAPQACPAQCSCSGSTVDCHGLALRSVPRNIPRNTERLDLNGNNITRITKTDFAGLRHLRVLQLMENKISTIERGAFQDLKELERLRLNRNHLQLFPELLFLGTAKLYRLDLSENQIQAIPRKAFRGAVDIKNLQLDYNQISCIEDGAFRALRDLEVLTLNNNNITRLSVASFNHMPKLRTFRLHSNNLYCDCHLAWLSDWLRQRPRVGLYTQCMGPSHLRGHNVAEVQKREFVCSGHQSFMAPSCSVLHCPAACTCSNNIVDCRGKGLTEIPTNLPETITEIRLEQNTIKVIPPGAFSPYKKLRRIDLSNNQISELAPDAFQGLRSLNSLVLYGNKITELPKSLFEGLFSLQLLLLNANKINCLRVDAFQDLHNLNLLSLYDNKLQTIAKGTFSPLRAIQTMHLAQNPFICDCHLKWLADYLHTNPIETSGARCTSPRRLANKRIGQIKSKKFRCSGTEDYRSKLSGDCFADLACPEKCRCEGTTVDCSNQKLNKIPEHIPQYTAELRLNNNEFTVLEATGIFKKLPQLRKINFSNNKITDIEEGAFEGASGVNEILLTSNRLENVQHKMFKGLESLKTLMLRSNRITCVGNDSFIGLSSVRLLSLYDNQITTVAPGAFDTLHSLSTLNLLANPFNCNCYLAWLGEWLRKKRIVTGNPRCQKPYFLKEIPIQDVAIQDFTCDDGNDDNSCSPLSRCPTECTCLDTVVRCSNKGLKVLPKGIPRDVTELYLDGNQFTLVPKELSNYKHLTLIDLSNNRISTLSNQSFSNMTQLLTLILSYNRLRCIPPRTFDGLKSLRLLSLHGNDISVVPEGAFNDLSALSHLAIGANPLYCDCNMQWLSDWVKSEYKEPGIARCAGPGEMADKLLLTTPSKKFTCQGPVDVNILAKCNPCLSNPCKNDGTCNSDPVDFYRCTCPYGFKGQDCDVPIHACISNPCKHGGTCHLKEGEEDGFWCICADGFEGENCEVNVDDCEDNDCENNSTCVDGINNYTCLCPPEYTGELCEEKLDFCAQDLNPCQHDSKCILTPKGFKCDCTPGYVGEHCDIDFDDCQDNKCKNGAHCTDAVNGYTCICPEGYSGLFCEFSPPMVLPRTSPCDNFDCQNGAQCIVRINEPICQCLPGYQGEKCEKLVSVNFINKESYLQIPSAKVRPQTNITLQIATDEDSGILLYKGDKDHIAVELYRGRVRASYDTGSHPASAIYSVETINDGNFHIVELLALDQSLSLSVDGGNPKIITNLSKQSTLNFDSPLYVGGMPGKSNVASLRQAPGQNGTSFHGCIRNLYINSELQDFQKVPMQTGILPGCEPCHKKVCAHGTCQPSSQAGFTCECQEGWMGPLCDQRTNDPCLGNKCVHGTCLPINAFSYSCKCLEGHGGVLCDEEEDLFNPCQAIKCKHGKCRLSGLGQPYCECSSGYTGDSCDREISCRGERIRDYYQKQQGYAACQTTKKVSRLECRGGCAGGQCCGPLRSKRRKYSFECTDGSSFVDEVEKVVKCGCTRCVS

SEQ ID NO: 5725 - protein, 351 aa, Homo sapiens
MATDVQLADYPLMSPKAELKLEKKSGRKPRSPRDSGPQKELVIPGIVDFERIRRALRTPKPQTPGTYCFGRLSHHSFFSRHHPHPQHVTHIQDLTGKPVCVVRDFPAPLPESTVFSGCQMGIPTISVPIGDPQSNRNPQLSSEAWKKELKELASRVAFLTKEDELKKKEKEQKEEPLREQGAKYSAETGRLIPASTRAVGRRRSHQGQQSQSSSRHEGVQAFLLQDQELLVLELLCRILETDLLSAIQFWLLYAPPKEKDLALGLLQTAVAQLLPQPLVSIPTEKLLSQLPEVHEPPQEKQEPPCSQSPKKTKISPFTKSEKPEYIGEAQVLQMHSSQNTEKKTSKPRAES

SEQ ID NO: 5726 - protein, 250 aa, Homo sapiens
MATDVQLADYPLMSPKAELKLEKKSGRKPRSPRDSGPQKELVIPGIVDFERIRRALRTPKPQTPGTYCFGRLSHHSFFSRHHPHPQHVTHIQDLTGKPVCVVRDFPAPLPESTVFSGCQMGIPTISVPIGDPQSNRNPQLSSEAWKKELKELASRVAFLTKEDELKKKEKEQKEEPLREQGAKYSAETGRLIPASTRAVGRRRSHQGQQSQSSSRHEGVQAFLLQDQELLKKTSLWDSCRQQWLSSFPSP

SEQ ID NO: 5727 - protein, 188 aa, Homo sapiens
MGGGWWWARAARLARLRFRRSLLPPQRPRSGGARGSFAPGHGPRAGASPPPVSELDRADAWLLRKAHETAFLSWFRNGLLASGIGVISFMQSDMGREAAYGFFLLGGLCVVWGSASYAVGLAALRGPMQLTLGGAAVGAGAVLAASLLWACAVGLYMGQLELDVELVPEDDGTASAEGPDEAGRPPPE

SEQ ID NO: 5728 - protein, 285 aa, Homo sapiens
MMEAIKKKMQMLKLDKENALDRAEQAEAEQKQAEERSKQLEDELAAMQKKLKGTEDELDKYSEALKDAQEKLELAEKKAADAEAEVASLNRRIQLVEEELDRAQERLATALQKLEEAEKAADESERGMKVIENRALKDEEKMELQEIQLKEAKHIAEEADRKYEEVARKLVIIEGDLERTEERAELAESKCSELEEELKNVTNNLKSLEAQAEKYSQKEDKYEEEIKILTDKLKEAETRAEFAERSVAKLEKTIDDLEDELYAQKLKYKAISEELDHALNDMTSI

SEQ ID NO: 5729 - protein, 248 aa, Homo sapiens
MAGITTIEAVKRKIQVLQQQADDAEERAERLQREVEGERRAREQAEAEVASLNRRIQLVEEELDRAQERLATALQKLEEAEKAADESERGMKVIENRALKDEEKMELQEIQLKEAKHIAEEADRKYEEVARKLVIIEGDLERTEERAELAESRCREMDEQIRLMDQNLKCLSAAEEKYSQKEDKYEEEIKILTDKLKEAETRAEFAERSVAKLEKTIDDLEDKLKCTKEEHLCTQRMLDQTLLDLNEM

SEQ ID NO: 5730 - protein, 247 aa, Homo sapiens
MAGITTIEAVKRKIQVLQQQADDAEERAERLQREVEGERRAREQAEAEVASLNRRIQLVEEELDRAQERLATALQKLEEAEKAADESERGMKVIENRALKDEEKMELQEIQLKEAKHIAEEADRKYEEVARKLVIIEGDLERTEERAELAESRCREMDEQIRLMDQNLKCLSAAEEKYSQKEDKYEEEIKILTDKLKEAETRAEFAERSVAKLEKTIDDLEERLYSQLERNRLLSNELKLTLHDLCD

SEQ ID NO: 5731 - protein, 247 aa, Homo sapiens
MAGITTIEAVKRKIQVLQQQADDAEERAERLQREVEGERRAREQAEAEVASLNRRIQLVEEELDRAQERLATALQKLEEAEKAADESERGMKVIENRALKDEEKMELQEIQLKEAKHIAEEADRKYEEVARKLVIIEGDLERTEERAELAESKCSELEEELKNVTNNLKSLEAQAEKYSQKEDKYEEEIKILTDKLKEAETRAEFAERSVAKLEKTIDDLEERLYSQLERNRLLSNELKLTLHDLCD

SEQ ID NO: 5732 - protein, 248 aa, Homo sapiens
MAGITTIEAVKRKIQVLQQQADDAEERAERLQREVEGERRAREQAEAEVASLNRRIQLVEEELDRAQERLATALQKLEEAEKAADESERGMKVIENRALKDEEKMELQEIQLKEAKHIAEEADRKYEEVARKLVIIEGDLERTEERAELAESKCSELEEELKNVTNNLKSLEAQAEKYSQKEDKYEEEIKILTDKLKEAETRAEFAERSVAKLEKTIDDLEDKLKCTKEEHLCTQRMLDQTLLDLNEM

SEQ ID NO: 5733 - protein, 248 aa, Homo sapiens
MAGITTIEAVKRKIQVLQQQADDAEERAERLQREVEGERRAREQAEAEVASLNRRIQLVEEELDRAQERLATALQKLEEAEKAADESERGMKVIENRALKDEEKMELQEIQLKEAKHIAEEADRKYEEVARKLVIIEGDLERTEERAELAESRCREMDEQIRLMDQNLKCLSAAEEKYSQKEDKYEEEIKILTDKLKEAETRAEFAERSVAKLEKTIDDLEDELYAQKLKYKAISEELDHALNDMTSI

SEQ ID NO: 5734 - protein, 158 aa, Homo sapiens
MKVIENRALKDEEKMELQEIQLKEAKHIAEEADRKYEEVARKLVIIEGDLERTEERAELAESKCSELEEELKNVTNNLKSLEAQAEKYSQKEDKYEEEIKILTDKLKEAETRAEFAERSVAKLEKTIDDLEDKLKCTKEEHLCTQRMLDQTLLDLNEM

SEQ ID NO: 5735 - protein, 152 aa, Homo sapiens
MPSVRSLLRLLAAAAACGAFAFLGYCIYLNRKRRGDPAFKRRLRDKRRAEPQKAEEQGTQLWDPTKNKKLQELFLQEVRMGELWLSRGEHRMGIQHLGNALLVCEQPRELLKVFKHTLPPKVFEMLLHKIPLICQQFEADMNEQDCLEDDPD

SEQ ID NO: 5736 - protein, 391 aa, Homo sapiens
MEPLRVLELYSGVGGMHHALRESCIPAQVVAAIDVNTVANEVYKYNFPHTQLLAKTIEGITLEEFDRLSFDMILMSPPCQPFTRIGRQGDMTDSRTNSFLHILDILPRLQKLPKYILLENVKGFEVSSTRDLLIQTIENCGFQYQEFLLSPTSLGIPNSRLRYFLIAKLQSEPLPFQAPGQVLMEFPKIESVHPQKYAMDVENKIQEKNVEPNISFDGSIQCSGKDAILFKLETAEEIHRKNQQDSDLSVKMLKDFLEDDTDVNQYLLPPKSLLRYALLLDIVQPTCRRSVCFTKGYGSYIEGTGSVLQTAEDVQVENIYKSLTNLSQEEQITKLLILKLRYFTPKEIANLLGFPPEFGFPEKITVKQRYRLLGNSLNVHVVAKLIKILYE

SEQ ID NO: 5737 - protein, 367 aa, Homo sapiens
MEPLRVLELYSGVGGMHHALRESCIPAQVVAAIDVNTVANEVYKYNFPHTQLLAKTIEGITLEEFDRLSFDMILMSPPCQPFTRLQKLPKYILLENVKGFEVSSTRDLLIQTIENCGFQYQEFLLSPTSLGIPNSRLRYFLIAKLQSEPLPFQAPGQVLMEFPKIESVHPQKYAMDVENKIQEKNVEPNISFDGSIQCSGKDAILFKLETAEEIHRKNQQDSDLSVKMLKDFLEDDTDVNQYLLPPKSLLRYALLLDIVQPTCRRSVCFTKGYGSYIEGTGSVLQTAEDVQVENIYKSLTNLSQEEQITKLLILKLRYFTPKEIANLLGFPPEFGFPEKITVKQRYRLLGNSLNVHVVAKLIKILYE

SEQ ID NO: 5738 - protein, 345 aa, Homo sapiens
MEPLRVLELYSGVGGMHHALRESCIPAQVVAAIDVNTVANEVYKYNFPHTQLLAKTIEGITLEEFDRLSFDMILMSPPCQPFTRDLLIQTIENCGFQYQEFLLSPTSLGIPNSRLRYFLIAKLQSEPLPFQAPGQVLMEFPKIESVHPQKYAMDVENKIQEKNVEPNISFDGSIQCSGKDAILFKLETAEEIHRKNQQDSDLSVKMLKDFLEDDTDVNQYLLPPKSLLRYALLLDIVQPTCRRSVCFTKGYGSYIEGTGSVLQTAEDVQVENIYKSLTNLSQEEQITKLLILKLRYFTPKEIANLLGFPPEFGFPEKITVKQRYRLLGNSLNVHVVAKLIKILYE

SEQ ID NO: 5739 - protein, 63 aa, Homo sapiens
MEPLRVLELYSGVGGMHHALRESCIPAQVVAAIDVNTVANEVYKYNFPHTQLLAKTIEDWPAG

SEQ ID NO: 5740 - protein, 71 aa, Homo sapiens
MEPLRVLELYSGVGGMHHALRESCIPAQVVAAIDVNTVANEVYKYNFPHTQLLAKTIEITKITKVYSFGKC

SEQ ID NO: 5741 - protein, 107 aa, Homo sapiens
MEPLRVLELYSGVGGMHHALRESCIPAQVVAAIDVNTVANEVYKYNFPHTQLLAKTIERPLDTNNRKLWLSVPRVYIISNLSWHSKFKATIFSYCKASVRAITLSSP

SEQ ID NO: 5742 - protein, 238 aa, Homo sapiens
MYAPGGAGLPGGRRRRSPGGSALPKQPERSLASALPGALSITALCTALAEPAWLHIHGGTCSRQELGVSDVLGYVHPDLLKDFCMNPQTVLLLRVIAAFCFLGILCSLSAFLLDVFGPKHPALKITRRYAFAHILTVLQCATVIGFSYWASELILAQQQQHKKYHGSQVYVTFAVSFYLVAGAGGASILATAANLLRHYPTEEEEQALELLSEMEENEPYPAEYEVINQFQPPPAYTP

SEQ ID NO: 5743 - protein, 271 aa, Homo sapiens
MAAGGRMEDGSLDITQSIEDDPLLDAQLLPHHSLQAHFRPRFHPLPTVIIVNLLWFIHLVFVVLAFLTGVLCSYPNPNEDKCPGNYTNPLKVQTVIILGKVILWILHLLLECYIQYHHSKIRNRGYNLIYRSTRHLKRLALMIQSSGNTVLLLILCMQHSFPEPGRLYLDLILAILALELICSLICLLIYTVKIRRFNKAKPEPDILEEEKIYAYPSNITSETGFRTISSLEEIVEKQGDTIEYLKRHNALLSKRLLALTSSDLGCQPSRT

SEQ ID NO: 5744 - protein, 267 aa, Homo sapiens
MNKATGSLDITQSIEDDPLLDAQLLPHHSLQAHFRPRFHPLPTVIIVNLLWFIHLVFVVLAFLTGVLCSYPNPNEDKCPGNYTNPLKVQTVIILGKVILWILHLLLECYIQYHHSKIRNRGYNLIYRSTRHLKRLALMIQSSGNTVLLLILCMQHSFPEPGRLYLDLILAILALELICSLICLLIYTVKIRRFNKAKPEPDILEEEKIYAYPSNITSETGFRTISSLEEIVEKQGDTIEYLKRHNALLSKRLLALTSSDLGCQPSRT

SEQ ID NO: 5745 - protein, 221 aa, Homo sapiens
MASSTSLPAPGSRPKKPLGKMADWFRQTLLKKPKKRPNSPESTSSDASQPTSQDSPLPPSLSSVTSPSLPPTHASDSGSSRWSKDYDVCVCHSEEDLVAAQDLVSYLEGSTASLRCFLQLRDATPGGAIVSELCQALSSSHCRVLLITPGFLQDPWCKYQMLQALTEAPGAEGCTIPLLSGLSRAAYPPELRFMYYVDGRGPDGGFRQVKEAVMRYLQTLS

SEQ ID NO: 5746 - protein, 235 aa, Homo sapiens
MASSTSLPAPGSRPKKPLGKMADWFRQTLLKKPKKRPNSPESTSSDASQPTSQDSPLPPSLSSVTSPSLPPTHASDSGSSRWSKDYDVCVCHSEEDLVAAQDLVSYLEGSTASLRCFLQLRDATPGGAIVSELCQALSSSHCRVLLITPGFLQDPWCKYQMLQALTEAPGAEGCTIPLLSGLSRAAYPPELRFMYYVDGRGPDGGFRQVKEAVMRCKLLQEGEGERDSATVSDLL

SEQ ID NO: 5747 - protein, 255 aa, Homo sapiens
MASSTSLPAPGSRPKKPLGKMADWFRQTLLKKPKKRPNSPESTSSDASQPTSQDSPLPPSLSSVTSPSLPPTHASDSGSSRWSKDYDVCVCHSEEDLVAAQDLVSYLEGSTASLRCFLQLRDATPGGAIVSELCQALSSSHCRVLLITPGFLQDPWCKYQMLQALTEAPGAEGCTIPLLSGLSRAAYPPELRFMYYVDGRGPDGGFRQVKEAVMRYLQTLWHLLYHGTPEIGVKLETENPCRASDSHKCDKRYRE

SEQ ID NO: 5748 - protein, 759 aa, Homo sapiens
MAEGEDMQTFTSIMDALVRISTSMKNMEKELLCPVCQEMYKQPLVLPCTHNVCQACAREVLGQQGYIGHGGDPSSEPTSPASTPSTRSPRLSRRTLPKPDRLDRLLKSGFGTYPGRKRGALHPQVIMFPCPACQGDVELGERGLAGLFRNLTLERVVERYRQSVSVGGAILCQLCKPPPLEATKGCTECRATFCNECFKLFHPWGTQKAQHEPTLPTLSFRPKGLMCPDHKEEVTHYCKTCQRLVCQLCRVRRTHSGHKITPVLSAYQALKDKLTKSLTYILGNQDTVQTQICELEEAVRHTEVSGQQAKEEVSQLVRGLGAVLEEKRASLLQAIEECQQERLARLSAQIQEHRSLLDGSGLVGYAQEVLKETDQPCFVQAAKQLHNRIARATEALQTFRPAASSSFRHCQLDVGREMKLLTELNFLRVPEAPVIDTQRTFAYDQIFLCWRLPPHSPPAWHYTVEFRRTDVPAQPGPTRWQRREEVRGTSALLENPDTGSVYVLRVRGCNKAGYGEYSEDVHLHTPPAPVLHFFLDSRWGASRERLAISKDQRAVRSVPGLPLLLAADRLLTGCHLSVDVVLGDVAVTQGRSYWACAVDPASYLVKVGVGLESKLQESFQGAPDVISPRYDPDSGHDSGAEDATVEASPPFAFLTIGMGKILLGSGASSNAGLTGRDGPTAGCTVPLPPRLGICLDYERGRVSFLDAVSFRGLLECPLDCSGPVCPAFCFIGGGAVQLQEPVGTKPERKVTIGGFAKLD

SEQ ID NO: 5749 - protein, 551 aa, Homo sapiens
MAEGEDMQTFTSIMDALVRISTSMKNMEKELLCPVCQEMYKQPLVLPCTHNVCQACAREVLGQQGYIGHGGDPSSEPTSPASTPSTRSPRLSRRTLPKPDRLDRLLKSGFGTYPGRKRGALHPQVIMFPCPACQGDVELGERGLAGLFRNLTLERVVERYRQSVSVGGAILCQLCKPPPLEATKGCTECRATFCNECFKLFHPWGTQKAQHEPTLPTLSFRPKGLMCPDHKEEVTHYCKTCQRLVCQLCRVRRTHSGHKITPVLSAYQALKDKLTKSLTYILGNQDTVQTQICELEEAVRHTEVSGQQAKEEVSQLVRGLGAVLEEKRASLLQAIEECQQERLARLSAQIQEHRSLLDGSGLVGYAQEVLKETDQPCFVQAAKQLHNRIARATEALQTFRPAASSSFRHCQLDVGREMKLLTELNFLRVPEAPVIDTQRTFAYDQIFLCWRLPPHSPPAWHYTVEFRRTDVPAQPGPTRWQRREEVRGTSALLENPDTGSVYVLRVRGCNKAGYGEYSEDVHLHTPPAPGIQNLARRGGACLQFQLLGRLR

SEQ ID NO: 5750 - protein, 524 aa, Homo sapiens
MERAGWSANLAWLSGGITLCSGEREARDRGLGRSVNQPKAGALEKLQTSMKNMEKELLCPVCQEMYKQPLVLPCTHNVCQACAREVLGQQGYIGHGGDPSSEPTSPASTPSTRSPRLSRRTLPKPDRLDRLLKSGFGTYPGRKRGALHPQVIMFPCPACQGDVELGERGLAGLFRNLTLERVVERYRQSVSVGGAILCQLCKPPPLEATKGCTECRATFCNECFKLFHPWGTQKAQHEPTLPTLSFRPKGLMCPDHKEEVTHYCKTCQRLVCQLCRVRRTHSGHKITPVLSAYQALKDKLTKSLTYILGNQDTVQTQICELEEAVRHTEVSGQQAKEEVSQLVRGLGAVLEEKRASLLQAIEECQQERLARLSAQIQEHRSLLDGSGLVGYAQEVLKETDQPCFVQAAKQLHNRIARATEALQTFRPAASSSFRHCQLDVGREMKLLTELNFLRGCGHRGLCSGAPQCLRPPSLTPSAPLPMIRSSCAGGCPPIHHLPGTIPLSSGARMCLLSQAPPAGSGGRR

SEQ ID NO: 5751 - protein, 498 aa, Homo sapiens
MAEGEDMQTFTSIMDALVRISTSMKNMEKELLCPVCQEMYKQPLVLPCTHNVCQACAREVLGQQGYIGHGGDPSSEPTSPASTPSTRSPRLSRRTLPKPDRLDRLLKSGFGTYPGRKRGALHPQVIMFPCPACQGDVELGERGLAGLFRNLTLERVVERYRQSVSVGGAILCQLCKPPPLEATKGCTECRATFCNECFKLFHPWGTQKAQHEPTLPTLSFRPKGLMCPDHKEEVTHYCKTCQRLVCQLCRVRRTHSGHKITPVLSAYQALKDKLTKSLTYILGNQDTVQTQICELEEAVRHTEVSGQQAKEEVSQLVRGLGAVLEEKRASLLQAIEECQQERLARLSAQIQEHRSLLDGSGLVGYAQEVLKETDQPCFVQAAKQLHNRIARATEALQTFRPAASSSFRHCQLDVGREMKLLTELNFLRGCGHRGLCSGAPQCLRPPSLTPSAPLPMIRSSCAGGCPPIHHLPGTIPLSSGARMCLLSQAPPAGSGGRR

SEQ ID NO: 5752 - protein, 736 aa, Homo sapiens
MKNMEKELLCPVCQEMYKQPLVLPCTHNVCQACAREVLGQQGYIGHGGDPSSEPTSPASTPSTRSPRLSRRTLPKPDRLDRLLKSGFGTYPGRKRGALHPQVIMFPCPACQGDVELGERGLAGLFRNLTLERVVERYRQSVSVGGAILCQLCKPPPLEATKGCTECRATFCNECFKLFHPWGTQKAQHEPTLPTLSFRPKGLMCPDHKEEVTHYCKTCQRLVCQLCRVRRTHSGHKITPVLSAYQALKDKLTKSLTYILGNQDTVQTQICELEEAVRHTEVSGQQAKEEVSQLVRGLGAVLEEKRASLLQAIEECQQERLARLSAQIQEHRSLLDGSGLVGYAQEVLKETDQPCFVQAAKQLHNRIARATEALQTFRPAASSSFRHCQLDVGREMKLLTELNFLRVPEAPVIDTQRTFAYDQIFLCWRLPPHSPPAWHYTVEFRRTDVPAQPGPTRWQRREEVRGTSALLENPDTGSVYVLRVRGCNKAGYGEYSEDVHLHTPPAPVLHFFLDSRWGASRERLAISKDQRAVRSVPGLPLLLAADRLLTGCHLSVDVVLGDVAVTQGRSYWACAVDPASYLVKVGVGLESKLQESFQGAPDVISPRYDPDSGHDSGAEDATVEASPPFAFLTIGMGKILLGSGASSNAGLTGRDGPTAGCTVPLPPRLGICLDYERGRVSFLDAVSFRGLLECPLDCSGPVCPAFCFIGGGAVQLQEPVGTKPERKVTIGGFAKLD

SEQ ID NO: 5753 - protein, 551 aa, Homo sapiens
MAENWKNCFEEELICPICLHVFVEPVQLPCKHNFCRGCIGEAWAKDSGLVRCPECNQAYNQKPGLEKNLKLTNIVEKFNALHVEKPPAALHCVFCRRGPPLPAQKVCLRCEAPCCQSHVQTHLQQPSTARGHLLVEADDVRAWSCPQHNAYRLYHCEAEQVAVCQYCCYYSGAHQGHSVCDVEIRRNEIRKMLMKQQDRLEEREQDIEDQLYKLESDKRLVEEKVNQLKEEVRLQYEKLHQLLDEDLRQTVEVLDKAQAKFCSENAAQALHLGERMQEAKKLLGSLQLLFDKTEDVSFMKNTKSVKILMDRTQTCTSSSLSPTKIGHLNSKLFLNEVAKKEKQLRKMLEGPFSTPVPFLQSVPLYPCGVSSSGAEKRKHSTAFPEASFLETSSGPVGGQYGAAGTASGEGQSGQPLGPCSSTQHLVALPGGAQPVHSSPVFPPSQYPNGSAAQQPMLPQYGGRKILVCSVDNCYCSSVANHGGHQPYPRSGHFPWTVPSQEYSHPLPPTPSVPQSLPSLAVRDWLDASQQPGHQDFYRVYGQPSTKHYVTS

SEQ ID NO: 5754 - protein, 500 aa, Homo sapiens
MEVSTNPSSNIDPGDYVEMNDSITHLPSKVVIQDITMELHCPLCNDWFRDPLMLSCGHNFCEACIQDFWRLQAKETFCPECKMLCQYNNCTFNPVLDKLVEKIKKLPLLKGHPQCPEHGENLKLFSKPDGKLICFQCKDARLSVGQSKEFLQISDAVHFFTEELAIQQGQLETTLKELQTLRNMQKEAIAAHKENKLHLQQHVSMEFLKLHQFLHSKEKDILTELREEGKALNEEMELNLSQLQEQCLLAKDMLVSIQAKTEQQNSFDFLKDITTLLHSLEQGMKVLATRELISRKLNLGQYKGPIQYMVWREMQDTLCPGLSPLTLDPKTAHPNLVLSKSQTSVWHGDIKKIMPDDPERFDSSVAVLGSRGFTSGKWYWEVEVAKKTKWTVGVVRESIIRKGSCPLTPEQGFWLLRLRNQTDLKALDLPSFSLTLTNNLDKVGIYLDYEGGQLSFYNAKTMTHIYTFSNTFMEKLYPYFCPCLNDGGENKEPLHILHPQ

SEQ ID NO: 5755 - protein, 341 aa, Homo sapiens
MEEELAIQQGQLETTLKELQTLRNMQKEAIAAHKENKLHLQQHVSMEFLKLHQFLHSKEKDILTELREEGKALNEEMELNLSQLQEQCLLAKDMLVSIQAKTEQQNSFDFLKDITTLLHSLEQGMKVLATRELISRKLNLGQYKGPIQYMVWREMQDTLCPGLSPLTLDPKTAHPNLVLSKSQTSVWHGDIKKIMPDDPERFDSSVAVLGSRGFTSGKWYWEVEVAKKTKWTVGVVRESIIRKGSCPLTPEQGFWLLRLRNQTDLKALDLPSFSLTLTNNLDKVGIYLDYEGGQLSFYNAKTMTHIYTFSNTFMEKLYPYFCPCLNDGGENKEPLHILHPQ

SEQ ID NO: 5756 - protein, 296 aa, Homo sapiens
MEFLKLHQFLHSKEKDILTELREEGKALNEEMELNLSQLQEQCLLAKDMLVSIQAKTEQQNSFDFLKDITTLLHSLEQGMKVLATRELISRKLNLGQYKGPIQYMVWREMQDTLCPGLSPLTLDPKTAHPNLVLSKSQTSVWHGDIKKIMPDDPERFDSSVAVLGSRGFTSGKWYWEVEVAKKTKWTVGVVRESIIRKGSCPLTPEQGFWLLRLRNQTDLKALDLPSFSLTLTNNLDKVGIYLDYEGGQLSFYNAKTMTHIYTFSNTFMEKLYPYFCPCLNDGGENKEPLHILHPQ

SEQ ID NO: 5757 - protein, 279 aa, Homo sapiens
MEFLKLHQFLHSKEKDILTELREEGKALNEEMELNLSQLQEQCLLAKDMLDITTLLHSLEQGMKVLATRELISRKLNLGQYKGPIQYMVWREMQDTLCPGLSPLTLDPKTAHPNLVLSKSQTSVWHGDIKKIMPDDPERFDSSVAVLGSRGFTSGKWYWEVEVAKKTKWTVGVVRESIIRKGSCPLTPEQGFWLLRLRNQTDLKALDLPSFSLTLTNNLDKVGIYLDYEGGQLSFYNAKTMTHIYTFSNTFMEKLYPYFCPCLNDGGENKEPLHILHPQ

SEQ ID NO: 5758 - protein, 118 aa, Homo sapiens
MQWALAVLLAFLSPASQKSSNLEGRTKSVIRQTGSSAEITCDLAEGSNGYIHWYLHQEGKAPQRLQYYDSYNSKVVLESGVSPGKYYTYASTRNNLRLILRNLIENDFGVYYCATWDG

SEQ ID NO: 5759 - protein, 253 aa, Homo sapiens
MNFSGGGRQEAAGSRGRRAPRPREQDRDVQLSKALSYALRHGALKLGLPMGADGFVPLGTLLQLPQFRGFSAEDVQRVVDTNRKQRFALQLGDPSTGLLIRANQGHSLQVPKLELMPLETPQALPPMLVHGTFWKHWPSILLKGLSCQGRTHIHLAPGLPGDPGIISGMRSHCEIAVFIDGPLALADGIPFFRSANGVILTPGNTDGFLLPKYFKEALQLRPTRKPLSLAGDEETECQSSPKHSSRERRRIQQ

SEQ ID NO: 5760 - protein, 204 aa, Homo sapiens
MGADGFVPLGTLLQLPQFRGFSAEDVQRVVDTNRKQRFALQLGDPSTGLLIRANQGHSLQVPKLELMPLETPQALPPMLVHGTFWKHWPSILLKGLSCQGRTHIHLAPGLPGDPGIISGMRSHCEIAVFIDGPLALADGIPFFRSANGVILTPGNTDGFLLPKYFKEALQLRPTRKPLSLAGDEETECQSSPKHSSRERRRIQQ

SEQ ID NO: 5761 - protein, 216 aa, Homo sapiens
MNFSGGGRQEAAGSRGRRAPRPREQDRDVQLSKALSYALRHGALKLGLPMGADGFVPLGTLLQLPQFRGFSAEDVQRVVDTNRKQRFALQLGDPSTGLLIRANQGHSLQVPKLELMPLETPQALPPMLVHGTFWKHWPSILLKGLSCQGRTHIHLAPGLPGDPGIISGMRSHCEIAVFIDGPLALAGKPLSLAGDEETECQSSPKHSSRERRRIQQ

SEQ ID NO: 5762 - protein, 255 aa, Homo sapiens
MNFSGGGRQEAAGSRGRRAPRPREQDRDVQLSKALSYALRHGALKLGLPMGADGFVPLGTLLQLPQFRGFSAEDVQRVVDTNRKQRFALQLGDPSTGLLIRANQGHSLQVGVPKLELMPLETPQALPPMLVHGTFWKHWPSILLKGLSCQGRTHIHLAPGLPGDPGIISGMRSHCEIAVFIDGPLALADGIPFFRSANGVILTPGNTDGFLLPKYFKEALQLRPTRKPLSLAGDEETECQSSPKHSSRERRRIQQ

SEQ ID NO: 5763 - protein, 390 aa, Homo sapiens
MAVSESQLKKMVSKYKYRDLTVRETVNVITLYKDLKPVLDSYVFNDGSSRELMNLTGTIPVPYRGNTYNIPICLWLLDTYPYNPPICFVKPTSSMTIKTGKHVDANGKIYLPYLHEWKHPQSDLLGLIQVMIVVFGDEPPVFSRPISASYPPYQATGPPNTSYMPGMPGGISPYPSGYPPNPSGYPGCPYPPGGPYPATTSSQYPSQPPVTTVGPSRDGTISEDTIRASLISAVSDKLRWRMKEEMDRAQAELNALKRTEEDLKKGHQKLEEMVTRLDQEVAEVDKNIELLKKKDEELSSALEKMENQSENNDIDEVIIPTAPLYKQILNLYAEENAIEDTIFYLGEALRRGVIDLDVFLKHVRLLSRKQFQLRALMQKARKTAGLSDLY

SEQ ID NO: 5764 - protein, 285 aa, Homo sapiens
MAVSESQLKKMVSKPQSDLLGLIQVMIVVFGDEPPVFSRPISASYPPYQATGPPNTSYMPGMPGGISPYPSGYPPNPSGYPGCPYPPGGPYPATTSSQYPSQPPVTTVGPSRDGTISEDTIRASLISAVSDKLRWRMKEEMDRAQAELNALKRTEEDLKKGHQKLEEMVTRLDQEVAEVDKNIELLKKKDEELSSALEKMENQSENNDIDEVIIPTAPLYKQILNLYAEENAIEDTIFYLGEALRRGVIDLDVFLKHVRLLSRKQFQLRALMQKARKTAGLSDLY

SEQ ID NO: 5765 - protein, 2925 aa, Homo sapiens
MWDPRAARVPPRDLAVLLCNKSNAFFSLGKWNEAFVAAKECLQWDPTYVKGYYRAGYSLLRLHQPYEAARMFFEGLRLVQRSQDQAPVADFLVGVFTTMSSDSIVLQSFLPCFDHIFTTGFPTEVWQSVIEKLAKKGLWHSFLLLSAKKDRLPRNIHVPELSLKSLFEKYVFIGLYEKMEQVPKLVQWLISIGASVETIGPYPLHALMRLCIQARENHLFRWLMDHKPEWKGRINQKDGDGCTVLHVVAAHSPGYLVKRQTEDVQMLLRFGADPTLLDRQSRSVVDVLKRNKNFKAIEKINSHLEKLATCSKDLSGFSNGDGPTSENDIFRKVLEQLVKYMNSGNRLLHKNFLKQEVVQRFLRLLSTLQEIPPDLVCDINQDCATTVFKFLLEKQRWPEVLLLLTRKVSGEPPLGDCLIKDCNFSDLDICTIIPHLSTWDQRKKQLLGCLIDSGALPDGLQESQERPVVTCLKHEDFELAFLLLTKGADPRAISLTEGDTPLHAALHIFLEIKADIGFSFLSHLLDLFWSNPTEFDYLNPNVQDSNGNTLMHILFQKGMLKRVKKLLDLLVKFDINFNLKNKEGKDARHRIKKNDSLLLAWNKALMENRRRSRQDSAAHLGKLSKSTAPGHTSQLKSQGSFKSVPCGATARTLPEGSAVPDSWETLPGTQVTRKEPGALRPCSLRDCLMQDITVLIQQVEVDPSFPEDCLQSSEPLEAGAGKEGKKDDKPTLGAGAPDCSEVGEGHAQVGLGALQLVPDDNRGKEGNDDQDDWSTQEIEACLQDFDNMTWEIECTSEMLKKLSSKVMTKVIKKKIILAIQQLGNGEWTQGLQKRLKHLKGSIQLFEAKLDKGARMLWELAIDFSPRCSENPEKIIATEQNTCAMEKSGRIYTEIIRIWDIVLDHCKLADSIKAICNAYNRGLSCVLRKKLKGINKGQVSANMKIQKRIPRCYVEDTEAEKGREHVNPEYFPPASAVETEYNIMKFHSFSTNMAFNILNDTTATVEYPFRVGELEYAVIDLNPRPLEPIILIGRSGTGKTTCCLYRLWKKFHVYWEKAEQAGSPLLAKQVWLKRRLEVEPGKESPGGEEEEEEEDEEEEDSIEVETVESIDEQEYEACAGGAGVEPAGDGQAAEVCAPEHPHQLEHLHQIFVTKNHVLCQEVQRNFIELSKSTKATSHYKPLDPNIHKLQDLRDENFPLFVTSKQLLLLLDASLPKPFFLRNEDGSLKRTIIGWSAQEESTIPSWQEDEEEAEVDGDYSEEDKAVEMRTGDSDPRVYVTFEVFKNEIWPKMTKGRTAYNPALIWKEIKSFLKGSFEALSCPHGRLTEEVYKKLGRKRCPNFKEDRSEIYSLFSLYQQIRSQKGYFDEEDVLYNISRRLSKLRVLPWSIHELYGDEIQDFTQAELALLMKCINDPNSMFLTGDTAQSIMKGVAFRFSDLRSLFHYASRNTIDKQCAVRKPKKIHQLYQNYRSHSGILNLASGVVDLLQFYFPESFDRLPRDSGLFDGPKPTVLESCSVSDLAILLRGNKRKTQPIEFGAHQVILVANETAKEKIPEELGLALVLTIYEAKGLEFDDVLLYNFFTDSEAYKEWKIISSFTPTSTDSREENRPLVEVPLDKPGSSQGRSLMVNPEMYKLLNGELKQLYTAITRARVNLWIFDENREKRAPAFKYFIRRDFVQVVKTDENKDFDDSMFVKTSTPAEWIAQGDYYAKHQCWKVAAKCYQKGGAFEKEKLALAHDTALSMKSKKVSPKEKQLEYLELAKTYLECKEPTLSLKCLSYAKEFQLSAQLCERLGKIRDAAYFYKRSQCYKDAFRCFEQIQEFDLALKMYCQEELFEEAAIAVEKYEEMLKTKTLPISKLSYSASQFYLEAAAKYLSANKMKEMMAVLSKLDIEDQLVFLKSRKRLAEAADLLNREGRREEAALLMKQHGCLLEAARLTADKDFQASCLLGAARLNVARDSDIEHTKDILREALDICYQTGQLSGIAEAHFLQGVILRDFQKLRDAFFKFDTLNHSAGVVEALYEAASQCEAEPEKILGLAPGGLEILLSLVRALKRVTNNAEKEMVKSCFEFFGISQVDAKYCQIAQNDPGPILRIIFDLDLNLREKKTKDHFLIMTDQVKLALNKHLLGRLCQITRSLLGKTYRGVCMRFIVGLKCEDENCEHFHRPLRRCEAKCLVQSKMNLVAINGLLLEAKKVFPKILAEELKEIDYILSTDMYGLCKSILDVLFPKHFHQRVLSENPMACKEILKPNYKSFRFYRFALKEYIHFLFENESARNRRESTDLWLSAMQAFLLSSNYPEEFEKLLHQEEDNYNRELKALESEKDERGRGRGSRIKGIEGKFGMLAPNRDDENMDKTHLCFIRLLENCIDQFYVYRNPEDYKRLFFRFMNVLIKRCKEPLIPSIGNTVALLEFQFIHCGVVLARLWKNVILCLPKSYIALLHYWEFLFSKKDKELGDVFSIIQEYKPKDVTRAIQDFRFHLSYLAKVLCGYENVNFNVLLDAFSEIDYVVSGEAERTLVLCLVMLVNAEEILQPYCKPLLYRHFREIESRLQLMSMDCPGQVPERLLKVVKRVLVAVNVKSVAEALQDLLFERDEEYLMDCDWRWDPVHTKGSIVRGLYYEEVRLNRLLCLDPVDYFAEPECEFGQDEMDELALEDRDHVLATILSQKQRKASIQRKLRRACLVVSLCISWRRRVGTQMERVREEAREPRAGNFKKADVDRTQCDLCGVKFTRGPENYFSPSKAFEGAASEVAVLSRAELEREECQERNSESYEQHIHLEHHQRQQVAYQKYSEFFHEKVDPAIDEGKLVVQDIEQSVWIHSHVGSKEHSHMLQKVQEHIKRVSDMVEDLYRRKAWAGAEEAMTRLVNILILSVRDARDWLMKTETRLKKEGIVQEDDYENEVEDFGELRPRRRSRKCGKQRKY

SEQ ID NO: 5766 - protein, 1464 aa, Homo sapiens
MAGIIKKQILKHLSRFTKNLSPDKINLSTLKGEGELKNLELDEEVLQNMLDLPTWLAINKVFCNKASIRIPWTKLKTHPICLSLDKVIMEMSTCEEPRSPNGPSPIATASGQSEYGFAEKVVEGISVSVNSIVIRIGAKAFNASFELSQLRIYSVNAHWEHGDLRFTRIQDPQRGEVLTFKEINWQMIRIEADATQSSHLEIMCAPVRLITNQSKIRVTLKRRLKDCNVIATKLVLILDDLLWVLTDSQLKAMVQYAKSLSEAIEKSTEQRKSMAPEPTQSSTVVASAQQVKTTQTSNAPDVNDAIVKLFNDFDVKETSHHLVISHLDLHICDDIHAKEKESNRRITGGAMQLSFTQLTIDYYPYHKAGDSCNHWMYFSDATKTKNGWANELLHEFECNVEMLKQAVKDHNVGSPPKSPTHASPQHTQTEKDYPLKGTCRTPSVLSQQSKAKLMSSSVVVRLADFNIYQVSTAEQCRSSPKSMICCNKKSLYLPQEMSAVYIEFTEYYYPDGKDFPIPSPNLYSQLNALQFTVDERSILWLNQFLLDLKQSLNQFMAVYKLNDNSKSDEHVDVRVDGLMLKFVIPSEVKSECHQDQPRAISIQSSEMIATNTRHCPNCRHSDLEALFQDFKDCDFFSKTYTSFPKSCDNFNLLHPIFQRHAHEQDTKMHEIYKGNITPQLNKNTLKTSAATDVWAVYFSQFWIDYEGMKSGKGRPISFVDSFPLSIWICQPTRYAESQKEPQTCNQVSLNTSQSESSDLAGRLKRKKLLKEYYSTESEPLTNGGQKPSSSDTFFRFSPSSSEADIHLLVHVHKHVSMQINHYQYLLLLFLHESLILLSENLRKDVEAVTGSPASQTSICIGILLRSAELALLLHPVDQANTLKSPVSESVSPVVPDYLPTENGDFLSSKRKQISRDINRIRSVTVNHMSDNRSMSVDLSHIPLKDPLLFKSASDTNLQKGISFMDYLSDKHLGKISEDESSGLVYKSGSGEIGSETSDKKDSFYTDSSSILNYREDSNILSFDSDGNQNILSSTLTSKGNETIESIFKAEDLLPEAASLSENLDISKEETPPVRTLKSQSSLSGKPKERCPPNLAPLCVSYKNMKRSSSQMSLDTISLDSMILEEQLLESDGSDSHMFLEKGNKKNSTTNYRGTAESVNAGANLQNYGETSPDAISTNSEGAQENHDDLMSVVVFKITGVNGEIDIRGEDTEICLQVNQVTPDQLGNISLRHYLCNRPVGSDQKAVIHSKSSPEISLRFESGPGAVIHSLLAEKNGFLQCHIENFSTEFLTSSLMNIQHFLEDETVATVMPMKIQVSNTKINLKDDSPRSSTVSLEPAPVTVHIDHLVVERSDDGSFHIRDSHMLNTGNDLKENVKSDSVLLTSGKYDLKKQRSVTQATQTSPGVPWPSQSANFPEFSFDFTREQLMEENESLKQELAKAKMALAEAHLEKDALLHHIKKMTVE

SEQ ID NO: 5767 - protein, 522 aa, Homo sapiens
MAGIIKKQILKHLSRFTKNLSPDKINLSTLKGEGELKNLELDEEVLQNMLDLPTWLAINKVFCNKASIRIPWTKLKTHPICLSLDKVIMEMSTCEEPRSPNGPSPIATASGQSEYGFAEKVVEGISVSVNSIVIRIGAKAFNASFELSQLRIYSVNAHWEHGDLRFTRIQDPQRGEVLTFKEINWQMIRIEADATQSSHLEIMCAPVRLITNQSKIRVTLKRRLKDCNVIATKLVLILDDLLWVLTDSQLKAMVQYAKSLSEAIEKSTEQRKSMAPEPTQSSTVVASAQQVKTTQTSNAPDVNDAIVKLFNDFDVKETSHHLVISHLDLHICDDIHAKEKESNRRITGGAMQLSFTQLTIDYYPYHKAGDSCNHWMYFSDATKTKNGWANELLHEFECNVEMLKQAVKDHNVGSPPKSPTHASPQHTQTEKDYPLKGTCRTPSVLSQQSKAKLMSSSVVVRLADFNIYQVSTAEQCRSSPKSMICCNKKSLYLPQEMSAVYIEFTEYYYPDGKDFPTAFLSR

SEQ ID NO: 5768 - protein, 289 aa, Homo sapiens
MVGVKPVGSDPDFQPELSGAGSRLAVVKFTMRGCGPCLRIAPAFSSMSNKYPQAVFLEVDVHQCQGTAATNNISATPTFLFFRNKVRIDQYQGADAVGLEEKIKQHLENDPGSNEDTDIPKGYMDLMPFINKAGCECLNESDEHGFDNCLRKDTTFLESDCDEQLLITVAFNQPVKLYSMKFQGPDNGQGPKYVKIFINLPRSMDFEEAERSEPTQALELTEDDIKEDGIVPLRYVKFQNVNSVTIFVQSNQGEEETTRISYFTFIGTPVQATNMNDFKRVVGKKGESH

SEQ ID NO: 5769 - protein, 741 aa, Homo sapiens
MAVLDTDLDHILPSSVLPPFWAKLVVGSVAIVCFARSYDGDFVFDDSEAIVNNKDLQAETPLGDLWHHDFWGSRLSSNTSHKSYRPLTVLTFRINYYLSGGFHPVGFHVVNILLHSGISVLMVDVFSVLFGGLQYTSKGRRLHLAPRASLLAALLFAVHPVHTECVAGVVGRADLLCALFFLLSFLGYCKAFRESNKEGAHSSTFWVLLSIFLGAVAMLCKEQGITVLGLNAVFDILVIGKFNVLEIVQKVLHKDKSLENLGMLRNGGLLFRMTLLTSGGAGMLYVRWRIMGTGPPAFTEVDNPASFADSMLVRAVNYNYYYSLNAWLLLCPWWLCFDWSMGCIPLIKSISDWRVIALAALWFCLIGLICQALCSEDGHKRRILTLGLGFLVIPFLPASNLFFRVGFVVAERVLYLPSVGYCVLLTFGFGALSKHTKKKKLIAAVVLGILFINTLRCVLRSGEWRSEEQLFRSALSVCPLNAKVHYNIGKNLADKGNQTAAIRYYREAVRLNPKYVHAMNNLGNILKERNELQEAEELLSLAVQIQPDFAAAWMNLGIVQNSLKRFEAAEQSYRTAIKHRRKYPDCYYNLGRLYADLNRHVDALNAWRNATVLKPEHSLAWNNMIILLDNTGNLAQAEAVGREALELIPNDHSLMFSLANVLGKSQKYKESEALFLKAIKANPNAASYHGNLAVLYHRWGHLDLAKKHYEISLQLDPTASGTKENYGLLRRKLELMQKKAV

SEQ ID NO: 5770 - protein, 612 aa, Homo sapiens
MAVLDTDLDHILPSSVLPPFWAKLVVGSVAIVCFARSYDGDFVFDDSEAIVNNKDLQAETPLGDLWHHDFWGSRLSSNTSHKSYRPLTVLTFRINYYLSGGFHPVGFHVVNILLHSGISVLMVDVFSVLFGGLQYTSKGRRLHLAPRASLLAALLFAVHPVHTECVAGVVGRADLLCALFFLLSFLGYCKAFRESNKEGAHSSTFWVLLSIFLGAVAMLCKEQGITVLGLNAVFDILVIGKFNVLEIVQKVLHKDKSLENLGMLRNGGLLFRMTLLTSGGAGMLYVRWRIMGTGPPAFTEVDNPASFADSMLVRAVNYNYYYSLNAWLLLCPWWLCFDWSMGCIPLIKSISDWRVIALAALWFCLIGLICQALCSEDGHKRRILTLGLGFLVIPFLPASNLFFRVGFVVAERVLYLPSVGYCVLLTFGFGALSKHTKKKKLIAAVVLGILFINTLRCVLRSGEWRSEEQLFRSALSVCPLNAKVHYNIGKNLADKGNQTAAIRYYREAVRLNPKYVHAMNNLGNILKERNELQEAEELLSLAVQIQPDFAAAWMNLGIVQNSLKRFEAAEQSYRTAIKHRRKYPDCYYNLGRLVSAGCPVPVEGKMGYFSYL

SEQ ID NO: 5771 - protein, 760 aa, Homo sapiens
MIPNQHNAGAGSHQPAVFRMAVLDTDLDHILPSSVLPPFWAKLVVGSVAIVCFARSYDGDFVFDDSEAIVNNKDLQAETPLGDLWHHDFWGSRLSSNTSHKSYRPLTVLTFRINYYLSGGFHPVGFHVVNILLHSGISVLMVDVFSVLFGGLQYTSKGRRLHLAPRASLLAALLFAVHPVHTECVAGVVGRADLLCALFFLLSFLGYCKAFRESNKEGAHSSTFWVLLSIFLGAVAMLCKEQGITVLGLNAVFDILVIGKFNVLEIVQKVLHKDKSLENLGMLRNGGLLFRMTLLTSGGAGMLYVRWRIMGTGPPAFTEVDNPASFADSMLVRAVNYNYYYSLNAWLLLCPWWLCFDWSMGCIPLIKSISDWRVIALAALWFCLIGLICQALCSEDGHKRRILTLGLGFLVIPFLPASNLFFRVGFVVAERVLYLPSVGYCVLLTFGFGALSKHTKKKKLIAAVVLGILFINTLRCVLRSGEWRSEEQLFRSALSVCPLNAKVHYNIGKNLADKGNQTAAIRYYREAVRLNPKYVHAMNNLGNILKERNELQEAEELLSLAVQIQPDFAAAWMNLGIVQNSLKRFEAAEQSYRTAIKHRRKYPDCYYNLGRLYADLNRHVDALNAWRNATVLKPEHSLAWNNMIILLDNTGNLAQAEAVGREALELIPNDHSLMFSLANVLGKSQKYKESEALFLKAIKANPNAASYHGNLAVLYHRWGHLDLAKKHYEISLQLDPTASGTKENYGLLRRKLELMQKKAV

SEQ ID NO: 5772 - protein, 630 aa, Homo sapiens
MAVLDTDLDHILPSSVLPPFWAKLVVGSVAIVCFARSYDGDFVFDDSEAIVNNKVAGVVGRADLLCALFFLLSFLGYCKAFRESNKEGAHSSTFWVLLSIFLGAVAMLCKEQGITVLGLNAVFDILVIGKFNVLEIVQKVLHKDKSLENLGMLRNGGLLFRMTLLTSGGAGMLYVRWRIMGTGPPAFTEVDNPASFADSMLVRAVNYNYYYSLNAWLLLCPWWLCFDWSMGCIPLIKSISDWRVIALAALWFCLIGLICQALCSEDGHKRRILTLGLGFLVIPFLPASNLFFRVGFVVAERVLYLPSVGYCVLLTFGFGALSKHTKKKKLIAAVVLGILFINTLRCVLRSGEWRSEEQLFRSALSVCPLNAKVHYNIGKNLADKGNQTAAIRYYREAVRLNPKYVHAMNNLGNILKERNELQEAEELLSLAVQIQPDFAAAWMNLGIVQNSLKRFEAAEQSYRTAIKHRRKYPDCYYNLGRLYADLNRHVDALNAWRNATVLKPEHSLAWNNMIILLDNTGNLAQAEAVGREALELIPNDHSLMFSLANVLGKSQKYKESEALFLKAIKANPNAASYHGNLAVLYHRWGHLDLAKKHYEISLQLDPTASGTKENYGLLRRKLELMQKKAV

SEQ ID NO: 5773 - protein, 2481 aa, Homo sapiens
MEQSPPPAPEPTQGPTPARSRRRREPESPPASAPIPLFGADTIGQRSPDGPVLSKAEFVEKVRQSNQACHDGDFHTAIVLYNEALAVDPQNCILYSNRSAAYMKIQQYDKALDDAIKARLLNPKWPKAYFRQGVALQYLGRHADALAAFASGLAQDPKSLQLLVGMVEAAMKSPMRDSLEPTYQQLQKMKLDKSPFVVVSVVGQELLTAGHHGASVVVLEAALKIGTCSLKLRGSVFSALSSAYWSLGNTEKSTGYMQQDLDVAKTLGDQTGECRAHGNLGSAFFSKGNYREALTNHRHQLVLAMKLKDREAASSALSSLGHVYTAIGDYPNALASHKQCVLLAKQSKDELSEARELGNMGAVYIAMGDFENAVQCHEQHLKIAKDLGNKREEARAYSNLGSAYHYRRNFDKAMSYHNYVLELAQELMEKAIEMRAYAGLGHAARCMQDLERAKQYHEQQLGIAEDLKDRAAEGRASSNLGIIHQMKGDYDTALKLHKTHLCIAQELSDYAAQGRAYGNMGNAYNALGMYDQAVKYHRQELQISMEVNDRASQASTHGNLAVAYQALGAHDRALQHYQNHLNIARELRDIQSEARALSNLGNFHCSRGEYVQAAPYYEQYLRLAPDLQDMEGEGKVCHNLGYAHYCLGNYQEAVKYYEQDLALAKDLHDKLSQAKAYCNLGLAFKALLNFSKAEECQKYLLSLAQSLNNSQAKFRALGNLGDIFICKKDINGAIKFYEQQLGLAHQVKDRRLEASAYAALGTAYRMIQKYDKALGYHTQELEVYQELSDLPGECRAHGHLAAVYMALGKYTMAFKCYEEQLDLGQKLKDPSLEAQVYGNMGITKMNMNVMEEAIGYFEQQLAMLQQLSGNESVLDRGRAYGNLGDCYEALGDYEEAIKYYEQYLSVAQSLNRMQDQAKAYRGLGNGHRAMGSLQQALVCFEKRLVVAHELGEAFNKAQAYGELGSLHSQLGNYEQAISCLERQLNIARDMKDRALESDAACGLGGVYQQMGEYDTALQYHQLDLQIAEETNNPTCQGRAYGNLGLTYESLGTFERAVVYQEQHLSIAAQMNDLAAKTVSYSSLGRTHHALQNYSQAVMYLQEGLRLAEQLGRREDEAKIRHGLGLSLWASGNLEEAQHQLYRASALFETIRHEAQLSTDYKLSLFDLQTSSYQALQRVLVSLGHHDEALAVAERGRTRAFADLLVERQTGQQDSDPYSPVTIDQILEMVNGQRGLVLYYSLAAGYLYSWLLAPGAGIVKFHEHYLGENTVENSSDFQASSSVTLPTATGSALEQHIASVREALGVESHYSRACASSETESEAGDIMDQQFEEMNNKLNSVTDPTGFLRMVRRNNLFNRSCQSMTSLFSNTVSPTQDGTSSLPRRQSSFAKPPLRALYDLLIAPMEGGLMHSSGPVGRHRQLILVLEGELYLIPFALLKGSSSNEYLYERFGLLAVPSIRSLSVQSKSHLRKNPPTYSSSTSMAAVIGNPKLPSAVMDRWLWGPMPSAEEEAYMVSELLGCQPLVGSVATKERVMSALTQAECVHFATHISWKLSALVLTPSMDGNPASSKSSFGHPYTIPESLRVQDDASDGESISDCPPLQELLLTAADVLDLQLPVKLVVLGSSQESNSKVTADGVIALTRAFLAAGAQCVLVSLWPVPVAASKMFIHAFYSSLLNGLKASAALGEAMKVVQSSKAFSHPSNWAGFMLIGSDVKLNSPSSLIGQALTEILQHPERARDALRVLLHLVEKSLQRIQNGQRNAMYTSQQSVENKVGGIPGWQALLTAVGFRLDPPTSGLPAAVFFPTSDPGDRLQQCSSTLQSLLGLPNPALQALCKLITASETGEQLISRAVKNMVGMLHQVLVQLQAGEKEQDLASAPIQVSISVQLWRLPGCHEFLAALGFDLCEVGQEEVILKTGKQANRRTVHFALQSLLSLFDSTELPKRLSLDSSSSLESLASAQSVSNALPLGYQQPPFSPTGADSIASDAISVYSLSSIASSMSFVSKPEGGSEGGGPGGRQDHDRSKNAYLQRSTLPRSQLPPQTRPAGNKDEEEYEGFSIISNEPLATYQENRNTCFSPDHKQPQPGTAGGMRVSVSSKGSISTPNSPVKMTLIPSPNSPFQKVGKLASSDTGESDQSSTETDSTVKSQEESNPKLDPQELAQKILEETQSHLIAVERLQRSGGQVSKSNNPEDGVQAPSSTAVFRASETSAFSRPVLSHQKSQPSPVTVKPKPPARSSSLPKVSSGYSSPTTSEMSIKDSPSQHSGRPSPGCDSQTSQLDQPLFKLKYPSSPYSAHISKSPRNMSPSSGHQSPAGSAPSPALSYSSAGSARSSPADAPDIDKLKMAAIDEKVQAVHNLKMFWQSTPQHSTGPMKIFRGAPGTMTSKRDVLSLLNLSPRHNKKEEGVDKLELKELSLQQHDGAPPKAPPNGHWRTETTSLGSLPLPAGPPATAPARPLRLPSGNGYKFLSPGRFFPSSKC

SEQ ID NO: 5774 - protein, 475 aa, Homo sapiens
MTTLPPLPMTRPKLTALARQKLPCSSRKIPRSQLIKEKDDIDHYLEVNFKGLSKEEVAAYRNSYKKNICVDMLRDGYHKSFTELFALMERWDALREAARVRSLFWLQKPLEEQPDKLDYLYHYLTRAEDAERKESFEDVHNNLYALACYFNNSEDKWVRNHFYERCFKIAQLIKIDCGKKEAEAHMHMGLLYEEDGQLLEAAEHYEAFHQLTQGRIWKDETGRSLNLLACESLLRTYRLLSDKMLENKEYKQAIKILIKASEIAKEGSDKKMEAEASYYLGLAHLAAEEYETALTVLDTYCKISTDLDDDLSLGRGYEAIAKVLQSQGEMTEAIKYLKKFVKIARNNFQSLDLVRASTMLGDIYNEKGYYNKASECFQQAFDTTVELMSMPLMDETKVHYGIAKAHQMMLTVNNYIESADLTSLNYLLSWKESRGNIEPDPVTEEFRGSTVEAVSQNSERLEELSRFPGDQKNET

SEQ ID NO: 5775 - protein, 500 aa, Homo sapiens
MIPMFTVTLEDSGTLWKSLHSSSESETTLPPLPMTRPKLTALARQKLPCSSRKIPRSQLIKEKDDIDHYLEVNFKGLSKEEVAAYRNSYKKNICVDMLRDGYHKSFTELFALMERWDALREAARVRSLFWLQKPLEEQPDKLDYLYHYLTRAEDAERKESFEDVHNNLYALACYFNNSEDKWVRNHFYERCFKIAQLIKIDCGKKEAEAHMHMGLLYEEDGQLLEAAEHYEAFHQLTQGRIWKDETGRSLNLLACESLLRTYRLLSDKMLENKEYKQAIKILIKASEIAKEGSDKKMEAEASYYLGLAHLAAEEYETALTVLDTYCKISTDLDDDLSLGRGYEAIAKVLQSQGEMTEAIKYLKKFVKIARNNFQSLDLVRASTMLGDIYNEKGYYNKASECFQQAFDTTVELMSMPLMDETKVHYGIAKAHQMMLTVNNYIESADLTSLNYLLSWKESRGNIEPDPVTEEFRGSTVEAVSQNSERLEELSRFPGDQKNET

SEQ ID NO: 5776 - protein, 339 aa, Homo sapiens
MTSQPSLPADDFDIYHVLAECTDYYDTLPVKEADGNQPHFQGVTGLWNLGNTCCVNAISQCLCSILPLVEYFLTGKYITALQKFLLPSDCSEVATAFAYLMTDMWLGDSDCVSPEIFWSALGNLYPAFTKKMQQDAQEFLICVLNELHEALKKYHYSRRRSYEKGSTQRCCRKWITTETSIITQLFEEQLNYSIVCLKCEKCTYKNEVFTVFSLPIPSKYECSLRDCLQCFFQQDALTWNNEIHCSFCETKQETAVRASISKAPKIIIFHLKRFDIQGTTKRKLRTDIHYPLTNLDLTPYICSIFRKYPKYNLCAVVNHFGDLDGGHYTAFCKNSVTQA

SEQ ID NO: 5777 - protein, 334 aa, Homo sapiens
MTSQPSLPADDFDIYHVLAECTDYYDTLPVKEADGNQPHFQGVTGLWNLGNTCCVNAISQCLCSILPLVEYFLTGKYITALQNDCSEVATAFAYLMTDMWLGDSDCVSPEIFWSALGNLYPAFTKKMQQDAQEFLICVLNELHEALKKYHYSRRRSYEKGSTQRCCRKWITTETSIITQLFEEQLNYSIVCLKCEKCTYKNEVFTVFSLPIPSKYECSLRDCLQCFFQQDALTWNNEIHCSFCETKQETAVRASISKAPKIIIFHLKRFDIQGTTKRKLRTDIHYPLTNLDLTPYICSIFRKYPKYNLCAVVNHFGDLDGGHYTAFCKNSVTQA

SEQ ID NO: 5778 - protein, 119 aa, Homo sapiens
MAGRGKLIAVIGDEDTVTGFLLGGIGELNKNRHPNFLVVEKDTTINEIEDTFRQFLNRDDIGIILINQYIAEMVRHALDAHQQSIPAVLEIPSKEHPYDAAKDSILRRARGMFTAEDLR

SEQ ID NO: 5779 - protein, 147 aa, Homo sapiens
MAGRGKLIAVIGDEDTVTGFLLGGIGELNKNRHPNFLVVEKDTTINEIEDTFRSLGSLPGSVVEANPNQRDPPLWDEIDSRQFLNRDDIGIILINQYIAEMVRHALDAHQQSIPAVLEIPSKEHPYDAAKDSILRRARGMFTAEDLR

SEQ ID NO: 5780 - protein, 100 aa, Homo sapiens
MSTGPTAATGSNRRLQQTQNQVDEVVDIMRVNVDKVLERDQKLSELDDRADALQAGASQFETSAAKLKRKYWWKNCKMWAIGITVLVIFIIIIIVWVVSS

SEQ ID NO: 5781 - protein, 419 aa, Homo sapiens
MAKEGVEKAEETEQMIEKEAGKEPAEGGGGDGSHRLGDAQEMRAVVLAGFGGLNKLRLFRKAMPEPQDGELKIRVKACGLNFIDLMVRQGNIDNPPKTPLVPGFECSGIVEALGDSVKGYEIGDRVMAFVNYNAWAEVVCTPVEFVYKIPDDMSFSEAAAFPMNFVTAYVMLFEVANLREGMSVLVHSAGGGVGQAVAQLCSTVPNVTVFGTASTFKHEAIKDSVTHLFDRNADYVQEVKRISAEGVDIVLDCLCGDNTGKGLSLLKPLGTYILYGSSNMVTGETKSFFSFAKSWWQVEKVNPIKLYEENKVIAGFSLLNLLFKQGRAGLIRGVVEKLIGLYNQKKIKPVVDSLWALEEVKEAMQRIHDRGNIGKLILDVEKTPTPLMANDSTETSEAGEEEEDHEGDSENKERMPFIQ

SEQ ID NO: 5782 - protein, 290 aa, Homo sapiens
METPLDVLSRAASLVHADDEKREAALRGEPRMQTLPVASALSSHRTGPPPISPSKRKFSMEPGDEDLDCDNDHVSKMSRIFNPHLNKTANGDCRRDPRERSRSPIERAVAPTMSLHGSHLYTSLPSLGLEQPLALTKNSLDASRPAGLSPTLTPGERQQNRPSVITCASAGARNCNLSHCPIAHSGCAAPGPASYRRPPSAATTCDPVVEEHFRRSLGKNYKEPEPAPNSVSITGSVDDHFAKALGDTWLQIKAAKDGASSSPESASRRGQPASPSAHMVSHSHSPSVVS

SEQ ID NO: 5783 - protein, 259 aa, Homo sapiens
MQTLPVASALSSHRTGPPPISPSKRKFSMEPGDEDLDCDNDHVSKMSRIFNPHLNKTANGDCRRDPRERSRSPIERAVAPTMSLHGSHLYTSLPSLGLEQPLALTKNSLDASRPAGLSPTLTPGERQQNRPSVITCASAGARNCNLSHCPIAHSGCAAPGPASYRRPPSAATTCDPVVEEHFRRSLGKNYKEPEPAPNSVSITGSVDDHFAKALGDTWLQIKAAKDGASSSPESASRRGQPASPSAHMVSHSHSPSVVS

SEQ ID NO: 5784 - protein, 41 aa, Homo sapiens
METPLDVLSRAASLVHADDEKPSPGNLLEMQNRSPRCGTDD

SEQ ID NO: 5785 - protein, 296 aa, Homo sapiens [sequence omitted]

SEQ ID NO: 5786 - protein, 206 aa, Homo sapiens
MNKTANGDCRRDPRERSRSPIERAVAPTMSLHGSHLYTSLPSLGLEQPLALTKNSLDASRPAGLSPTLTPGERQQNRPSVITCASAGARNCNLSHCPIAHSGCAAPGPASYRRPPSAATTCDPVVEEHFRRSLGKNYKEPEPAPNSVSITGSVDDHFAKALGDTWLQIKAAKDGASSSPESASRRGQPASPSAHMVSHSHSPSVVS

SEQ ID NO: 5787 - protein, 210 aa, Homo sapiens
MIKVRNKTANGDCRRDPRERSRSPIERAVAPTMSLHGSHLYTSLPSLGLEQPLALTKNSLDASRPAGLSPTLTPGERQQNRPSVITCASAGARNCNLSHCPIAHSGCAAPGPASYRRPPSAATTCDPVVEEHFRRSLGKNYKEPEPAPNSVSITGSVDDHFAKALGDTWLQIKAAKDGASSSPESASRRGQPASPSAHMVSHSHSPSVVS

SEQ ID NO: 5788 - protein, 552 aa, Homo sapiens
MDRKVAREFRHKVDFLIENDAEKDYLYDVLRMYHQTMDVAVLVGDLKLVINEPSRLPLFDAIRPLIPLKHQVEYDQLTPRRSRKLKEVRLDRLHPEGLGLSVRGGLEFGCGLFISHLIKGGQADSVGLQVGDEIVRINGYSISSCTHEEVINLIRTKKTVSIKVRHIGLIPVKSSPDEPLTWQYVDQFVSESGGVRGSLGSPGNRENKEKKVFISLVGSRGLGCSISSGPIQKPGIFISHVKPGSLSAEVGLEIGDQIVEVNGVDFSNLDHKEAVNVLKSSRSLTISIVAAAGRELFMTDRERLAEARQRELQRQELLMQKRLAMESNKILQEQQEMERQRRKEIAQKAAEENERYRKEMEQIVEEEEKFKKQWEEDWGSKEQLLLPKTITAEVHPVPLRKPKYDQGVEPELEPADDLDGGTEEQGEQDFRKYEEGFDPYSMFTPEQIMGKDVRLLRIKKEGSLDLALEGGVDSPIGKVVVSAVYERGAAERHGGIVKGDEIMAINGKIVTDYTLAEAEAALQKAWNQGGDWIDLVVAVCPPKEYDDELTFF

SEQ ID NO: 5789 - protein, 521 aa, Homo sapiens
MYHQTMDVAVLVGDLKLVINEPSRLPLFDAIRPLIPLKHQVEYDQLTPRRSRKLKEVRLDRLHPEGLGLSVRGGLEFGCGLFISHLIKGGQADSVGLQVGDEIVRINGYSISSCTHEEVINLIRTKKTVSIKVRHIGLIPVKSSPDEPLTWQYVDQFVSESGGVRGSLGSPGNRENKEKKVFISLVGSRGLGCSISSGPIQKPGIFISHVKPGSLSAEVGLEIGDQIVEVNGVDFSNLDHKEAVNVLKSSRSLTISIVAAAGRELFMTDRERLAEARQRELQRQELLMQKRLAMESNKILQEQQEMERQRRKEIAQKAAEENERYRKEMEQIVEEEEKFKKQWEEDWGSKEQLLLPKTITAEVHPVPLRKPKYDQGVEPELEPADDLDGGTEEQGEQDFRKYEEGFDPYSMFTPEQIMGKDVRLLRIKKEGSLDLALEGGVDSPIGKVVVSAVYERGAAERHGGIVKGDEIMAINGKIVTDYTLAEAEAALQKAWNQGGDWIDLVVAVCPPKEYDDELTFF

SEQ ID NO: 5790 - protein, 403 aa, Homo sapiens
MDRKVAREFRHKVDFLIENDAEKDYLYDVLRMYHQTMDVAVLVGDLKLVINEPSRLPLFDAIRPLIPLKHQVEYDQLTPRRSRKLKEVRLDRLHPEGLGLSVRGGLEFGCGLFISHLIKGGQADSVGLQVGDEIVRINGYSISSCTHEEVINLIRTKKTVSIKVRHIGLIPVKSSPDEPLTWQYVDQFVSESGGVRGSLGSPGNRENKEKKVFISLVGSRGLGCSISSGPIQKPGIFISHVKPGSLSAEVGLEIGDQIVEVNGVDFSNLDHKEAVNVLKSSRSLTISIVAAAGRELFMTDRERLAEARQRELQRQELLMQKRLAMESNKILQEQQEMERQRRKEIAQKAAEENERYRKEMEQIVEEEEKFKKQWEEDWGSKEQLLLPKTITAEVHPVPLRKPK

SEQ ID NO: 5791 - protein, 533 aa, Homo sapiens
MDRKVAREFRHKVDFLIENDAEKDYLYDVLRMYHQTMDVAVLVGDLKLVINEPSRLPLFDAIRPLIPLKHQVEYDQLTPRRSRKLKEVRLDRLHPEGLGLSVRGGLEFGCGLFISHLIKGGQADSVGLQVGDEIVRINGYSISSCTHEEVINLIRTKKTVSIKVRHIGLIPVKSSPDEPLTWQYVDQFVSESGGVRGSLGSPGNRENKEKKVFISLVGSRGLGCSISSGPIQKPGIFISHVKPGSLSAEVGLEIGDQIVEVNGVDFSNLDHKEGRELFMTDRERLAEARQRELQRQELLMQKRLAMESNKILQEQQEMERQRRKEIAQKAAEENERYRKEMEQIVEEEEKFKKQWEEDWGSKEQLLLPKTITAEVHPVPLRKPKYDQGVEPELEPADDLDGGTEEQGEQDFRKYEEGFDPYSMFTPEQIMGKDVRLLRIKKEGSLDLALEGGVDSPIGKVVVSAVYERGAAERHGGIVKGDEIMAINGKIVTDYTLAEAEAALQKAWNQGGDWIDLVVAVCPPKEYDDELTFF

SEQ ID NO: 5792 - protein, 899 aa, Homo sapiens
MDRKVAREFRHKVDFLIENDAEKDYLYDVLRMYHQTMDVAVLVGDLKLVINEPSRLPLFDAIRPLIPLKHQVEYDQLTPRRSRKLKEVRLDRLHPEGLGLSVRGGLEFGCGLFISHLIKGGQADSVGLQVGDEIVRINGYSISSCTHEEVINLIRTKKTVSIKVRHIGLIPVKSSPDEPLTWQYVDQFVSESGGVRGSLGSPGNRENKEKKVFISLVGSRGLGCSISSGPIQKPGIFISHVKPGSLSAEVGLEIGDQIVEVNGVDFSNLDHKEAVNVLKSSRSLTISIVAAAGRELFMTDRERLAEARQRELQRQELLMQKRLAMESNKILQEQQEMERQRRKEIAQKAAEENERYRKEMEQIVEEEEKFKKQWEEDWGSKEQLLLPKTITAEVHPVPLRKPKSFGWFYRYDGKFPTIRKKGKDKKKAKYGSLQDLRKNKKELEFEQKLYKEKEEMLEKEKQLKINRLAQEVSETEREDLEESEKIQYWVERLCQTRLEQISSADNEISEMTTGPPPPPPSVSPLAPPLRRFAGGLHLHTTDLDDIPLDMFYYPPKTPSALPVMPHPPPSNPPHKVPAPPVLPLSGHVSASSSPWVQRTPPPIPIPPPPSVPTQDLTPTRPLPSALEEALSNHPFRTGDTGNPVEDWEAKNHSGKPTNSPVPEQSFPPTPKTFCPSPQPPRGPGVSTISKPVMVHQEPNFIYRPAVKSEVLPQEMLKRMVVYQTAFRQDFRKYEEGFDPYSMFTPEQIMGKDVRLLRIKKEGSLDLALEGGVDSPIGKVVVSAVYERGAAERHGGIVKGDEIMAINGKIVTDYTLAEAEAALQKAWNQGGDWIDLVVAVCPPKEYDDELASLPSSVAESPQPVRKLLEDRAAVHRHGFLLQLEPTDLLLKSKRGNQIHR

SEQ ID NO: 5793 - protein, 521 aa, Homo sapiens
MEANWTAFLFQAHEASHHQQQAAQNSLLPLLSSAVEPPDQKPLLPIPITQKPQGAPETLKDAIGIKKEKPKTSFVCTYCSKAFRDSYHLRRHESCHTGIKLVSRPKKTPTTVVPLISTIAGDSSRTSLVSTIAGILSTVTTSSSGTNPSSSASTTAMPVTQSVKKPSKPVKKNHACEMCGKAFRDVYHLNRHKLSHSDEKPFECPICNQRFKRKDRMTYHVRSHEGGITKPYTCSVCGKGFSRPDHLSCHVKHVHSTERPFKCQTCTAAFATKDRLRTHMVRHEGKVSCNICGKLLSAAYITSHLKTHGQSQSINCNTCKQGISKTCMSEETSNQKQQQQQQQQQQQQQQQQQQHVTSWPGKQVETLRLWEEAVKARKKEAANLCQTSTAATTPVTLTTPFSITSSVSSGTMSNPVTVAAAMSMRSPVNVSSAVNITSPMNIGHPVTITSPLSMTSPLTLTTPVNLPTPVTAPVNIAHPVTITSPMNLPTPMTLAAPLNIAMRPVESMPFLPQALPTSPPW

SEQ ID NO: 5794 - protein, 1524 aa, Homo sapiens
MAAVYSGISLKLKSKTTSWEDKLKLAHFAWISHQCFLPNKEQVLLDWARQSLVAFYKKKLELKEDIVERLWIYIDNILHSRKLQNLLKNGKTINLQISLVKIINERVAEFSLSGSQRNICAVLRCCQGILSTPALAVIYTAKQELMVALLSQLCWSACRQPEGAVVAQLFEVIHLALGHYLLILQQQVNPRRAFGDVTAHLLQPCLVLRHLLSGGTWTQAGQGQLRQVLSRDIRSQIEAMFRGGIFQPELLSSYKEGLLDQQQGDVKTGAMKNLLAPMDTVLNRLVDAGYCAASLHTSVVANSVALLYKLFLDSYFKEGNQLLCFQVLPRLFGCLKISHLQEEQSKALSTSDWTTELLVVEQLLNSVANNNIYNIAADRIRHEEAQFRFYRHVAELLINHAQAPIPAWFRCLKTLISLNHLILEPDLDDLLASAWIDAEVTEFRTKKAQEALIRTVFQTYAKLRQVPRLFEEVLGVICRPAAEALRQPVLASGPSTVLSACLLELPPSQILDTWSLVLEKFQSLVLPYLQSDADMALKSLSLSLLLHCIMFNMRSLDSSTPLPIVRRTQCMMERMMRELVQPLLALLPDTPGPEPELWLQKVSDSVLLLSYTWAQVDAMFSLNCSQYHSMSGPLIGVALEISNLPSLLPGVKTQHWKKIEKFTAQFSSLGTYCLEQLYLQKMKRTLMQTSFRSEGAIQSLRCDAAFIIGSGRKSLNQRTTASWDGQVGMVSGLTYPVAHWHLIVSNLTILISYLCPDDVGYLASVLLRTLPMGKAQEVSIDEEAYITLEKISKAFLHSPLFPEMQSLHSAFLTCVTTSCSSILCSGAQRDSGLVSQQLPWLFEKDHMVVGHWENRFAKAGPEGIEPRGEIAQNLLSLVKSDFPIQLEGEQLESILGLLEVISALQLDSLLPPYHVHYFLVLLSMAVTKLGCSCSSSLALKFLTTCYQLLGYLQKGKSARSVFKIMYGSDIFEVVLTSLFRASSRFLIEMDDPAWLEFLQVIGTFLEELMQMLIQMKLSLVLNFRKITAFLSSSKPYTEAASSKQLENQNPQGRQLLLVSLTRLCHVLGPFLKEQKLGQEAPAALSELLQQVVLQTGAVLQLCSVPGARGWRLPSVLISSVSTLLEADLGQHCRDGGADISQGSDRTLLSHVALYQGVYSQILLELPALAGHDQSFQAALQFLTLFFLAPELHPKKDSVFTSMFHSVRRVLADPEIPVQVTQDIEPHLGALFTQMLEVGTTEDLRLVMQCILQGLDVSNMWKADVQAVVSAVTLLRLLLNCPLSGEKASLLWRACPQIVTALTLLNREASQEQPVSLTVVGPVLDVLAALLRQGEEAIGNPHHVSLAFSILLTVPLDHLKPLEYGSVFPRLHNVLFSILQCHPKVMLKAIPSFLNSFNRLVFSVMREGRQKDKGSIDDLPTVLKCARLVERMYSHIAARAEEFAVFSPFMVAQYVLEVQKVTLYPAVKSLLQEGIYLILDLCIEPDVQFLRASLQPGMRDIFKELYNDYLKYHKAKHEGEKRYTA

SEQ ID NO: 5795 - protein, 118 aa, Homo sapiens
MASQSQGIQQLLQAEKRAAEKVSEARKRKNRRLKQAKEEAQAEIEQYRLQREKEFKAKEAAALGSRGSCSTEVEKETQEKMTILQTYFRQNRDEVLDNLLAFVCDIRPEIHENYRING

SEQ ID NO: 5796 - protein, 354 aa, Homo sapiens
MRHSLTKLLAASGSNSPTRSESPEPAATCSLPSDLTRAAAGEEETAAAGSPGRKQQFGDEGELEAGRGSRGGVAVRAPSPEEMEEEAIASLPGEETEDMDFLSGLELADLLDPRQPDWHLDPGLSSPGPLSSSGGGSDSGGLWRGDDDDEAAAAEMQRFSDLLQRLLNGIGGCSSSSDSGSAEKRRRKSPGGGGGGGSGNDNNQAATKSPRKAAAAAARLNRLKKKEYVMGLESRVRGLAAENQELRAENRELGKRVQALQEESRYLRAVLANETGLARLLSRLSGVGLRLTTSLFRDSPAGDHDYALPVGKQKQDLLEEDDSAGGVCLHVDKDKVSVEFCSACARKASSSLKM

SEQ ID NO: 5797 - protein, 895 aa, Homo sapiens
MKIGSGFLSGGGGTGSSGGSGSGGGGSGGGGGGGSSGRRAEMEPTFPQGMVMFNHRLPPVTSFTRPAGSAAPPPQCVLSSSTSAAPAAEPPPPPAPDMTFKKEPAASAAAFPSQRTSWGFLQSLVSIKQEKPADPEEQQSHHHHHHHHYGGLFAGAEERSPGLGGGEGGSHGVIQDLSILHQHVQQQPAQHHRDVLLSSSSRTDDHHGTEEPKQDTNVKKAKRPKPESQGIKAKRKPSASSKPSLVGDGEGAILSPSQKPHICDHCSAAFRSSYHLRRHVLIHTGERPFQCSQCSMGFIQKYLLQRHEKIHSREKPFGCDQCSMKFIQKYHMERHKRTHSGEKPYKCDTCQQYFSRTDRLLKHRRTCGEVIVKGATSAEPGSSNHTNMGNLAVLSQGNTSSSRRKTKSKSIAIENKEQKTGKTNESQISNNINMQSYSVEMPTVSSSGGIIGTGIDELQKRVPKLIFKKGSRKNTDKNYLNFVSPLPDIVGQKSLSGKPSGSLGIVSNNSVETIGLLQSTSGKQGQISSNYDDAMQFSKKRRYLPTASSNSAFSINVGHMVSQQSVIQSAGVSVLDNEAPLSLIDSSALNAEIKSCHDKSGIPDEVLQSILDQYSNKSESQKEDPFNIAEPRVDLHTSGEHSELVQEENLSPGTQTPSNDKASMLQEYSKYLQQAFEKSTNASFTLGHGFQFVSLSSPLHNHTLFPEKQIYTTSPLECGFGQSVTSVLPSSLPKPPFGMLFGSQPGLYLSALDATHQQLTPSQELDDLIDSQKNLETSSAFQSSSQKLTSQKEQKNLESSTGFQIPSQELASQIDPQKDIEPRTTYQIENFAQAFGSQFKSGSRVPMTFITNSNGEVDHRVRTSVSDFSGYTNMMSDVSEPCSTRVKTPTSQSYR

SEQ ID NO: 5798 - protein, 859 aa, Homo sapiens
MKIGSGFLSGGGGTGSSGGSGSGGGGSGGGGGGGSSGRRAEMEPTFPQAPAAEPPPPPAPDMTFKKEPAASAAAFPSQRTSWGFLQSLVSIKQEKPADPEEQQSHHHHHHHHYGGLFAGAEERSPGLGGGEGGSHGVIQDLSILHQHVQQQPAQHHRDVLLSSSSRTDDHHGTEEPKQDTNVKKAKRPKPESQGIKAKRKPSASSKPSLVGDGEGAILSPSQKPHICDHCSAAFRSSYHLRRHVLIHTGERPFQCSQCSMGFIQKYLLQRHEKIHSREKPFGCDQCSMKFIQKYHMERHKRTHSGEKPYKCDTCQQYFSRTDRLLKHRRTCGEVIVKGATSAEPGSSNHTNMGNLAVLSQGNTSSSRRKTKSKSIAIENKEQKTGKTNESQISNNINMQSYSVEMPTVSSSGGIIGTGIDELQKRVPKLIFKKGSRKNTDKNYLNFVSPLPDIVGQKSLSGKPSGSLGIVSNNSVETIGLLQSTSGKQGQISSNYDDAMQFSKKRRYLPTASSNSAFSINVGHMVSQQSVIQSAGVSVLDNEAPLSLIDSSALNAEIKSCHDKSGIPDEVLQSILDQYSNKSESQKEDPFNIAEPRVDLHTSGEHSELVQEENLSPGTQTPSNDKASMLQEYSKYLQQAFEKSTNASFTLGHGFQFVSLSSPLHNHTLFPEKQIYTTSPLECGFGQSVTSVLPSSLPKPPFGMLFGSQPGLYLSALDATHQQLTPSQELDDLIDSQKNLETSSAFQSSSQKLTSQKEQKNLESSTGFQIPSQELASQIDPQKDIEPRTTYQIENFAQAFGSQFKSGSRVPMTFITNSNGEVDHRVRTSVSDFSGYTNMMSDVSEPCSTRVKTPTSQSYR

SEQ ID NO: 5799 - protein, 285 aa, Homo sapiens
MAGAGSEARFAGLSLVQLNELLEDEGQLTEMVQKMEETQNVQLNKEMTLASNRSLAEGNLLYQPQLDTLKARLTQKYQELQVLFEAYQIKKTKLDRQSSSASLETLLALLQAEGAKIEEDTENMAEKFLDGELPLDSFIDVYQSKRKLAHMRRVKIEKLQEMVLKGQRLPQALAPLPPRLPELAPTAPLPYPAPEASGPPAVAPRRIPPPPPPVPAGRLATPFTAAMSSGQAVPYPGLQCPPLPPRVGLPTQQGFSSQFVSPYPPPLPQRPPPRLPPHQPGFILQ

SEQ ID NO: 5800 - protein, 1181 aa, Homo sapiens
MFFYLSKKISIPNNVKLQCVSWNKEQGFIACGGEDGLLKVLKLETQTDDAKLRGLAAPSNLSMNQTLEGHSGSVQVVTWNEQYQKLTTSDENGLIIVWMLYKGSWIEEMINNRNKSVVRSMSWNADGQKICIVYEDGAVIVGSVDGNRIWGKDLKGIQLSHVTWSADSKVLLFGMANGEIHIYDNQGNFMIKMKLSCLVNVTGAISIAGIHWYHGTEGYVEPDCPCLAVCFDNGRCQIMRHENDQNPVLIDTGMYVVGIQWNHMGSVLAVAGFQKAAMQDKDVNIVQFYTPFGEHLGTLKVPGKEISALSWEGGGLKIALAVDSFIYFANIRPNYKWGYCSNTVVYAYTRPDRPEYCVVFWDTKNNEKYVKYVKGLISITTCGDFCILATKADENHPQEENEMETFGATFVLVLCNSIGTPLDPKYIDIVPLFVAMTKTHVIAASKEAFYTWQYRVAKKLTALEINQITRSRKEGRERIYHVDDTPSGSMDGVLDYSKTIQGTRDPICAITASDKILIVGRESGTIQRYSLPNVGLIQKYSLNCRAYQLSLNCNSSRLAIIDISGVLTFFDLDARVTDSTGQQVVGELLKLERRDVWDMKWAKDNPDLFAMMEKTRMYVFRNLDPEEPIQTSGYICNFEDLEIKSVLLDEILKDPEHPNKDYLINFEIRSLRDSRALIEKVGIKDASQFIEDNPHPRLWRLLAEAALQKLDLYTAEQAFVRCKDYQGIKFVKRLGKLLSESMKQAEVVGYFGRFEEAERTYLEMDRRDLAIGLRLKLGDWFRVLQLLKTGSGDADDSLLEQANNAIGDYFADRQKWLNAVQYYVQGRNQERLAECYYMLEDYEGLENLAISLPENHKLLPEIAQMFVRVGMCEQAVTAFLKCSQPKAAVDTCVHLNQWNKAVELAKNHSMKEIGSLLARYASHLLEKNKTLDAIELYRKANYFFDAAKLMFKIADEEAKKGSKPLRVKKLYVLSALLIEQYHEQMKNAQRGKVKGKSSEATSALAGLLEEEVLSTTDRFTDNAWRGAEAYHFFILAQRQLYEGCVDTALKTALHLKDYEDIIPPVEIYSLLALCACASRAFGTCSKAFIKLKSLETLSSEQKQQYEDLALEIFTKHTSKDNRKPELDSLMEGGEGKLPTCVATGSPITEYQFWMCSVCKHGVLAQEISHYSFCPLCHSPVG

SEQ ID NO: 5801 - protein, 1170 aa, Homo sapiens
MFFYLSKKISIPNNVKLQCVSWNKEQGFIACGGEDGLLKVLKLETQTDDAKLRGLAAPSNLSMNQTLEGHSGSVQVVTWNEQYQKLTTSDENGLIIVWMLYKGSWIEEMINNRNKSVVRSMSWNADGQKICIVYEDGAVIVGSVDGNRIWGKDLKGIQLSHVTWSADSKVLLFGMANGEIHIYDNQGNFMIKMKLSCLVNVTGAISIAGIHWYHGTEGYVEPDCPCLAVCFDNGRCQIMRHENDQNPVLIDTGMYVVGIQWNHMGSVLAVAGFQKAAMQDKDVNIVQFYTPFGEHLGTLKVPGKEISALSWEGGGLKIALAVDSFIYFANIRPNYKWGYCSNTVVYAYTRPDRPEYCVVFWDTKNNEKYVKYVKGLISITTCGDFCILATKADENHPQFVLVLCNSIGTPLDPKYIDIVPLFVAMTKTHVIAASKEAFYTWQYRVAKKLTALEINQITRSRKEGRERIYHVDDTPSGSMDGVLDYSKTIQGTRDPICAITASDKILIVGRESGTIQRYSLPNVGLIQKYSLNCRAYQLSLNCNSSRLAIIDISGVLTFFDLDARVTDSTGQQVVGELLKLERRDVWDMKWAKDNPDLFAMMEKTRMYVFRNLDPEEPIQTSGYICNFEDLEIKSVLLDEILKDPEHPNKDYLINFEIRSLRDSRALIEKVGIKDASQFIEDNPHPRLWRLLAEAALQKLDLYTAEQAFVRCKDYQGIKFVKRLGKLLSESMKQAEVVGYFGRFEEAERTYLEMDRRDLAIGLRLKLGDWFRVLQLLKTGSGDADDSLLEQANNAIGDYFADRQKWLNAVQYYVQGRNQERLAECYYMLEDYEGLENLAISLPENHKLLPEIAQMFVRVGMCEQAVTAFLKCSQPKAAVDTCVHLNQWNKAVELAKNHSMKEIGSLLARYASHLLEKNKTLDAIELYRKANYFFDAAKLMFKIADEEAKKGSKPLRVKKLYVLSALLIEQYHEQMKNAQRGKVKGKSSEATSALAGLLEEEVLSTTDRFTDNAWRGAEAYHFFILAQRQLYEGCVDTALKTALHLKDYEDIIPPVEIYSLLALCACASRAFGTCSKAFIKLKSLETLSSEQKQQYEDLALEIFTKHTSKDNRKPELDSLMEGGEGKLPTCVATGSPITEYQFWMCSVCKHGVLAQEISHYSFCPLCHSPVG

SEQ ID NO: 5802 - protein, 870 aa, Homo sapiens
MASASSSRAGVALPFEKSQLTLKVVSAKPKVHNRQPRINSYVEVAVDGLPSETKKTGKRIGSSELLWNEIIILNVTAQSHLDLKVWSCHTLRNELLGTASVNLSNVLKNNGGKMENMQLTLNLQTENKGSVVSGGELTIFLDGPTVDLGNVPNGSALTDGSQLPSRDSSGTAVAPENRHQPPSTNCFGGRSRTHRHSGASARTTPATGEQSPGARSRHRQPVKNSGHSGLANGTVNDEPTTATDPEEPSVVGVTSPPAAPLSVTPNPNTTSLPAPATPAEGEEPSTSGTQQLPAAAQAPDALPAGWEQRELPNGRVYYVDHNTKTTTWERPLPPGWEKRTDPRGRFYYVDHNTRTTTWQRPTAEYVRNYEQWQSQRNQLQGAMQHFSQRFLYQSSSASTDHDPLGPLPPGWEKRQDNGRVYYVNHNTRTTQWEDPRTQGMIQEPALPPGWEMKYTSEGVRYFVDHNTRTTTFKDPRPGFESGTKQGSPGAYDRSFRWKYHQFRFLCHSNALPSHVKISVSRQTLFEDSFQQIMNMKPYDLRRRLYIIMRGEEGLDYGGIAREWFFLLSHEVLNPMYCLFEYAGKNNYCLQINPASSINPDHLTYFRFIGRFIAMALYHGKFIDTGFTLPFYKRMLNKRPTLKDLESIDPEFYNSIVWIKENNLEECGLELYFIQDMEILGKVTTHELKEGGESIRVTEENKEEYIMLLTDWRFTRGVEEQTKAFLDGFNEVAPLEWLRYFDEKELELMLCGMQEIDMSDWQKSTIYRHYTKNSKQIQWFWQVVKEMDNEKRIRLLQFVTGTCRLPVGGFAELIGSNGPQKFCIDKVGKETWLPRSHTCFNRLDLPPYKSYEQLREKLLYAIEETEGFGQE

SEQ ID NO: 5803 - protein, 754 aa, Homo sapiens
MQLTLNLQTENKGSVVSGGELTIFLDGPTVDLGNVPNGSALTDGSQLPSRDSSGTAVAPENRHQPPSTNCFGGRSRTHRHSGASARTTPATGEQSPGARSRHRQPVKNSGHSGLANGTVNDEPTTATDPEEPSVVGVTSPPAAPLSVTPNPNTTSLPAPATPAEGEEPSTSGTQQLPAAAQAPDALPAGWEQRELPNGRVYYVDHNTKTTTWERPLPPGWEKRTDPRGRFYYVDHNTRTTTWQRPTAEYVRNYEQWQSQRNQLQGAMQHFSQRFLYQSSSASTDHDPLGPLPPGWEKRQDNGRVYYVNHNTRTTQWEDPRTQGMIQEPALPPGWEMKYTSEGVRYFVDHNTRTTTFKDPRPGFESGTKQGSPGAYDRSFRWKYHQFRFLCHSNALPSHVKISVSRQTLFEDSFQQIMNMKPYDLRRRLYIIMRGEEGLDYGGIAREWFFLLSHEVLNPMYCLFEYAGKNNYCLQINPASSINPDHLTYFRFIGRFIAMALYHGKFIDTGFTLPFYKRMLNKRPTLKDLESIDPEFYNSIVWIKENNLEECGLELYFIQDMEILGKVTTHELKEGGESIRVTEENKEEYIMLLTDWRFTRGVEEQTKAFLDGFNEVAPLEWLRYFDEKELELMLCGMQEIDMSDWQKSTIYRHYTKNSKQIQWFWQVVKEMDNEKRIRLLQFVTGTCRLPVGGFAELIGSNGPQKFCIDKVGKETWLPRSHTCFNRLDLPPYKSYEQLREKLLYAIEETEGFGQE

SEQ ID NO: 5804 - protein, 431 aa, Homo sapiens
MIQEPALPPGWEMKYTSEGVRYFVDHNTRTTTFKDPRPGFESGTKQGSPGAYDRSFRWKYHQFRFLCHSNALPSHVKISVSRQTLFEDSFQQIMNMKPYDLRRRLYIIMRGEEGLDYGGIAREWFFLLSHEVLNPMYCLFEYAGKNNYCLQINPASSINPDHLTYFRFIGRFIAMALYHGKFIDTGFTLPFYKRMLNKRPTLKDLESIDPEFYNSIVWIKENNLEECGLELYFIQDMEILGKVTTHELKEGGESIRVTEENKEEYIMLLTDWRFTRGVEEQTKAFLDGFNEVAPLEWLRYFDEKELELMLCGMQEIDMSDWQKSTIYRHYTKNSKQIQWFWQVVKEMDNEKRIRLLQFVTGTCRLPVGGFAELIGSNGPQKFCIDKVGKETWLPRSHTCFNRLDLPPYKSYEQLREKLLYAIEETEGFGQE

SEQ ID NO: 5805 - protein, 335 aa, Homo sapiens
MASASSSRAGVALPFEKSQLTLKVVSAKPKVHNRQPRINSYVEVAVDGLPSETKKTGKRIGSSELLWNEIIILNVTAQSHLDLKVWSCHTLRNELLGTASVNLSNVLKNNGGKMENMQLTLNLQTENKGSVVSGGELTIFLDGPTVDLGNVPNGSALTDGSQLPSRDSSGTAVAPENRHQPPSTNCFGGRSRTHRHSGASARTTPATGEQSPGARSRHRQPVKNSGHSGLANGTVNDEPTTATDPEEPSVVGVTSPPAAPLSVTPNPNTTSLPAPATPAEGEEPSTSGTQQLPAAAQAPDALPAGWEQRELPNGRVYYVDHNTKTTTWERPLPPG

SEQ ID NO: 5806 - protein, 913 aa, Homo sapiens
MASESDTEEFYDAPEDVHLGGGYPVGSPGKVGLSTFKETENTAYKVGNESPVQELKQDVSKKIIESIIEESQKVLQLEDDSLDSKGKELSDQATASPIVARTDLSNIPGLLAIDQVLPEESQKAESQNTFEETELELKKCFPSDETCEKPVDETTKLTQTSSTEQLNVLETETEVLNKEAVEVKGGGDVLEPVSSDSLSTKDFAAVEEVAPAKPPRHLTPEPDIVASTKKPVPARPPPPTNFPPPRPPPPSRPAPPPRKRKSELEFETLKTPDIDVPKENITSDSLLTASMASESTVKDSQPSLDLASATSGDKIVTAQENGKAPDGQTVAGEVMGPQRPRSNSGRELTDEEILASVMIKNLDTGEEIPLSLAEEKLPTGINPLTLHIMRRTKEYVSNDAAQSDDEEKLQSQPTDTDGGRLKQKTTQLKKFLGKSVKRAKHLAEEYGERAINKVKSVRDEVFHTDQDDPSSSDDEGMPYTRPVKFKAAHGFKGPYDFDQIKVVQDLSGEHMGAVWTMKFSHCGRLLASAGQDNVVRIWALKNAFDYFNNMRMKYNTEGRVSPSPSQESLSSSKSDTDTGVCSGTDEDPDDKNAPFRQRPFCKYKGHTADLLDLSWSKNYFLLSSSMDKTVRLWHISRRECLCCFQHIDFVTAIAFHPRDDRYFLSGSLDGKLRLWNIPDKKVALWNEVDGQTKLITAANFCQNGKYAVIGTYDGRCIFYDTEHLKYHTQIHVRSTRGRNKVGRKITGIEPLPGENKILVTSNDSRIRLYDLRDLSLSMKYKGYVNSSSQIKASFSHDFTYLVSGSEDKYVYIWSTYHDLSKFTSVRRDRNDFWEGIKAHNAVVTSAIFAPNPSLMLSLDVQSEKSEGNEKSEDAEVLDATPSGIMKTDNTEVLLSADFTGAIKVFVNKRKNVS

SEQ ID NO: 5807 - protein, 905 aa, Homo sapiens
MASESDTEEFYDAPEDVHLGGGYPVGSPGKVGLSTFKETENTAYKVGNESPVQELKQDVSKKIIESIIEESQKVLQLEDDSLDSKGKELSDQATASPIVARTDLSNIPGLLAIDQVLPEESQKAESQNTFEETELELKKCFPSDETCEKPVDETTKLTQTSSTEQLNVLETETEVLNKEAVEVKGGGDVLEPVSSDSLSTKDFAAVEEVAPAKPPRHLTPEPDIVASTKKPVPARPPPPTNFPPPRPPPPSRPAPPPRKRKSELEFETLKTPDIDVPKENITSDSLLTASMASESTVKDSQPSLDLASATSGDKIVTAQENGKAPDGQTVAGEVMGPQRPRSNSGRELTDEEILASVMIKNLDTGEEIPLSLAEEKLPTGINPLTLHIMRRTKEYVSNDAAQSDDEEKLQSQPTDTDGGRLKQKTTQLKKFLGKSVKRAKHLAEEYGERAINKVKSVRDEVFHTDQDDPSSSDDEGMPYTRPVKFKAAHGFKGPYDFDQIKVVQDLSGEHMGAVWTMKFSHCGRLLASAGQDNVVRIWALKNAFDYFNNMRMKYNTEGRVSPSPSQESLSSSKSDTDTGVCSGTDEDPDDKNAPFRQRPFCKYKGHTADLLDLSWSKNYFLLSSSMDKTVRLWHISRRECLCCFQHIDFVTAIAFHPRDDRYFLSGSLDGKLRLWNIPDKKVALWNEVDGQTKLITAANFCQNGKYAVIGTYDGRCIFYDTEHLKYHTQIHVRSTRGRNKVGRKITGIEPLPGENKILVTSNDSRIRLYDLRDLSLSMKYKGYVNSSSQIKASFSGSEDKYVYIWSTYHDLSKFTSVRRDRNDFWEGIKAHNAVVTSAIFAPNPSLMLSLDVQSEKSEGNEKSEDAEVLDATPSGIMKTDNTEVLLSADFTGAIKVFVNKRKNVS

SEQ ID NO: 5808 - protein, 429 aa, Homo sapiens
MVNVPYTRPVKFKAAHGFKGPYDFDQIKVVQDLSGEHMGAVWTMKFSHCGRLLASAGQDNVVRIWALKNAFDYFNNMRMKYNTEGRVSPSPSQESLSSSKSDTDTGVCSGTDEDPDDKNAPFRQRPFCKYKGHTADLLDLSWSKNYFLLSSSMDKTVRLWHISRRECLCCFQHIDFVTAIAFHPRDDRYFLSGSLDGKLRLWNIPDKKVALWNEVDGQTKLITAANFCQNGKYAVIGTYDGRCIFYDTEHLKYHTQIHVRSTRGRNKVGRKITGIEPLPGENKILVTSNDSRIRLYDLRDLSLSMKYKGYVNSSSQIKASFSHDFTYLVSGSEDKYVYIWSTYHDLSKFTSVRRDRNDFWEGIKAHNAVVTSAIFAPNPSLMLSLDVQSEKSEGNEKSEDAEVLDATPSGAVAHACNPSTLGGRGRRIT

SEQ ID NO: 5809 - protein, 824 aa, Homo sapiens
MASESDTEEFYDAPEDVHLGGGYPVGSPGKVGLSTFKIIESIIEESQKVLQLEDDSLDSKGKELSDQATASPIVARTDLSNIPGLLAIDQVLPEESQKAESQNTFEETELELKKCFPSDETCEKPVDETTKLTQTSSTEQLNVLETETEVLNKEAVEVKGGGDVLEPVSSDSLSTKDFAAVEEVAPAKPPRHLTPEPDIVASTKKPVPARPPPPTNFPPPRPPPPSRPAPPPRKRKSELEFETLKTPDIDVPKENITSDSLLTASMASESTVKDSQPSLDLASATSGDKIVTAQENGKAPDGQTVAGEVMGPQRPRSNSGRELTDEEILASVMIKNLDTGEEIPLSLAEEKLPTGINPLTLHIMRRTKEYVSNDAAQSDDEEKLQSQPTDTDGGRLKQKTTQLKKFLGKSVKRAKHLAEEYGERAINKVKSVRDEVFHTDQDDPSSSDDEGMPYTRPVKFKAAHGFKGPYDFDQIKVVQDLSGEHMGAVWTMKFSHCGRLLASAGQDNVVRIWALKNAFDYFNNMRMKYNTEGRVSPSPSQESLSSSKSDTDTGVCSGTDEDPDDKNAPFRQRPFCKYKGHTADLLDLSWSKNYFLLSSSMDKTVRLWHISRRECLCCFQHIDFVTAIAFHPRHLKYHTQIHVRSTRGRNKVGRKITGIEPLPGENKILVTSNDSRIRLYDLRDLSLSMKYKGYVNSSSQIKASFSHDFTYLVSGSEDKYVYIWSTYHDLSKFTSVRRDRNDFWEGIKAHNAVVTSAIFAPNPSLMLSLDVQSEKSEGNEKSEDAEVLDATPSGIMKTDNTEVLLSADFTGAIKVFVNKRKNVS

SEQ ID NO: 5810 - protein, 427 aa, Homo sapiens
MTLVTAGGAWTGPGCWHEVKDEESSSEQSISIAVSHVNTSKAGLPAQTALPCDICGPILKDILHLDEHQGTHHGLKLHTCGACGRQFWFSANLHQYQKCYSIEQPLRRDKSEASIVKNCTVSKEPHPSEKPFTCKEEQKNFQATLGGCQQKAIHSKRKTHRSTESGDAFHGEQMHYKCSECGKAFSRKDTLVQHQRIHSGEKPYECSECGKAFSRKATLVQHQRIHTGERPYECSECGKTFSRKDNLTQHKRIHTGEMPYKCNECGKYFSHHSNLIVHQRVHNGARPYKCSDCGKVFRHKSTLVQHESIHTGENPYDCSDCGKSFGHKYTLIKHQRIHTESKPFECIECGKFFSRSSDYIAHQRVHTGERPFVCSKCGKDFIRTSHLVRHQRVHTGERPYECSECGKAYSLSSHLNRHQKVHTAGRL

SEQ ID NO: 5811 - protein, 348 aa, Homo sapiens
MWGMWETILVQCNLHQYQKCYSIEQPLRRDKSEASIVKNCTVSKEPHPSEKPFTCKEEQKNFQATLGGCQQKAIHSKRKTHRSTESGDAFHGEQMHYKCSECGKAFSRKDTLVQHQRIHSGEKPYECSECGKAFSRKATLVQHQRIHTGERPYECSECGKTFSRKDNLTQHKRIHTGEMPYKCNECGKYFSHHSNLIVHQRVHNGARPYKCSDCGKVFRHKSTLVQHESIHTGENPYDCSDCGKSFGHKYTLIKHQRIHTESKPFECIECGKFFSRSSDYIAHQRVHTGERPFVCSKCGKDFIRTSHLVRHQRVHTGERPYECSECGKAYSLSSHLNRHQKVHTAGRL

SEQ ID NO: 5812 - protein, 534 aa, Homo sapiens
MAVESGVISTLIPQDPPEQELILVKVEDNFSWDEKFKQNGSTQSCQELFRQQFRKFCYQETPGPREALSRLQELCYQWLMPELHTKEQILELLVLEQFLSILPEELQIWVQQHNPESGEEAVTLLEDLEREFDDPGQQVPASPQGPAVPWKDLTCLRASQESTDIHLQPLKTQLKSWKPCLSPKSDCENSETATKEGISEEKSQGLPQEPSFRGISEHESNLVWKQGSATGEKLRSPSQGGSFSQVIFTNKSLGKRDLYDEAERCLILTTDSIMCQKVPPEERPYRCDVCGHSFKQHSSLTQHQRIHTGEKPYKCNQCGKAFSLRSYLIIHQRIHSGEKAYECSECGKAFNQSSALIRHRKIHTGEKACKCNECGKAFSQSSYLIIHQRIHTGEKPYECNECGKTFSQSSKLIRHQRIHTGERPYECNECGKAFRQSSELITHQRIHSGEKPYECSECGKAFSLSSNLIRHQRIHSGEEPYQCNECGKTFKRSSALVQHQRIHSGDEAYICNECGKAFRHRSVLMRHQRVHTIK

SEQ ID NO: 5813 - protein, 275 aa, Homo sapiens
MAVESGVISTLIPQDPPEQELILVKVEDNFSWDEKFKQNGSTQSCQELFRQQFRKFCYQETPGPREALSRLQELCYQWLMPELHTKEQILELLVLEQFLSILPEELQIWVQQHNPESGEEAVTLLEDLEREFDDPGQQVPASPQGPAVPWKDLTCLRASQESTDIHLQPLKTQLKSWKPCLSPKSDCENSETATKEGISEEKSQGLPQEPSFRGIKLSRPPKASSAIRWECVSPGSFPGDIIAAEATHSTISCFAINTLPATILPSKNVNRKYFS

SEQ ID NO: 5814 - protein, 207 aa, Homo sapiens
MAVESGVISTLIPQDPPEQELILVKVEDNFSWDEKFKQNGSTQSCQELFRQQFRKFCYQETPGPREALSRLQELCYQWLMPELHTKEQILELLVLEQFLSILPEELQIWVQQHNPESGEEAVTLLEDLEREFDDPGQQVPASPQGPAVPWKDLTCLRASQESTDIHLQPLKTQLKSWKPCLSPKSGEEWEIIWKLLTLRPLFLRMQN

SEQ ID NO: 5815 - protein, 828 aa, Homo sapiens
MQNSVSVPPKDEGESNIPSGTIQSRKGLQNKSQFRTIAPKIVPKVLTSRMLPCHSPSRSDQVNLGPSINSKLLGMSTQNYALMQVAGQEGTFSLVALPHVASAQPIQKPRMSLPENLKLPIPRYQPPRNSKASRKKPILIFPKSGCSKAPAQTQMCPQMSPSPPHHPELLYKPSPFEEVPSLEQAPASISTAALTNGSDHGDLRPPVTNTHGSLNPPATPASSTPEEPAKQDLTALSGKAHFVSKITSSKPSAVASEKFKEQVDLAKTMTNLSPTILGNAVQLISSVPKGKLPIPPYSRMKTMEVYKIKSDANIAGFSLPGPKADCDKIPSTTEGFNAATKVASRLPVPQVSQQSACESAFCPPTKLDLNHKTKLNSGAAKRKGRKRKVPDEILAFQGKRRKYIINKCRDGKERVKNDPQEFRDQKLGTLKKYRSIMPKPIMVIPTLASLASPTTLQSQMLGGLGQDVLLNNSLTPKYLGCKQDNSSSPKPSSVFRNGFSGIKKPWHRCHVCNHHFQFKQHLRDHMNTHTNRRPYSCRICRKSYVRPGSLSTHMKLHHGENRLKKLMCCEFCAKVFGHIRVYFGHLKEVHRVVISTEPAPSELQPGDIPKNRDMSVRGMEGSLERENKSNLEEDFLLNQADEVKLQIKCGRCQITAQSFAEIKFHLLDVHGEEIEGRLQEGTFPGSKGTQEELVQHASPDWKRHPERGKPEKVHSSSEESHACPRLKRQLHLHQNGVEMLMENEGPQSGTNKPRETCQGPECPGLHTFLLWSHSGFNCLLCAEMLGRKEDLLHHWKHQHNCEDPSKLWAILNTVSNQGVIELSSEAEK

SEQ ID NO: 5816 - protein, 818 aa, Homo sapiens
MDSESNIPSGTIQSRKGLQNKSQFRTIAPKIVPKVLTSRMLPCHSPSRSDQVNLGPSINSKLLGMSTQNYALMQVAGQEGTFSLVALPHVASAQPIQKPRMSLPENLKLPIPRYQPPRNSKASRKKPILIFPKSGCSKAPAQTQMCPQMSPSPPHHPELLYKPSPFEEVPSLEQAPASISTAALTNGSDHGDLRPPVTNTHGSLNPPATPASSTPEEPAKQDLTALSGKAHFVSKITSSKPSAVASEKFKEQVDLAKTMTNLSPTILGNAVQLISSVPKGKLPIPPYSRMKTMEVYKIKSDANIAGFSLPGPKADCDKIPSTTEGFNAATKVASRLPVPQVSQQSACESAFCPPTKLDLNHKTKLNSGAAKRKGRKRKVPDEILAFQGKRRKYIINKCRDGKERVKNDPQEFRDQKLGTLKKYRSIMPKPIMVIPTLASLASPTTLQSQMLGGLGQDVLLNNSLTPKYLGCKQDNSSSPKPSSVFRNGFSGIKKPWHRCHVCNHHFQFKQHLRDHMNTHTNRRPYSCRICRKSYVRPGSLSTHMKLHHGENRLKKLMCCEFCAKVFGHIRVYFGHLKEVHRVVISTEPAPSELQPGDIPKNRDMSVRGMEGSLERENKSNLEEDFLLNQADEVKLQIKCGRCQITAQSFAEIKFHLLDVHGEEIEGRLQEGTFPGSKGTQEELVQHASPDWKRHPERGKPEKVHSSSEESHACPRLKRQLHLHQNGVEMLMENEGPQSGTNKPRETCQGPECPGLHTFLLWSHSGFNCLLCAEMLGRKEDLLHHWKHQHNCEDPSKLWAILNTVSNQGVIELSSEAEK

SEQ ID NO: 5817 - protein, 779 aa, Homo sapiens
MLPCHSPSRSDQVNLGPSINSKLLGMSTQNYALMQVAGQEGTFSLVALPHVASAQPIQKPRMSLPENLKLPIPRYQPPRNSKASRKKPILIFPKSGCSKAPAQTQMCPQMSPSPPHHPELLYKPSPFEEVPSLEQAPASISTAALTNGSDHGDLRPPVTNTHGSLNPPATPASSTPEEPAKQDLTALSGKAHFVSKITSSKPSAVASEKFKEQVDLAKTMTNLSPTILGNAVQLISSVPKGKLPIPPYSRMKTMEVYKIKSDANIAGFSLPGPKADCDKIPSTTEGFNAATKVASRLPVPQVSQQSACESAFCPPTKLDLNHKTKLNSGAAKRKGRKRKVPDEILAFQGKRRKYIINKCRDGKERVKNDPQEFRDQKLGTLKKYRSIMPKPIMVIPTLASLASPTTLQSQMLGGLGQDVLLNNSLTPKYLGCKQDNSSSPKPSSVFRNGFSGIKKPWHRCHVCNHHFQFKQHLRDHMNTHTNRRPYSCRICRKSYVRPGSLSTHMKLHHGENRLKKLMCCEFCAKVFGHIRVYFGHLKEVHRVVISTEPAPSELQPGDIPKNRDMSVRGMEGSLERENKSNLEEDFLLNQADEVKLQIKCGRCQITAQSFAEIKFHLLDVHGEEIEGRLQEGTFPGSKGTQEELVQHASPDWKRHPERGKPEKVHSSSEESHACPRLKRQLHLHQNGVEMLMENEGPQSGTNKPRETCQGPECPGLHTFLLWSHSGFNCLLCAEMLGRKEDLLHHWKHQHNCEDPSKLWAILNTVSNQGVIELSSEAEK

SEQ ID NO: 5818 - protein, 172 aa, Homo sapiens
MLLLPPRPPHPRSSSPEAMDPPPPKAPPFPKAEGPSSTPSSAAGPRPPRLGRHLLIDANGVPYTYTVQLEEEPRGPPQREAPPGEPGPRKGYSCPECARVFASPLRLQSHRVSHSDLKPFTCGACGKAFKRSSHLSRHRATHRARAGPPHTCPLCPRRFQDAAELAQHVRLH

SEQ ID NO: 5819 - protein, 310 aa, Homo sapiens
MGENQTMVTEFLLLGFLLGPRIQMLLFGLFSLFYIFTLLGNGAILGLISLDSRLHTPMYFFLSHLAVVDIAYTRNTVPQMLANLLHPAKPISFAGCMTQTFLCLSFGHSECLLLVLMSYDRYVAICHPLRYSVIMTWRVCITLAVTSWTCGSLLALAHVVLILRLPFSGPHEINHFFCEILSVLRLACADTWLNQVVIFAACVFFLVGPPSLVLVSYSHILAAILRIQSGEGRRKAFSTCSSHLCVVGLFFGSAIIMYMAPKSRHPEEQQKVFFLFYSFFNPTLNPLIYSLRNGEVKGALRRALGKESHS

SEQ ID NO: 5820 - protein, 494 aa, Homo sapiens
MELSLESLGGLHSVAHAQAGELLSPGHARSAAAQHRGLVAPGRPGLVAGMASLLDGGGGGGGGGAGGAGGAGSAGGGADFRGELAGPLHPAMGMACEAPGLGGTYTTLTPLQHLPPLAAVADKFHQHAAAAAVAGAHGGHPHAHPHPAAAPPPPPPPQRLAASVSGSFTLMRDERAALASVGHLYGPYGKELPAMGSPLSPLPNALPPALHGAPQPPPPPPPPPLAAYGPPGHLAGDKLLPPAAFEPHAALLGRAEDALARGLPGGGGGTGSGGAGSGSAAGLLAPLGGLAAAGAHGPHGGGGGPGGSGGGPSAGAAAEEINTKEVAQRITAELKRYSIPQAIFAQRILCRSQGTLSDLLRNPKPWSKLKSGRETFRRMWKWLQEPEFQRMSALRLAACKRKEQEQQKERALQPKKQRLVFTDLQRRTLIAIFKENKRPSKEMQVTISQQLGLELNTVSNFFMNARRRCMNRWAEEPSTAPGGPAGATATFSKA

SEQ ID NO: 5821 - protein, 667 aa, Homo sapiens
MAAETLLSSLLGLLLLGLLLPASLTGGVGSLNLEELSEMRYGIEILPLPVMGGQSQSSDVVIVSSKYKQRYECRLPAGAIHFQREREEETPAYQGPGIPELLSPMRDAPCLLKTKDWWTYEFCYGRHIQQYHMEDSEIKGEVLYLGYYQSAFDWDDETAKASKQHRLKRYHSQTYGNGSKCDLNGRPREAEVRFLCDEGAGISGDYIDRVDEPLSCSYVLTIRTPRLCPHPLLRPPPSAAPQAILCHPSLQPEEYMAYVQRQADSKQYGDKIIEELQDLGPQVWSETKSGVAPQKMAGASPTKDDSKDSDFWKMLNEPEDQAPGGEEVPAEEQDPSPEAADSASGAPNDFQNNVQVKVIRSPADLIRFIEELKGGTKKGKPNIGQEQPVDDAAEVPQREPEKERGDPERQREMEEEEDEDEDEDEDEDERQLLGEFEKELEGILLPSDRDRLRSEVKAGMERELENIIQETEKELDPDGLKKESERDRAMLALTSTLNKLIKRLEEKQSPELVKKHKKKRVVPKKPPPSPQPTEEDPEHRVRVRVTKLRLGGPNQDLTVLEMKRENPQLKQIEGLVKELLEREGLTAAGKIEIKIVRPWAEGTEEGARWLTDEDTRNLKEIFFNILVPGAEEAQKERQRQKELESNYRRVWGSPGGEGTGDLDEFDF

SEQ ID NO: 5822 - protein, 612 aa, Homo sapiens
MAAETLLSSLLGLLLLGLLLPASLTGGVGSLNLEELSEMRYGIEILPLPVMGGQSQSSDVVIVSSKYKQRYECRLPAGAIHFQREREEETPAYQGPGIPELLSPMRDAPCLLKTKDWWTYEFCYGRHIQQYHMEDSEIKGEVLYLGYYQSAFDWDDETAKASKQHRLKRYHSQTYGNGSKCDLNGRPREAEVRFLCDEGAGISGDYIDRVDEPLSCSYVLTIRTPRLCPHPLLRPPPSAAPQAILCHPSLQPEEYMAYVQRQADSKQYGDKIIEELQDLGPQVWSETKSGVAPQKMAGASPTKDDSKDSDFWKMLNEPEDQAPGGEEVPAEEQDPSPEAADSASGAPNDFQNNVQVKVIRSPADLIRFIEELKGGTKKGKPNIGQEQPVDDAAEVPQREPEKERGDPERQREMEEEEDEDEDEDEDEDERQLLGEFEKELEGILLPSDRDRLRSEVKAGMERELENIIQETEKELDPDGLKKESERDRAMLALTSTLNKLIKRLEEKQSPELVKKHKKKRVVPKKPPPSPQPTGKIEIKIVRPWAEGTEEGARWLTDEDTRNLKEIFFNILVPGAEEAQKERQRQKELESNYRRVWGSPGGEGTGDLDEFDF

SEQ ID NO: 5823 - protein, 597 aa, Homo sapiens
MAAETLLSSLLGLLLLGLLLPASLTGGVGSLNLEELSEMRYGIEILPLPVMGGQSQSSDVVIVSSKYKQRYECRLPAGAIHFQREREEETPAYQGPGIPELLSPMRDAPCLLKTKDWWTYEFCYGRHIQQYHMEDSEIKGEVLYLGYYQSAFDWDDETAKASKQHRLKRYHSQTYGNGSKCDLNGRPREAEVRFLCDEGAGISGDYIDRVDEPLSCSYVLTIRTPRLCPHPLLRPPPSAAPQAILCHPSLQPEEYMAYVQRQADSKQYGDKIIEELQDLGPQVWSETKSGVAPQKMAGASPTKDDSKDSDFWKMLNEPEDQAPGGEEVPAEEQDPSPEAADSASGAPNDFQNNVQVKVIRSPADLIRFIEELKGGTKKGKPNIGQEQPVDDAAEVPQREPEKERGDPERQREMEEEEDEDEDEDEDEDERQLLGEFEKELEGILLPSDRDRLRSETEKELDPDGLKKESERDRAMLALTSTLNKLIKRLEEKQSPELVKKHKKKRVVPKKPPPSPQPTGKIEIKIVRPWAEGTEEGARWLTDEDTRNLKEIFFNILVPGAEEAQKERQRQKELESNYRRVWGSPGGEGTGDLDEFDF

SEQ ID NO: 5824 - protein, 652 aa, Homo sapiens
MAAETLLSSLLGLLLLGLLLPASLTGGVGSLNLEELSEMRYGIEILPLPVMGGQSQSSDVVIVSSKYKQRYECRLPAGAIHFQREREEETPAYQGPGIPELLSPMRDAPCLLKTKDWWTYEFCYGRHIQQYHMEDSEIKGEVLYLGYYQSAFDWDDETAKASKQHRLKRYHSQTYGNGSKCDLNGRPREAEVRFLCDEGAGISGDYIDRVDEPLSCSYVLTIRTPRLCPHPLLRPPPSAAPQAILCHPSLQPEEYMAYVQRQADSKQYGDKIIEELQDLGPQVWSETKSGVAPQKMAGASPTKDDSKDSDFWKMLNEPEDQAPGGEEVPAEEQDPSPEAADSASGAPNDFQNNVQVKVIRSPADLIRFIEELKGGTKKGKPNIGQEQPVDDAAEVPQREPEKERGDPERQREMEEEEDEDEDEDEDEDERQLLGEFEKELEGILLPSDRDRLRSETEKELDPDGLKKESERDRAMLALTSTLNKLIKRLEEKQSPELVKKHKKKRVVPKKPPPSPQPTEEDPEHRVRVRVTKLRLGGPNQDLTVLEMKRENPQLKQIEGLVKELLEREGLTAAGKIEIKIVRPWAEGTEEGARWLTDEDTRNLKEIFFNILVPGAEEAQKERQRQKELESNYRRVWGSPGGEGTGDLDEFDF

SEQ ID NO: 5825 - protein, 580 aa, Homo sapiens
MAAETLLSSLLGLLLLGLLLPASLTGGVGSLNLEELSEMRYGIEILPLPVMGGQSQSSDVVIVSSKYKQRYECRLPAGAIHFQREREEETPAYQGPGIPELLSPMRDAPCLLKTKDWWTYEFCYGRHIQQYHMEDSEIKGEVLYLGYYQSAFDWDDETAKFLCDEGAGISGDYIDRVDEPLSCSYVLTIRTPRLCPHPLLRPPPSAAPQAILCHPSLQPEEYMAYVQRQAVDSKQYGDKIIEELQDLGPQVWSETKSGVAPQKMAGASPTKDDSKDSDFWKMLNEPEDQAPGGEEVPAEEQDPSPEAADSASGAPNDFQNNVQVKVIRSPADLIRFIEELKGGTKKGKPNIGQEQPVDDAAEVPQREPEKERGDPERQREMEEEEDEDEDEDEDEDERQLLGEFEKELEGILLPSDRDRLRSEVKAGMERELENIIQETEKELDPDGLKKESERDRAMLALTSTLNKLIKRLEEKQSPELVKKHKKKRVVPKKPPPSPQPTGKIEIKIVRPWAEGTEEGARWLTDEDTRNLKEIFFNILVPGAEEAQKERQRQKELESNYRRVWGSPGGEGTGDLDEFDF

SEQ ID NO: 5826 - protein, 560 aa, Homo sapiens
MAAETLLSSLLGLLLLGLLLPASLTGGVGSLNLEELSEMRYGIEILPLPVMGGQSQSSDVVIVSSKYKQRYECRLPAGAIHFQREREEETPAYQGPGIPELLSPMRDAPCLLKTKDWWTYEFCYGRHIQQYHMEDSEIKGEFLCDEGAGISGDYIDRVDEPLSCSYVLTIRTPRLCPHPLLRPPPSAAPQAILCHPSLQPEEYMAYVQRQADSKQYGDKIIEELQDLGPQVWSETKSGVAPQKMAGASPTKDDSKDSDFWKMLNEPEDQAPGGEEVPAEEQDPSPEAADSASGAPNDFQNNVQVKVIRSPADLIRFIEELKGGTKKGKPNIGQEQPVDDAAEVPQREPEKERGDPERQREMEEEEDEDEDEDEDEDERQLLGEFEKELEGILLPSDRDRLRSEVKAGMERELENIIQETEKELDPDGLKKESERDRAMLALTSTLNKLIKRLEEKQSPELVKKHKKKRVVPKKPPPSPQPTGKIEIKIVRPWAEGTEEGARWLTDEDTRNLKEIFFNILVPGAEEAQKERQRQKELESNYRRVWGSPGGEGTGDLDEFDF

SEQ ID NO: 5827 - protein, 613 aa, Homo sapiens
MAAETLLSSLLGLLLLGLLLPASLTGGVGSLNLEELSEMRYGIEILPLPVMGGQSQSSDVVIVSSKYKQRYECRLPAGAIHFQREREEETPAYQGPGIPELLSPMRDAPCLLKTKDWWTYEFCYGRHIQQYHMEDSEIKGEVLYLGYYQSAFDWDDETAKASKQHRLKRYHSQTYGNGSKCDLNGRPREAEVRFLCDEGAGISGDYIDRVDEPLSCSYVLTIRTPRLCPHPLLRPPPSAAPQAILCHPSLQPEEYMAYVQRQAVDSKQYGDKIIEELQDLGPQVWSETKSGVAPQKMAGASPTKDDSKDSDFWKMLNEPEDQAPGGEEVPAEEQDPSPEAADSASGAPNDFQNNVQVKVIRSPADLIRFIEELKGGTKKGKPNIGQEQPVDDAAEVPQREPEKERGDPERQREMEEEEDEDEDEDEDEDERQLLGEFEKELEGILLPSDRDRLRSEVKAGMERELENIIQETEKELDPDGLKKESERDRAMLALTSTLNKLIKRLEEKQSPELVKKHKKKRVVPKKPPPSPQPTGKIEIKIVRPWAEGTEEGARWLTDEDTRNLKEIFFNILVPGAEEAQKERQRQKELESNYRRVWGSPGGEGTGDLDEFDF

SEQ ID NO: 5828 - protein, 538 aa, Homo sapiens
MAAETLLSSLLGLLLLGLLLPASLTGGVGSLNLEELSEMRYGIEILPLPVMGGQTKDWWTYEFCYGRHIQQYHMEDSEIKGEVLYLGYYQSAFDWDDETAKASKQHRLKRYHSQTYGNGSKCDLNGRPREAEVRFLCDEGAGISGDYIDRVDEPLSCSYVLTIRTPRLCPHPLLRPPPSAAPQAILCHPSLQPEEYMAYVQRQADSKQYGDKIIEELQDLGPQVWSETKSGVAPQKMAGASPTKDDSKDSDFWKMLNEPEDQAPGGEEVPAEEQDPSPEAADSASGAPNDFQNNVQVKVIRSPADLIRFIEELKGGTKKGKPNIGQEQPVDDAAEVPQREPEKERGDPERQREMEEEEDEDEDEDEDEDERQLLGEFEKELEGILLPSDRDRLRSETEKELDPDGLKKESERDRAMLALTSTLNKLIKRLEEKQSPELVKKHKKKRVVPKKPPPSPQPTGKIEIKIVRPWAEGTEEGARWLTDEDTRNLKEIFFNILVPGAEEAQKERQRQKELESNYRRVWGSPGGEGTGDLDEFDF

SEQ ID NO: 5829 - protein, 82 aa, Homo sapiens
MATFPPATSAPQQPPGPEDEDSSLDESDLYSLAHSYLGGGGRKGRTKREAAANTNRPSPGGHERKLVTKLQNSERKKRGARR

SEQ ID NO: 5830 - protein, 100 aa, Homo sapiens
MATFPPATSAPQQPPGPEDEDSSLDESDLYSLAHSYLGPLIMPMPTSPLTPALVTGGGGRKGRTKREAAANTNRPSPGGHERKLVTKLQNSERKKRGARR

SEQ ID NO: 5831 - protein, 304 aa, Homo sapiens
MALPITNGTLFMPFVLTFIGIPGFESVQCWIGIPFCATYVIALIGNSLLLIIIKSEPSLHEPMYIFLATLGATDISLSTSIVPKMLDIFWFHLPEIYFDACLFQMWLIHTFQGIESGVLLAMALDRCVAICYPLRRAIVFTRQLVTYIVVGVTLRPAILVIPCLLLIKCHLKLYRTKLIYHTYCERVALVKLATEDVYINKVYGILGAFIVGGLDFIFITLSYIQIFITVFHLPLKEARLKVFNTCIPHIYVFFQFYLLAFFFIFYSQIWILYPIICTYHLVQSLPTGPTIPQPLYLWVKDQTH

SEQ ID NO: 5832 - protein, 314 aa, Homo sapiens
MLGLNGTPFQPATLQLTGIPGIQTGLTWVALIFCILYMISIVGNLSILTLVFWEPALHQPMYYFLSMLALNDLGVSFSTLPTVISTFCFNYNHVAFNACLVQMFFIHTFSFMESGILLAMSLDRFVAICYPLRYVTVLTHNRILAMGLGILTKSFTTLFPFPFVVKRLPFCKGNVLHHSYCLHPDLMKVACGDIHVNNIYGLLVIIFTYGMDSTFILLSYALILRAMLVIISQEQRLKALNTCMSHICAVLAFYVPIIAVSMIHRFWKSAPPVVHVMMSNVYLFVPPMLNPIIYSVKTKEIRKGILKFFHKSQA

SEQ ID NO: 5833 - protein, 380 aa, Homo sapiens
MDSPIQIFRGEPGPTCAPSACLPPNSSAWFPGWAEPDSNGSAGSEDAQLEPAHISPAIPVIITAVYSVVFVVGLVGNSLVMFVIIRYTKMKTATNIYIFNLALADALVTTTMPFQSTVYLMNSWPFGDVLCKIVISIDYYNMFTSIFTLTMMSVDRYIAVCHPVKALDFRTPLKAKIINICIWLLSSSVGISAIVLGGTKVREDVDVIECSLQFPDDDYSWWDLFMKICVFIFAFVIPVLIIIVCYTLMILRLKSVRLLSGSREKDRNLRRITRLVLVVVAVFVVCWTPIHIFILVEALGSTSHSTAALSSYYFCIALGYTNSSLNPILYAFLDENFKRCFRDFCFPLKMRMERQSTSRVRNTVQDPAYLRDIDGMNKPV

SEQ ID NO: 5834 - protein, 291 aa, Homo sapiens
MKTATNIYIFNLALADALVTTTMPFQSTVYLMNSWPFGDVLCKIVISIDYYNMFTSIFTLTMMSVDRYIAVCHPVKALDFRTPLKAKIINICIWLLSSSVGISAIVLGGTKVREDVDVIECSLQFPDDDYSWWDLFMKICVFIFAFVIPVLIIIVCYTLMILRLKSVRLLSGSREKDRNLRRITRLVLVVVAVFVVCWTPIHIFILVEALGSTSHSTAALSSYYFCIALGYTNSSLNPILYAFLDENFKRCFRDFCFPLKMRMERQSTSRVRNTVQDPAYLRDIDGMNKPV

SEQ ID NO: 5835 - protein, 311 aa, Homo sapiens
MFYHNKSIFHPVTFFLIGIPGLEDFHMWISGPFCSVYLVALLGNATILLVIKVEQTLREPMFYFLAILSTIDLALSTTSVPRMLGIFWFDAHEINYGACVAQMFLIHAFTGMEAEVLLAMAFDRYVAVCAPLHYATILTSQVLVGISMCIVIRPVLLTLPMVYLIYRLPFCQAHIIAHSYCEHMGIAKLSCGNIRINGIYGLFVVSFFVLNLVLIGISYVYILRAVFRLPSHDAQLKALSTCGAHVGVICVFYIPSVFSFLTHRFGHQIPGYIHILVANLYLIIPPSLNPIIYGVRTKQIRERVLYVFTKK

SEQ ID NO: 5836 - protein, 312 aa, Homo sapiens
MAWENQTFNSDFILLGIFNHSPTHTFLFFLVLAIFSVAFMGNSVMVLLIYLDTQLHTPMYFLLSQLFLMDLMLICSTVPKMAFNYLSGSKSISMAGCATQIFFYVSLLGSECFLLAVMSYDRYIAICHPLRYTNLMRPKICGLMTAFSWILGSMDAIIDAVATFSFSYCGSREIAHFFCDFPSLLILSCNDTSIFEKVLFICCIVMIVFPVAIIIASYARVILAVIHMGSGEGRRKAFTTCSSHLMVVGMYYGAGLFMYIRPTSDRSPMQDKLVSVFYTILTPMLNPLIYSLRNKEVTRALRKVLGKGKCGE

SEQ ID NO: 5837 - protein, 312 aa, Homo sapiens
MKNHTRQIEFILLGLTDNSQLQIVIFLFLLLNCVLSMIGNFTIIALILLDSQLKTPMYFFLRNFSFLEISFTTACIPRFLITIVTREKTISCNGCISQLFFYIFLGVTEFFLLAALSYDRYVAICKPLRYMSIMSNKVCYQLVFSSWVTGFLIIFTPLILGLNLDFCASNIIDHFICDISLILQLSCSDTHLLELIAFLLAVMTLIVTLFLVILSYSYIIKTILKFPSAQQKKKAFSTCSSHMIVVSITYGSCMFIYIKPSANERVALSKGVTVLNTSVAPLLNPFIYTLRNQQVKQAFKAVFRKIFSASDK

SEQ ID NO: 5838 - protein, 312 aa, Homo sapiens
MENYNQTSTDFILLGLFPPSKIGLFLFILFVLIFLMALIGNLSMILLIFLDTHLHTPMYFLLSQLSLIDLNYISTIVPKMASDFLYGNKSISFIGCGIQSFFFMTFAGAEALLLTSMAYDRYVAICFPLHYPIRMSKRMYVLMITGSWMIGSINSCAHTVYAFRIPYCKSRAINHFFCDVPAMLTLACTDTWVYEYTVFLSSTIFLVFPFTGIACSYGWVLLAVYRMHSAEGRKKAYSTCSTHLTVVTFYYAPFAYTYLCPRSLRSLTEDKVLAVFYTILTPMLNPIIYSLRNKEVMGALTRVIQNIFSVKM

SEQ ID NO: 5839 - protein, 456 aa, Homo sapiens
MGYFRCARAGSFGRRRKMEPSTAARAWALFWLLLPLLGAVCASGPRTLVLLDNLNVRETHSLFFRSLKDRGFELTFKTADDPSLSLIKYGEFLYDNLIIFSPSVEDFGGNINVETISAFIDGGGSVLVAASSDIGDPLRELGSECGIEFDEEKTAVIDHHNYDISDLGQHTLIVADTENLLKAPTIVGKSSLNPILFRGVGMVADPDNPLVLDILTGSSTSYSFFPDKPITQYPHAVGKNTLLIAGLQARNNARVIFSGSLDFFSDSFFNSAVQKAAPGSQRYSQTGNYELAVALSRWVFKEEGVLRVGPVSHHRVGETAPPNAYTVTDLVEYSIVIQQLSNGKWVPFDGDDIQLEFVRIDPFVRTFLKKKGGKYSVQFKLPDVYGVFQFKVDYNRLGYTHLYSSTQVSVRPLQHTQYERFIPSAYPYYASAFSMMLGLFIFSIVFLHMKEKEKSD

SEQ ID NO: 5840 - protein, 419 aa, Homo sapiens
MGYFRCARAGSFGRRRKMEPSTAARAWALFWLLLPLLGAVCASGPRTLVLLDNLNVRETHSLFFRSLKDFGGNINVETISAFIDGGGSVLVAASSDIGDPLRELGSECGIEFDEEKTAVIDHHNYDISDLGQHTLIVADTENLLKAPTIVGKSSLNPILFRGVGMVADPDNPLVLDILTGSSTSYSFFPDKPITQYPHAVGKNTLLIAGLQARNNARVIFSGSLDFFSDSFFNSAVQKAAPGSQRYSQTGNYELAVALSRWVFKEEGVLRVGPVSHHRVGETAPPNAYTVTDLVEYSIVIQQLSNGKWVPFDGDDIQLEFVRIDPFVRTFLKKKGGKYSVQFKLPDVYGVFQFKVDYNRLGYTHLYSSTQVSVRPLQHTQYERFIPSAYPYYASAFSMMLGLFIFSIVFLHMKEKEKSD

SEQ ID NO: 5841 - protein, 438 aa, Homo sapiens
MGYFRCARAGSFGRRRKMEPSTAARAWALFWLLLPLLGAVCASGPRTLVLLDNLNVRETHSLFFRSLKDRGFELTFKTADDPSLSLIKYGEFLYDNLIIFSPSVEDFGGNINVETISAFIDGGGSECGIEFDEEKTAVIDHHNYDISDLGQHTLIVADTENLLKAPTIVGKSSLNPILFRGVGMVADPDNPLVLDILTGSSTSYSFFPDKPITQYPHAVGKNTLLIAGLQARNNARVIFSGSLDFFSDSFFNSAVQKAAPGSQRYSQTGNYELAVALSRWVFKEEGVLRVGPVSHHRVGETAPPNAYTVTDLVEYSIVIQQLSNGKWVPFDGDDIQLEFVRIDPFVRTFLKKKGGKYSVQFKLPDVYGVFQFKVDYNRLGYTHLYSSTQVSVRPLQHTQYERFIPSAYPYYASAFSMMLGLFIFSIVFLHMKEKEKSD

SEQ ID NO: 5842 - protein, 350 aa, Homo sapiens
MHQDGISSMNQLGGLFVNGRPLPLDTRQQIVRLAVSGMRPCDISRILKVSNGCVSKILGRYYRTGVLEPKGIGGSKPRLATPPVVARIAQLKGECPALFAWEIQRQLCAEGLCTQDKTPSVSSINRVLRALQEDQGLPCTRLRSPAVLAPAVLTPHSGSETPRGTHPGTGHRNRTIFSPSQAEALEKEFQRGQYPDSVARGKLATATSLPEDTVRVWFSNRRAKWRRQEKLKWEMQLPGASQGLTVPRVAPGIISAQQSPGSVPTAALPALEPLGPSCYQLCWATAPERCLSDTPPKACLKPCWDCGSFLLPVIAPSCVDVAWPCLDASLAHHLIGGAGKATPTHFSHWP

SEQ ID NO: 5843 - protein, 273 aa, Homo sapiens
MHQDGISSMNQLGGLFVNGRPLPLDTRQQIVRLAVSGMRPCDISRILKVSNGCVSKILGRYYRTGVLEPKGIGGSKPRLATPPVVARIAQLKGECPALFAWEIQRQLCAEGLCTQDKTPSVSSINRVLRALQEDQGLPCTRLRSPAVLAPAVLTPHSGSETPRGTHPGTGHRNRTIFSPSQAEALEKEFQRGQYPDSVARGKLATATSLPEDTVRVWFSNRRAKWRRQEKLKWEMQLPAVPWQCAHSSPACPGTTGSLLLSAVLGNSTRKVSE

SEQ ID NO: 5844 - protein, 343 aa, Homo sapiens
MNQLGGLFVNGRPLPLDTRQQIVRLAVSGMRPCDISRILKVSNGCVSKILGRYYRTGVLEPKGIGGSKPRLATPPVVARIAQLKGECPALFAWEIQRQLCAEGLCTQDKTPSVSSINRVLRALQEDQGLPCTRLRSPAVLAPAVLTPHSGSETPRGTHPGTGHRNRTIFSPSQAEALEKEFQRGQYPDSVARGKLATATSLPEDTVRVWFSNRRAKWRRQEKLKWEMQLPGASQGLTVPRVAPGIISAQQSPGSVPTAALPALEPLGPSCYQLCWATAPERCLSDTPPKACLKPCWGHLPPQPNSLDSGLLCLPCPSSHCHLASLSGSQALLWPGCPLLYGLE

SEQ ID NO: 5845 - protein, 471 aa, Homo sapiens
MAAAQPKYPAGATARRLARGCWSALWDYETPKVIVVRNRRLGVLYRAVQLLILLYFVWYVFIVQKSYQESETGPESSIITKVKGITTSEHKVWDVEEYVKPPEGGSVFSIITRVEATHSQTQGTCPESIRVHNATCLSDADCVAGELDMLGNGLRTGRCVPYYQGPSKTCEVFGWCPVEDGASVSQFLGTMAPNFTILIKNSIHYPKFHFSKGNIADRTDGYLKRCTFHEASDLYCPIFKLGFIVEKAGESFTELAHKGGVIGVIINWDCDLDLPASECNPKYSFRRLDPKHVPASSGYNFRFAKYYKINGTTTRTLIKAYGIRIDVIVHGQAGKFSLIPTIINLATALTSVGVGSFLCDWILLTFMNKNKVYSHKKFDKVCTPSHPSGSWPVTLARVLGQAPPEPGHRSEDQHPSPPSGQEGQQGAECGPAFPPLRPCPISAPSEQMVDTPASEPAQASTPTDPKGLAQL

SEQ ID NO: 5846 - protein, 404 aa, Homo sapiens
MAAAQPKYPAGATARRLARGCWSALWDYETPKVIVVRNRRLGVLYRAVQLLILLYFVWYVFIVQKSYQESETGPESSIITKVKGITTSEHKVWDVEEYVKPPEGGSVFSIITRVEATHSQTQGTCPESIRVHNATCLSDADCVAGELDMLGNGLRTGRCVPYYQGPSKTCEVFGWCPVEDGASVSQFLGTMAPNFTILIKNSIHYPKFHFSKGNIADRTDGYLKRCTFHEASDLYCPIFKLGFIVEKAGESFTELAHKGGVIGVIINWDCDLDLPASECNPKYSFRRLDPKHVPASSGYNFRFAKYYKINGTTTRTLIKAYGIRIDVIVHGQAGKFSLIPTIINLATALTSVGVGSFLCDWILLTFMNKNKVYSHKKFDKMVDTPASEPAQASTPTDPKGLAQL

SEQ ID NO: 5847 - protein, 447 aa, Homo sapiens
MAAAQPKYPAGATARRLARGCWSALWDYETPKVIVVRNRRLGVLYRAVQLLILLYFVWYVFIVQKSYQESETGPESSIITKVKGITTSEHKVWDVEEYVKPPESIRVHNATCLSDADCVAGELDMLGNGLRTGRCVPYYQGPSKTCEVFGWCPVEDGASVSQFLGTMAPNFTILIKNSIHYPKFHFSKGNIADRTDGYLKRCTFHEASDLYCPIFKLGFIVEKAGESFTELAHKGGVIGVIINWDCDLDLPASECNPKYSFRRLDPKHVPASSGYNFRFAKYYKINGTTTRTLIKAYGIRIDVIVHGQAGKFSLIPTIINLATALTSVGVGSFLCDWILLTFMNKNKVYSHKKFDKVCTPSHPSGSWPVTLARVLGQAPPEPGHRSEDQHPSPPSGQEGQQGAECGPAFPPLRPCPISAPSEQMVDTPASEPAQASTPTDPKGLAQL

SEQ ID NO: 5848 - protein, 497 aa, Homo sapiens
MAAAQPKYPAGATARRLARGCWSALWDYETPKVIVVRNRRLGVLYRAVQLLILLYFVWYVFIVQKSYQESETGPESSIITKVKGITTSEHKVWDVEEYVKPPEGGSVFSIITRVEATHSQTQGTCPESIRVHNATCLSDADCVAGELDMLGNGLRTGRCVPYYQGPSKTCEVFGWCPVEDGASVSQFLGTMAPNFTILIKNSIHYPKFHFSKGNIADRTDGYLKRCTFHEASDLYCPIFKLGFIVEKAGESFTELAHKGGVIGVIINWDCDLDLPASECNPKYSFRRLDPKHVPASSGYNFRFAKYYKINGTTTRTLIKAYGIRIDVIVHGQAGKFSLIPTIINLATALTSVGVVRNPLWGPSGCGGSTRPLHTGLCWPQGSFLCDWILLTFMNKNKVYSHKKFDKVCTPSHPSGSWPVTLARVLGQAPPEPGHRSEDQHPSPPSGQEGQQGAECGPAFPPLRPCPISAPSEQMVDTPASEPAQASTPTDPKGLAQL

SEQ ID NO: 5849 - protein, 379 aa, Homo sapiens
MAAAQPKYPAGATARRLARGCWSALWDYETPKVIVSIRVHNATCLSDADCVAGELDMLGNGLRTGRCVPYYQGPSKTCEVFGWCPVEDGASVSQFLGTMAPNFTILIKNSIHYPKFHFSKGNIADRTDGYLKRCTFHEASDLYCPIFKLGFIVEKAGESFTELAHKGGVIGVIINWDCDLDLPASECNPKYSFRRLDPKHVPASSGYNFRFAKYYKINGTTTRTLIKAYGIRIDVIVHGQAGKFSLIPTIINLATALTSVGVGSFLCDWILLTFMNKNKVYSHKKFDKVCTPSHPSGSWPVTLARVLGQAPPEPGHRSEDQHPSPPSGQEGQQGAECGPAFPPLRPCPISAPSEQMVDTPASEPAQASTPTDPKGLAQL

SEQ ID NO: 5850 - protein, 399 aa, Homo sapiens
MAAAQPKYPAGATARRLARGCWSALWDYETPKVIVVRIHRAEKLPGERDGPRELHHHQGQGDHHVRAQSVGRGGVREAPRGLRTGRCVPYYQGPSKTCEVFGWCPVEDGASVSQFLGTMAPNFTILIKNSIHYPKFHFSKGNIADRTDGYLKRCTFHEASDLYCPIFKLGFIVEKAGESFTELAHKGGVIGVIINWDCDLDLPASECNPKYSFRRLDPKHVPASSGYNFRFAKYYKINGTTTRTLIKAYGIRIDVIVHGQAGKFSLIPTIINLATALTSVGVGSFLCDWILLTFMNKNKVYSHKKFDKVCTPSHPSGSWPVTLARVLGQAPPEPGHRSEDQHPSPPSGQEGQQGAECGPAFPPLRPCPISAPSEQMVDTPASEPAQASTPTDPKGLAQL

SEQ ID NO: 5851 - protein, 370 aa, Homo sapiens
MAAAQPKYPAGATARRLARGCWSALWDYETPKVIVVRNRRLGVLYRAVQLLILLYFVWYVFIVQKSYQESETGPESSIITKVKGITTSEHKVWDVEEYVKPPESIRVHNATCLSDADCVAGELDMLGNGALQDLRGVRLVPGGRWGLCQPISGYDGPKFHHPHQEQHPLPQIPLLQGQHRRPHRRVPEALHVPRGLRPLLPHLQAGLYRGEGWGELHRARTQGRGGVIGVIINWDCDLDLPASECNPKYSFRRLDPKHVPASSGYNFRFAKYYKINGTTTRTLIKAYGIRIDVIVHGQAGKFSLIPTIINLATALTSVGVGSFLCDWILLTFMNKNKVYSHKKFDKMVDTPASEPAQASTPTDPKGLAQL

SEQ ID NO: 5852 - protein, 312 aa, Homo sapiens
MGLNKSASTFQLTGFPGMEKAHHWIFIPLLAAYISILLGNGTLLFLIRNDHNLHEPMYYFLAMLAATDLGVTLTTMPTVLGVLWLDHREIGHGACFSQAYFIHTLSVMESGVLLAMAYDCFITIRSPLRYTSILTNTQVMKIGVRVLTRAGLSIMPIVVRLHWFPYCRSHVLSHAFCLHQDVIKLACADITFNRLYPVVVLFAMVLLDFLIIFFSYILILKTVMGIGSGGERAKALNTCVSHICCILVFYVTVVCLTFIHRFGKHVPHVVHITMSYIHFLFPPFMNPFIYSIKTKQIQSGILRLFSLPHSRA

SEQ ID NO: 5853 - protein, 322 aa, Homo sapiens
MQPSGWAAAREAAGRDMLAADLRCSLFASALQSYKRDSVLRPFPASYARGDCKDFEALLADASKLPNLKELLQSSGDNHKRAWDLVSWILSSKVLTIHSAGKAEFEKIQKLTGAPHTPVPAPDFLFEIEYFDPANAKFYETKGERDLIYAFHGSRLENFHSIIHNGLHCHLNKTSLFGEGTYLTSDLSLALIYSPHGHGWQHSLLGPILSCVAVCEVIDHPDVKCQTKKKDSKEIDRRRARIKHSEGGDIPPKYFVVTNNQLLRVKYLLVYSQKPPKRASSQLSWFSSHWFTVMISLYLLLLLIVSVINSSAFQHFWNRAKR

SEQ ID NO: 5854 - protein, 207 aa, Homo sapiens
MQPSGWAAAREAAGRDMLAADLRCSLFASALQSYKRDSVLRPFPASYARGDCKDFEALTSLFGEGTYLTSDLSLALIYSPHGHGWQHSLLGPILSCVAVCEVIDHPDVKCQTKKKDSKEIDRRRARIKHSEGGDIPPKYFVVTNNQLLRVKYLLVYSQKPPKRASSQLSWFSSHWFTVMISLYLLLLLIVSVINSSAFQHFWNRAKR

SEQ ID NO: 5855 - protein, 323 aa, Homo sapiens
MQPSGWAAAREAAGRDMLAADLRCSLFASALQSYKRDSVLRPFPASYARGDCKDFEALLADASKLPNLKELLQSSGDNHKRAWDLVSWILSSKVLTIHSAGKAEFEKIQKLTGAPHTPVPAPDFLFEIEYFDPANAKFYETKGERDLIYAFHGSRLENFHSIIHNGLHCHLNKTSLFGEGTYLTSDLSLALIYSPHGHGWQHSLLGPILSCVAVCEVIDHPDVKCQTKKKDSKEIDRRRARIKHSEGGDIPPKYFVVTNNQLLRVKYLLVYSQKPPKSRASSQLSWFSSHWFTVMISLYLLLLLIVSVINSSAFQHFWNRAKR

SEQ ID NO: 5856 - protein, 887 aa, Homo sapiens
MGEAEKFHYIYSCDLDINVQLKIGSLEGKREQKSYKAVLEDPMLKFSGLYQETCSDLYVTCQVFAEGKPLALPVRTSYKAFSTRWNWNEWLKLPVKYPDLPRNAQVALTIWDVYGPGKAVPVGGTTVSLFGKYGMFRQGMHDLKVWPNVEADGSEPTKTPGRTSSTLSEDQMSRLAKLTKAHRQGHMVKVDWLDRLTFREIEMINESEKRSSNFMYLMVEFRCVKCDDKEYGIVYYEKDGDESSPILTSFELVKVPDPQMSMENLVESKHHKLARSLRSGPSDHDLKPNAATRDQLNIIVSYPPTKQLTYEEQDLVWKFRYYLTNQEKALTKFLKCVNWDLPQEAKQALELLGKWKPMDVEDSLELLSSHYTNPTVRRYAVARLRQADDEDLLMYLLQLVQALKYENFDDIKNGLEPTKKDSQSSVSENVSNSGINSAEIDSSQIITSPLPSVSSPPPASKTKEVPDGENLEQDLCTFLISRACKNSTLANYLYWYVIVECEDQDTQQRDPKTHEMYLNVMRRFSQALLKGDKSVRVMRSLLAAQQTFVDRLVHLMKAVQRESGNRKKKNERLQALLGDNEKMNLSDVELIPLPLEPQVKIRGIIPETATLFKSALMPAQLFFKTEDGGKYPVIFKHGDDLRQDQLILQIISLMDKLLRKENLDLKLTPYKVLATSTKHGFMQFIQSVPVAEVLDTEGSIQNFFRKYAPSENGPNGISAEVMDTYVKSCAGYCVITYILGVGDRHLDNLLLTKTGKLFHIDFGYILGRDPKPLPPPMKLNKEMVEGMGGTQSEQYQEFRKQCYTAFLHLRRYSNLILNLFSLMVDANIPDIALEPDKTVKKVQDKFRLDLSDEEAVHYMQSLIDESVHALFAAVVEQIHKFAQYWRK

SEQ ID NO: 5857 - protein, 336 aa, Homo sapiens
MYTVLTGTPPFMASPLSEMYQNIREGHYPEPAHLSANARRLIVHLLAPNPAERPSLDHLLQDDFFTQGFTPDRLPAHSCHSPPIFAIPPPLGRIFRKVGQRLLTQCRPPCPFTPKEASGPGEGGPDPDSMEWDGESSLSAKEVPCLEGPIHLVAQGTLQSDLAGPEGSRRPEVEAALRHLQLCLDVGPPATQDPLGEQQPILWAPKWVDYSSKYGFGYQLLDGGRTGRHPHGPATPRREGTLPTPVPPAGPGLCLLRFLASEHALLLLFSNGMVQVSFSGVPAQLVLSGEGEGLQLTLWEQGSPGTSYSLDVPRSHGCAPTTGQHLHHALRMLQSI

SEQ ID NO: 5858 - protein, 299 aa, Homo sapiens
MYTVLTGTPPFMASPLSEMYQNIREGHYPEPAHLSANARRLIVHLLAPNPAERPSLDHLLQDDFFTQGFTPDRLPAHSCHSPPIFAIPPPLGRIFRKVGQRLLTQCRPPCPFTPKEASGPGEGGPDPDSMEWDGESSLSAKEVPCLEGPIHLVAQGTLQSDLAGPEGSRRPEVEAALRHLQLCLDVGPPATQDPLGEQQPILWAPKWVDYSSKYGFGYQLLDGGRTGRHPHGPATPRRVSFSGVPAQLVLSGEGEGLQLTLWEQGSPGTSYSLDVPRSHGCAPTTGQHLHHALRMLQSI

SEQ ID NO: 5859 - protein, 762 aa, Homo sapiens
MASLLQDQLTTDQDLLLMQEGMPMRKVRSKSWKKLRYFRLQNDGMTVWHARQARGSAKPSFSISDVETIRNGHDSELLRSLAEELPLEQGFTIVFHGRRSNLDLMANSVEEAQIWMRGLQLLVDLVTSMDHQERLDQWLSDWFQRGDKNQDGKMSFQEVQRLLHLMNVEMDQEYAFSLFQAADTSQSGTLEGEEFVQFYKALTKRAEVQELFESFSADGQKLTLLEFLDFLQEEQKERDCTSELALELIDRYEPSDSGKLRHVLSMDGFLSYLCSKDGDIFNPACLPIYQDMTQPLNHYFICSSHNTYLVGDQLCGQSSVEGYIRALKRGCRCVEVDVWDGPSGEPVVYHGHTLTSRILFKDVVATVAQYAFQTSDYPVILSLETHCSWEQQQTMARHLTEILGEQLLSTTLDGVLPTQLPSPEELRRKILVKGKKLTLEEDLEYEEEEAEPELEESELALESQFETEPEPQEQNLQNKDKKKKSKPILCPALSSLVIYLKSVSFRSFTHSKEHYHFYEISSFSETKAKRLIKEAGNEFVQHNTWQLSRVYPSGLRTDSSNYNPQELWNAGCQMVAMNMQTAGLEMDICDGHFRQNGGCGYVLKPDFLRDIQSSFHPEKPISPFKAQTLLIQVISGQQLPKVDKTKEGSIVDPLVKVQIFGVRLDTARQETNYVENNGFNPYWGQTLCFRVLVPELAMLRFVVMDYDWKSRNDFIGQYTLPWTCMQQGYRHIHLLSKDGISLRPASIFVYICIQEGLEGDES

SEQ ID NO: 5860 - protein, 272 aa, Homo sapiens
MASLLQDQLTTDQDLLLMQEGMPMRKVRSKSWKKLRYFRLQNDGMTVWHARQARGSAKPSFSISDVETIRNGHDSELLRSLAEELPLEQGFTIVFHGRRSNLDLMANSVEEAQIWMRGLQLLVDLVTSMDHQERLDQWLSDWFQRGDKNQDGKMSFQEVQRLLHLMNVEMDQEYAFSLFQAADTSQSGTLEGEEFVQFYKALTKRAEVQELFESFSADGQKLTLLEFLDFLQEEQKERDCTSELALELIDRYEPSDSGASEEDPGEGEEVNT

SEQ ID NO: 5861 - protein, 204 aa, Homo sapiens
MLFGVKDIALLEHGCKALEVDSYKSLMILGIPEDCNHEEFEEIIRLPLKPLGKFEVAGKAYLEEDKSKAAIIQLTEDINYAVVPREIKGKGGVWRVVYMPRKQDIEFLTKLNLFLQSEGRTVEDMARVLRQELCPPATGPRELPARKCSVPGLGEKPEAGATVQMDVVPPLDSSEKESKAGVGKRGKRKNKKNRRRHHASDKKL

SEQ ID NO: 5862 - protein, 970 aa, Homo sapiens
MATCIGEKIEDFKVGNLLGKGSFAGVYRAESIHTGLEVAIKMIDKKAMYKAGMVQRVQNEVKIHCQLKHPSILELYNYFEDSNYVYLVLEMCHNGEMNRYLKNRVKPFSENEARHFMHQIITGMLYLHSHGILHRDLTLSNLLLTRNMNIKIADFGLATQLKMPHEKHYTLCGTPNYISPEIATRSAHGLESDVWSLGCMFYTLLIGRPPFDTDTVKNTLNKVVLADYEMPSFLSIEAKDLIHQLLRRNPADRLSLSSVLDHPFMSRNSSTKSKDLGTVEDSIDSGHATISTAITASSSTSISGSLFDKRRLLIGQPLPNKMTVFPKNKSSTDFSSSGDGNSFYTQWGNQETSNSGRGRVIQDAEERPHSRYLRRAYSSDRSGTSNSQSQAKTYTMERCHSAEMLSVSKRSGGGENEERYSPTDNNANIFNFFKEKTSSSSGSFERPDNNQALSNHLCPGKTPFPFADPTPQTETVQQWFGNLQINAHLRKTTEYDSISPNRDFQGHPDLQKDTSKNAWTDTKVKKNSDASDNAHSVKQQNTMKYMTALHSKPEIIQQECVFGSDPLSEQSKTRGMEPPWGYQNRTLRSITSPLVAHRLKPIRQKTKKAVVSILDSEEVCVELVKEYASQEYVKEVLQISSDGNTITIYYPNGGRGFPLADRPPSPTDNISRYSFDNLPEKYWRKYQYASRFVQLVRSKSPKITYFTRYAKCILMENSPGADFEVWFYDGVKIHKTEDFIQVIEKTGKSYTLKSESEVNSLKEEIKMYMDHANEGHRICLALESIISEEERKTRSAPFFPIIIGRKPGSTSSPKALSPPPSVDSNYPTRERASFNRMVMHSAASPTQAPILNPSMVTNEGLGLTTTASGTDISSNSLKDCLPKSAQLLKSVFVKNVGWATQLTSGAVWVQFNDGSQLVVQAGVSSISYTSPNGQTTRYGENEKLPDYIKQKLQCLSSILLMFSNPTPNFH

SEQ ID NO: 5863 - protein, 938 aa, Homo sapiens
MATCIGEKIEDFKVGNLLGKGSFAGVYRAESIHTGLEVAIKMLYNYFEDSNYVYLVLEMCHNGEMNRYLKNRVKPFSENEARHFMHQIITGMLYLHSHGILHRDLTLSNLLLTRNMNIKIADFGLATQLKMPHEKHYTLCGTPNYISPEIATRSAHGLESDVWSLGCMFYTLLIGRPPFDTDTVKNTLNKVVLADYEMPSFLSIEAKDLIHQLLRRNPADRLSLSSVLDHPFMSRNSSTKSKDLGTVEDSIDSGHATISTAITASSSTSISGSLFDKRRLLIGQPLPNKMTVFPKNKSSTDFSSSGDGNSFYTQWGNQETSNSGRGRVIQDAEERPHSRYLRRAYSSDRSGTSNSQSQAKTYTMERCHSAEMLSVSKRSGGGENEERYSPTDNNANIFNFFKEKTSSSSGSFERPDNNQALSNHLCPGKTPFPFADPTPQTETVQQWFGNLQINAHLRKTTEYDSISPNRDFQGHPDLQKDTSKNAWTDTKVKKNSDASDNAHSVKQQNTMKYMTALHSKPEIIQQECVFGSDPLSEQSKTRGMEPPWGYQNRTLRSITSPLVAHRLKPIRQKTKKAVVSILDSEEVCVELVKEYASQEYVKEVLQISSDGNTITIYYPNGGRGFPLADRPPSPTDNISRYSFDNLPEKYWRKYQYASRFVQLVRSKSPKITYFTRYAKCILMENSPGADFEVWFYDGVKIHKTEDFIQVIEKTGKSYTLKSESEVNSLKEEIKMYMDHANEGHRICLALESIISEEERKTRSAPFFPIIIGRKPGSTSSPKALSPPPSVDSNYPTRERASFNRMVMHSAASPTQAPILNPSMVTNEGLGLTTTASGTDISSNSLKDCLPKSAQLLKSVFVKNVGWATQLTSGAVWVQFNDGSQLVVQAGVSSISYTSPNGQTTRYGENEKLPDYIKQKLQCLSSILLMFSNPTPNFH

SEQ ID NO: 5864 - protein, 929 aa, Homo sapiens
MIDKKAMYKAGMVQRVQNEVKIHCQLKHPSILELYNYFEDSNYVYLVLEMCHNGEMNRYLKNRVKPFSENEARHFMHQIITGMLYLHSHGILHRDLTLSNLLLTRNMNIKIADFGLATQLKMPHEKHYTLCGTPNYISPEIATRSAHGLESDVWSLGCMFYTLLIGRPPFDTDTVKNTLNKVVLADYEMPSFLSIEAKDLIHQLLRRNPADRLSLSSVLDHPFMSRNSSTKSKDLGTVEDSIDSGHATISTAITASSSTSISGSLFDKRRLLIGQPLPNKMTVFPKNKSSTDFSSSGDGNSFYTQWGNQETSNSGRGRVIQDAEERPHSRYLRRAYSSDRSGTSNSQSQAKTYTMERCHSAEMLSVSKRSGGGENEERYSPTDNNANIFNFFKEKTSSSSGSFERPDNNQALSNHLCPGKTPFPFADPTPQTETVQQWFGNLQINAHLRKTTEYDSISPNRDFQGHPDLQKDTSKNAWTDTKVKKNSDASDNAHSVKQQNTMKYMTALHSKPEIIQQECVFGSDPLSEQSKTRGMEPPWGYQNRTLRSITSPLVAHRLKPIRQKTKKAVVSILDSEEVCVELVKEYASQEYVKEVLQISSDGNTITIYYPNGGRGFPLADRPPSPTDNISRYSFDNLPEKYWRKYQYASRFVQLVRSKSPKITYFTRYAKCILMENSPGADFEVWFYDGVKIHKTEDFIQVIEKTGKSYTLKSESEVNSLKEEIKMYMDHANEGHRICLALESIISEEERKTRSAPFFPIIIGRKPGSTSSPKALSPPPSVDSNYPTRERASFNRMVMHSAASPTQAPILNPSMVTNEGLGLTTTASGTDISSNSLKDCLPKSAQLLKSVFVKNVGWATQLTSGAVWVQFNDGSQLVVQAGVSSISYTSPNGQTTRYGENEKLPDYIKQKLQCLSSILLMFSNPTPNFH

SEQ ID NO: 5865 - protein, 393 aa, Homo sapiens
METTMGFMDDNATNTSTSFLSVLNPHGAHATSFPFNFSYSDYDMPLDEDEDVTNSRTFFAAKIVIGMALVGIMLVCGIGNFIFIAALVRYKKLRNLTNLLIANLAISDFLVAIVCCPFEMDYYVVRQLSWEHGHVLCTSVNYLRTVSLYVSTNALLAIAIDRYLAIVHPLRPRMKCQTATGLIALVWTVSILIAIPSAYFTTETVLVIVKSQEKIFCGQIWPVDQQLYYKSYFLFIFGIEFVGPVVTMTLCYARISRELWFKAVPGFQTEQIRKRLRCRRKTVLVLMCILTAYVLCWAPFYGFTIVRDFFPTVFVKEKHYLTAFYIVECIAMSNSMINTLCFVTVKNDTVKYFKKIMLLHWKASYNGGKSSADLDLKTIGMPATEEVDCIRLK

SEQ ID NO: 5866 - protein, 514 aa, Homo sapiens
MVEEVQKHSVHTLVFRSLKRTHDMFVADNGKPVPLDEESHKRKMAIKLRNEYGPVLHMPTSKENLKEKGPQNATDSYVHKQYPANQGQEVEYFVAGTHPYPPGPGVALTADTKIQRMPSESAAQSLAVALPLQTKADANRTAPSGSEYRHPGASDRPQPTAMNSIVMETGNTKNSALMAKKAPTMPKPQWHPPWKLYRVISGHLGWVRCIAVEPGNQWFVTGSADRTIKIWDLASGKLKLSLTGHISTVRGVIVSTRSPYLFSCGEDKQVKCWDLEYNKVIRHYHGHLSAVYGLDLHPTIDVLVTCSRDSTARIWDVRTKASVHTLSGHTNAVATVRCQAAEPQIITGSHDTTIRLWDLVAGKTRVTLTNHKKSVRAVVLHPRHYTFASGSPDNIKQWKFPDGSFIQNLSGHNAIINTLTVNSDGVLVSGADNGTMHLWDWRTGYNFQRVHAAVQPGSLDSESGIFACAFDQSESRLLTAEADKTIKVYREDDTATEETHPVSWKPEIIKRKRF

SEQ ID NO: 5867 - protein, 505 aa, Homo sapiens
MVEEVQKHSVHTLVFRSLKRTHDMFVADNGKPVPLDEESHKRKMAIKLRNEYGPVLHMPTSKENLKEKGPQNATDSYVHKQYPANQGQEVEYFVAGVALTADTKIQRMPSESAAQSLAVALPLQTKADANRTAPSGSEYRHPGASDRPQPTAMNSIVMETGNTKNSALMAKKAPTMPKPQWHPPWKLYRVISGHLGWVRCIAVEPGNQWFVTGSADRTIKIWDLASGKLKLSLTGHISTVRGVIVSTRSPYLFSCGEDKQVKCWDLEYNKVIRHYHGHLSAVYGLDLHPTIDVLVTCSRDSTARIWDVRTKASVHTLSGHTNAVATVRCQAAEPQIITGSHDTTIRLWDLVAGKTRVTLTNHKKSVRAVVLHPRHYTFASGSPDNIKQWKFPDGSFIQNLSGHNAIINTLTVNSDGVLVSGADNGTMHLWDWRTGYNFQRVHAAVQPGSLDSESGIFACAFDQSESRLLTAEADKTIKVYREDDTATEETHPVSWKPEIIKRKRF

SEQ ID NO: 5868 - protein, 305 aa, Homo sapiens
MLAVRKARRKLRMGTICSPNPSGTKTSSEVCNADWMASLPPHLHNLPLSNLAIPGSHDSFSYWVDEKSPVGPDQTQAIKRLARISLVKKLMKKWSVTQNLTFREQLEAGIRYFDLRVSSKPGDADQEIYFIHGLFGIKVWDGLMEIDSFLTQHPQEIIFLDFNHFYAMDETHHKCLVLRIQEAFGNKLCPACSVESLTLRTLWEKNCQVLIFYHCPFYKQYPFLWPGKKIPAPWANTTSVRKLILFLETTLSERASRGSFHVSQAILTPRVKTIARGLVGGLKNTLVHSNRWNSHGPSLLSQERS

SEQ ID NO: 5869 - protein, 304 aa, Homo sapiens
MLAVRKARRKLRMGTICSPNPSGTKTSSEVCNADWMASLPPHLHNLPLSNLAIPGSHDSFSYWVDEKSPVGPDQTQAIKRLARISLVKKLMKKWSVTQNLTFREQLEAGIRYFDLRVSSKPGDADQEIYFIHGLFGIKVWDGLMEIDSFLTQHPQEIIFLDFNHFYAMDETHHKCLVLRIQEAFGNKLCPACSVESLTLRTLWEKNCQVLIFYHCPFYKQYPFLWPGKKIPAPWANTTSVRKLILFLETTLSERASRGSFHVSQAILTPRVKTIARGLVGGLKNTLVHRLALIPVYPLRFSRRS

SEQ ID NO: 5870 - protein, 718 aa, Homo sapiens
MISTKEKNKIPKDSMTLLPCFYFVELPIVASSIVSLYFLELTDLFKPAKVGFQCYDRTLSMPYVETNEELIPLLMLLSLAFAAPAASIMVAEGMLYCLQSRLWGRAGGPAGAEGSINAGGCNFNSFLRRTVRFVGVHVFGLCATALVTDVIQLATGYHTPFFLTVCKPNYTLLGTSCEVNPYITQDICSGHDIHAILSARKTFPSQHATLSAFAAVYVSMYFNSVISDTTKLLKPILVFAFAIAAGVCGLTQITQYRSHPVDVYAGFLIGAGIAAYLACHAVGNFQAPPAEKPAAPAPAKDALRALTQRGHDSVYQQNKSVSTDELGPPGRLEGAPRPVAREKTSLGSLKRASVDVDLLAPRSPMAKENMVTFSHTLPRASAPSLDDPARRHMTIHVPLDASRSKQLISEWKQKSLEGRGLGLPDDASPGHLRAPAEPMAEEEEEEEDEEEEEEEEEEEDEGPAPPSLYPTVQARPGLGPRVILPPRAGPPPLVHIPEEGAQTGAGLSPKSGAGVRAKWLMMAEKSGAAVANPPRLLQVIAMSKAPGAPGPKAAETASSSSASSDSSQYRSPSDRDSASIVTIDAHAPHHPVVHLSAGGAPWEWKAAGGGAKAEADGGYELGDLARGFRGGAKPPGVSPGSSVSDVDQEEPRFGAVATVNLATGEGLPPLGAADGALGPGSRESTLRRHAGGLGLAEREAEAEAEGYFRKMQARRFPD

SEQ ID NO: 5871 - protein, 719 aa, Homo sapiens
MISTKEKNKIPKDSMTLLPCFYFVELPIVASSIVSLYFLELTDLFKPAKVGFQCYDRTLSMPYVETNEELIPLLMLLSLAFAAPAASIMVAEGMLYCLQSRLWGRAGGPAGAEGSINAGGCNFNSFLRRTVRFVGGVHVFGLCATALVTDVIQLATGYHTPFFLTVCKPNYTLLGTSCEVNPYITQDICSGHDIHAILSARKTFPSQHATLSAFAAVYVSMYFNSVISDTTKLLKPILVFAFAIAAGVCGLTQITQYRSHPVDVYAGFLIGAGIAAYLACHAVGNFQAPPAEKPAAPAPAKDALRALTQRGHDSVYQQNKSVSTDELGPPGRLEGAPRPVAREKTSLGSLKRASVDVDLLAPRSPMAKENMVTFSHTLPRASAPSLDDPARRHMTIHVPLDASRSKQLISEWKQKSLEGRGLGLPDDASPGHLRAPAEPMAEEEEEEEDEEEEEEEEEEEDEGPAPPSLYPTVQARPGLGPRVILPPRAGPPPLVHIPEEGAQTGAGLSPKSGAGVRAKWLMMAEKSGAAVANPPRLLQVIAMSKAPGAPGPKAAETASSSSASSDSSQYRSPSDRDSASIVTIDAHAPHHPVVHLSAGGAPWEWKAAGGGAKAEADGGYELGDLARGFRGGAKPPGVSPGSSVSDVDQEEPRFGAVATVNLATGEGLPPLGAADGALGPGSRESTLRRHAGGLGLAEREAEAEAEGYFRKMQARRFPD

SEQ ID NO: 5872 - protein, 746 aa, Homo sapiens
MISTKEKNKIPKDSMTLLPCFYFVELPIVASSIVSLYFLELTDLFKPAKVGFQCYDRTLSMPYVETNEELIPLLMLLSLAFAAPAASIMVAEGMLYCLQSRLWGRAGGPAGAEGSINAGGCNFNSFLRRTVRFVGVHVFGLCATALVTDVIQLATGYHTPFFLTVCKPNYTLLGTSCEVNPYITQDICSGHDIHAILSARKTFPSQHATLSAFAAVYVSVSPAPHCPSQALLLTRGEPSLTPTPMPQMYFNSVISDTTKLLKPILVFAFAIAAGVCGLTQITQYRSHPVDVYAGFLIGAGIAAYLACHAVGNFQAPPAEKPAAPAPAKDALRALTQRGHDSVYQQNKSVSTDELGPPGRLEGAPRPVAREKTSLGSLKRASVDVDLLAPRSPMAKENMVTFSHTLPRASAPSLDDPARRHMTIHVPLDASRSKQLISEWKQKSLEGRGLGLPDDASPGHLRAPAEPMAEEEEEEEDEEEEEEEEEEEDEGPAPPSLYPTVQARPGLGPRVILPPRAGPPPLVHIPEEGAQTGAGLSPKSGAGVRAKWLMMAEKSGAAVANPPRLLQVIAMSKAPGAPGPKAAETASSSSASSDSSQYRSPSDRDSASIVTIDAHAPHHPVVHLSAGGAPWEWKAAGGGAKAEADGGYELGDLARGFRGGAKPPGVSPGSSVSDVDQEEPRFGAVATVNLATGEGLPPLGAADGALGPGSRESTLRRHAGGLGLAEREAEAEAEGYFRKMQARRFPD

SEQ ID NO: 5873 - protein, 326 aa, Homo sapiens
MTIHVPLDASRSKQLISEWKQKSLEGRGLGLPDDASPGHLRAPAEPMAEEEEEEEDEEEEEEEEEEEDEGPAPPSLYPTVQARPGLGPRVILPPRAGPPPLVHIPEEGAQTGAGLSPKSGAGVRAKWLMMAEKSGAAVANPPRLLQVIAMSKAPGAPGPKAAETASSSSASSDSSQYRSPSDRDSASIVTIDAHAPHHPVVHLSAGGAPWEWKAAGGGAKAEADGGYELGDLARGFRGGAKPPGVSPGSSVSDVDQEEPRFGAVATVNLATGEGLPPLGAADGALGPGSRESTLRRHAGGLGLAEREAEAEAEGYFRKMQARRFPD

SEQ ID NO: 5874 - protein, 422 aa, Homo sapiens
MYRVPEFYARRKRLGGQTPYLMDQLGLRLGMWYWKDETRTLEFRRFAAEDSVQWLLKHHPHFTPAAEVKEKGKKGKAVHFAETDGPASDRLTDKRLAAKDDKSAKAVEKRGQQGTITLDDVKFVTLLLLQDTEMQRICSFTTFMRNKNLDNFLMALLYYLSHYLEKNSLEKKPKSYMVGLVEKKEMELVLSELEAAQRYLAQKYCILVLGLAVPDKHHMCCGKEKISDTQKDWKFFESFYTFCTYVAWIVFRRQHLTEIEEEVGRLFRTNMFNIPRRRREDEESGGEKKRMTFVQFRRMMAKRPAIKKAINMRSPVMSTLLPSLREKAQNVFEKKYHQVDVRFPAEMQKHVGTLDSVPMPVVGILGEPRCLFNPHTLHPLDPEENTKSFGRYPSLMENNNMRIQDTLDLVMKTLSSHTSCPK

SEQ ID NO: 5875 - protein, 336 aa, Homo sapiens
MSQAVQTNGTQPLSKTWELSLYELQRTPQEAITDGLEIVVSPRSLHSELMCPICLDMLKNTMTTKECLHRFCADCIITALRSGNKECPTCRKKLVSKRSLRPDPNFDALISKIYPSRDEYEAHQERVLARINKHNNQQALSHSIEEGLKIQAMNRLQRGKKQQIENGSGAEDNGDSSHCSNASTHSNQEAGPSNKRTKTSDDSGLELDNNNAAMAIDPVMDGASEIELVFRPHPTLMEKDDSAQTRYIKTSGNATVDHLSKYLAVRLALEELRSKGESNQMNLDTASEKQYTIYIATASGQFTVLNGSFSLELVSEKYWKVNKPMELYYAPTKEHK

SEQ ID NO: 5876 - protein, 264 aa, Homo sapiens
MSQAVQTNGTQPLSKTWELSLYELQRTPQEAITDGLEIVVSPRSLHSELMCPICLDMLKNTMTTKECLHRFCADCIITALRSGLQRGKKQQIENGSGAEDNGDSSHCSNASTHSNQEAGPSNKRTKTSDDSGLELDNNNAAMAIDPVMDGASEIELVFRPHPTLMEKDDSAQTRYIKTSGNATVDHLSKYLAVRLALEELRSKGESNQMNLDTASEKQYTIYIATASGQFTVLNGSFSLELVSEKYWKVNKPMELYYAPTKEHK

SEQ ID NO: 5877 - protein, 246 aa, Homo sapiens
MSRGSSAGFDRHITIFSPEGRLYQVEYAFKAINQGGLTSVAVRGKDCAVIVTQKKVPDKLLDSSTVTHLFKITENIGCVMTGMTADSRSQVQRARYEAANWKYKYGYEIPVDMLCKRIADISQVYTQNAEMRPLGCCMILIGIDEEQGPQVYKCDPAGYYCGFKATAAGVKQTESTSFLEKKVKKKFDWTFEQTVETAITCLSTVLSIDFKPSEIEVGVVTVENPKFRILTEAEIDAHLVALAERD

SEQ ID NO: 5878 - protein, 227 aa, Homo sapiens
MAGLRREYAFKAINQGGLTSVAVRGKDCAVIVTQKKVPDKLLDSSTVTHLFKITENIGCVMTGMTADSRSQVQRARYEAANWKYKYGYEIPVDMLCKRIADISQVYTQNAEMRPLGCCMILIGIDEEQGPQVYKCDPAGYYCGFKATAAGVKQTESTSFLEKKVKKKFDWTFEQTVETAITCLSTVLSIDFKPSEIEVGVVTVENPKFRILTEAEIDAHLVALAERD

SEQ ID NO: 5879 - protein, 167 aa, Homo sapiens
MTGMTADSRSQVQRARYEAANWKYKYGYEIPVDMLCKRIADISQVYTQNAEMRPLGCCMILIGIDEEQGPQVYKCDPAGYYCGFKATAAGVKQTESTSFLEKKVKKKFDWTFEQTVETAITCLSTVLSIDFKPSEIEVGVVTVENPKFRILTEAEIDAHLVALAERD

SEQ ID NO: 5880 - protein, 950 aa, Homo sapiens
MADLSLLQEDLQEDADGFGVDDYSSESDVIIIPSALDFVSQDEMLTPLGRLDKYAASENIFNRQMVARSLLDTLREVCDDERDCIAVLERISRLADDSEPTVRAELMEQVPHIALFCQENRPSIPYAFSKFLLPIVVRYLADQNNQVRKTSQAALLALLEQELIERFDVETKVCPVLIELTAPDSNDDVKTEAVAIMCKMAPMVGKDITERLILPRFCEMCCDCRMFHVRKVCAANFGDICSVVGQQATEEMLLPRFFQLCSDNVWGVRKACAECFMAVSCATCQEIRRTKLSALFINLISDPSRWVRQAAFQSLGPFISTFANPSSSGQYFKEESKSSEEMSVENKNRTRDQEAPEDVQVRPEDTPSDLSVSNSSVILENTMEDHAAEASGKPLGEISVPLDSSLLCTLSSESHQEAASNENDKKPGNYKSMLRPEVGTTSQDSALLDQELYNSFHFWRTPLPEIDLDIELEQNSGGKPSPEGPEEESEGPVPSSPNITMATRKELEEMIENLEPHIDDPDVKAQVEVLSAALRASSLDAHEETISIEKRSDLQDELDINELPNCKINQEDSVPLISDAVENMDSTLHYIHSDSDLSNNSSFSPDEERRTKVQDVVPQALLDQYLSMTDPSRAQTVDTEIAKHCAYSLPGVALTLGRQNWHCLRETYETLASDMQWKVRRTLAFSIHELAVILGDQLTAADLVPIFNGFLKDLDEVRIGVLKHLHDFLKLLHIDKRREYLYQLQEFLVTDNSRNWRFRAELAEQLILLLELYSPRDVYDYLRPIALNLCADKVSSVRWISYKLVSEMVKKLHAATPPTFGVDLINELVENFGRCPKWSGRQAFVFVCQTVIEDDCLPMDQFAVHLMPHLLTLANDRVPNVRVLLAKTLRQTLLEKDYFLASASCHQEAVEQTIMALQMDRDSDVKYFASIHPASTKISEDAMSTASSTY

SEQ ID NO: 5881 - protein, 933 aa, Homo sapiens
MADLSLLQEDLQEDADGSLDFVSQDEMLTPLGRLDKYAASENIFNRQMVARSLLDTLREVCDDERDCIAVLERISRLADDSEPTVRAELMEQVPHIALFCQENRPSIPYAFSKFLLPIVVRYLADQNNQVRKTSQAALLALLEQELIERFDVETKVCPVLIELTAPDSNDDVKTEAVAIMCKMAPMVGKDITERLILPRFCEMCCDCRMFHVRKVCAANFGDICSVVGQQATEEMLLPRFFQLCSDNVWGVRKACAECFMAVSCATCQEIRRTKLSALFINLISDPSRWVRQAAFQSLGPFISTFANPSSSGQYFKEESKSSEEMSVENKNRTRDQEAPEDVQVRPEDTPSDLSVSNSSVILENTMEDHAAEASGKPLGEISVPLDSSLLCTLSSESHQEAASNENDKKPGNYKSMLRPEVGTTSQDSALLDQELYNSFHFWRTPLPEIDLDIELEQNSGGKPSPEGPEEESEGPVPSSPNITMATRKELEEMIENLEPHIDDPDVKAQVEVLSAALRASSLDAHEETISIEKRSDLQDELDINELPNCKINQEDSVPLISDAVENMDSTLHYIHSDSDLSNNSSFSPDEERRTKVQDVVPQALLDQYLSMTDPSRAQTVDTEIAKHCAYSLPGVALTLGRQNWHCLRETYETLASDMQWKVRRTLAFSIHELAVILGDQLTAADLVPIFNGFLKDLDEVRIGVLKHLHDFLKLLHIDKRREYLYQLQEFLVTDNSRNWRFRAELAEQLILLLELYSPRDVYDYLRPIALNLCADKVSSVRWISYKLVSEMVKKLHAATPPTFGVDLINELVENFGRCPKWSGRQAFVFVCQTVIEDDCLPMDQFAVHLMPHLLTLANDRVPNVRVLLAKTLRQTLLEKDYFLASASCHQEAVEQTIMALQMDRDSDVKYFASIHPASTKISEDAMSTASSTY

SEQ ID NO: 5882 - protein, 419 aa, Homo sapiens
MGPLSAPPCTQHITWKGLLLTASLLNFWNPPTTAQVTIEAQPPKVSEGKDVLLLVHNLPQNLTGYIWYKGQIRDLYHYVTSYIVDGQIIKYGPAYSGRETVYSNASLLIQNVTQEDTGSYTLHIIKRGDGTGGVTGRFTFTLYLETPKPSISSSNFNPREATEAVILTCDPETPDASYLWWMNGQSLPMTHSLQLSETNRTLYLFGVTNYTAGPYECEIRNPVSASRSDPVTLNLLPKLPKPYITINNLNPRENKDVSTFTCEPKSENYTYIWWLNGQSLPVSPRVKRRIENRILILPSVTRNETGPYQCEIRDRYGGIRSDPVTLNVLYGPDLPRIYPSFTYYHSGQNLYLSCFADSNPPAQYSWTINGKFQLSGQKLSIPQITTKHSGLYACSVRNSATGKESSKSVTVRVSDWTLP

SEQ ID NO: 5883 - protein, 115 aa, Homo sapiens [sequence omitted]

SEQ ID NO: 5884 - protein, 115 aa, Homo sapiens
MRYVASYLLAALGGNSSPSAKDIKKILDSVGIEADDDRLNKVISELNGKNIEDVIAQGIGKLASVPAGGAVAVSAAPGSAAPAAGSAPAAAEEKKDEKKEESEESDDDMGFGLFD

SEQ ID NO: 5885 - protein, 972 aa, Homo sapiens
MRPEGAGMELGGGEERLPEESRREHWQLLGNLKTTVEGLVSTNSPNVWSKYGGLERLCRDMQSILYHGLIRDQACRRQTDYWQFVKDIRWLSPHSALHVEKFISVHENDQSSADGASERAVAELWLQHSLQYHCLSAQLRPLLGDRQYIRKFYTDAAFLLSDAHVTAMLQCLEAVEQNNPRLLAQIDASMFARKHESPLLVTKSQSLTALPSSTYTPPNSYAQHSYFGSFSSLHQSVPNNGSERRSTSFPLSGPPRKPQESRGHVSPAEDQTIQAPPVSVSALARDSPLTPNEMSSSTLTSPIEASWVSSQNDSPGDASEGPEYLAIGNLDPRGRTASCQSHSSNAESSSSNLFSSSSSQKPDSAASSLGDQEGGGESQLSSVLRRSSFSEGQTLTVTSGAKKSHIRSHSDTSIASRGAPESCNDKAKLRGPLPYSGQSSEVSTPSSLYMEYEGGRYLCSGEGMFRRPSEGQSLISYLSEQDFGSCADLEKENAHFSISESLIAAIELMKCNMMSQCLEEEEVEEEDSDREIQELKQKIRLRRQQIRTKNLLPMYQEAEHGSFRVTSSSSQFSSRDSAQLSDSGSADEVDEFEIQDADIRRNTASSSKSFVSSQSFSHCFLHSTSAEAVAMGLLKQFEGMQLPAASELEWLVPEHDAPQKLLPIPDSLPISPDDGQHADIYKLRIRVRGNLEWAPPRPQIIFNVHPAPTRKIAVAKQNYRCAGCGIRTDPDYIKRLRYCEYLGKYFCQCCHENAQMAIPSRVLRKWDFSKYYVSNFSKDLLIKIWNDPLFNVQDINSALYRKVKLLNQVRLLRVQLCHMKNMFKTCRLAKELLDSFDTVPGHLTEDLHLYSLNDLTATRKGELGPRLAELTRAGATHVERCMLCQAKGFICEFCQNEDDIIFPFELHKCRTCEECKACYHKACFKSGSCPRCERLQARREALARQSLESYLSDYEEEPAEALALEAAVLEAT

SEQ ID NO: 5886 - protein, 927 aa, Homo sapiens
MQSILYHGLIRDQACRRQTDYWQFVKDIRWLSPHSALHVEKFISVHENDQSSADGASERAVAELWLQHSLQYHCLSAQLRPLLGDRQYIRKFYTDAAFLLSDAHVTAMLQCLEAVEQNNPRLLAQIDASMFARKHESPLLVTKSQSLTALPSSTYTPPNSYAQHSYFGSFSSLHQSVPNNGSERRSTSFPLSGPPRKPQESRGHVSPAEDQTIQAPPVSVSALARDSPLTPNEMSSSTLTSPIEASWVSSQNDSPGDASEGPEYLAIGNLDPRGRTASCQSHSSNAESSSSNLFSSSSSQKPDSAASSLGDQEGGGESQLSSVLRRSSFSEGQTLTVTSGAKKSHIRSHSDTSIASRGAPGGPRNITIIVEDPIAESCNDKAKLRGPLPYSGQSSEVSTPSSLYMEYEGGRYLCSGEGMFRRPSEGQSLISYLSEQDFGSCADLEKENAHFSISESLIAAIELMKCNMMSQCLEEEEVEEEDSDREIQELKQKIRLRRQQIRTKNLLPMYQEAEHGSFRVTSSSSQFSSRDSAQLSDSGSADEVDEFEIQDADIRRNTASSSKSFVSSQSFSHCFLHSTSAEAVAMGLLKQFEGMQLPAASELEWLVPEHDAPQKLLPIPDSLPISPDDGQHADIYKLRIRVRGNLEWAPPRPQIIFNVHPAPTRKIAVAKQNYRCAGCGIRTDPDYIKRLRYCEYLGKYFCQCCHENAQMAIPSRVLRKWDFSKYYVSNFSKDLLIKIWNDPLFNVQDINSALYRKVKLLNQVRLLRVQLCHMKNMFKTCRLAKELLDSFDTVPGHLTEDLHLYSLNDLTATRKGELGPRLAELTRAGATHVERCMLCQAKGFICEFCQNEDDIIFPFELHKCRTCEECKACYHKACFKSGSCPRCERLQARREALARQSLESYLSDYEEEPAEALALEAAVLEAT

SEQ ID NO: 5887 - protein, 921 aa, Homo sapiens
MRPEGAGMELGGGEERLPEESRREHWQLLGNLKTTVEGLVSTNSPNVWSKYGGLERLCRDMQSILYHGLIRDQACRRQTDYWQFVKDIRWLSPHSALHVEKFISVHENDQSSADGASERAVAELWLQHSLQYHCLSAQLRPLLGDRQYIRKFYTDAAFLLSDAHVTAMLQCLEAVEQNNPRLLAQIDASMFARKHESPLLVTKSQSLTALPSSTYTPPNSYAQHSYFGSFSSLHQSVPNNGSERRSTSFPLSGPPRKPQESRGHVSPAEDQTIQAPPVSVSALARDSPLTPNEMSSSTLTSPIEASWVSSQNDSPGDASEGPEYLAIGNLDPRGRTASCQSHSSNAESSSSNLFSSSSSQKPDSAASSLGDQEGGGESQLSSVLRRSSFSEGQTLTVTSGAKKSHIRSHSDTSIASRGAPESCNDKAKLRGPLPYSGQSSEVSTPSSLYMEYEGGRYLCSGEGMFRRPSEGQSLISYLSEQDFGSCADLEKENAHFSISESLIAAIELMKCNMMSQCLEEEEVEEEDSDREIQELKQKIRLRRQQIRTKNLLPMYQEAEHGSFRVTSSSSQFSSRDSAQLSDSGSADEVDEFEIQDGSEGSNLTHISKNGLSVSLASMFSDADIRRNTASSSKSFVSSQSFSHCFLHSTSAEAVAMGLLKQFEGMQLPAASELEWLVPEHDAPQKLLPIPDSLPISPDDGQHADIYKLRIRVRGNLEWAPPRPQIIFNVHPAPTRKIAVAKQNYRCAGCGIRTDPDYIKRLRYCEYLGKYFCQCCHENAQMAIPSRVLRKWDFSKYYVSNFSKDLLIKIWNDPLFNVQDINSALYRKVKLLNQVRLLRVQLCHMKNMFKTCRLAKELLDSFDTVPGHLTEDLHLYSLNDLTATRKGELGPRLAELTRAGATHVERCMVRKSHCSMQLSPCF

SEQ ID NO: 5888 - protein, 309 aa, Homo sapiens
MAMVERPRPEWASYHNCNSNSCQDLGNSVLLLLGLIICINISINIVTLLWSRFRGVLYQVFHDTICEKEAPKSSLLRKQTQPPKKQSSPAVHLRCTMDPVMMTVSPPPAHRHRRRGSPTRCAHCPVAWAPDTDDEKPHQYPAICSYHWDVPEDWEGFQHTQGTWVPWSQDAPESPPQTIRFQPTVEERPLKTGIWSELGLRAYVYPVNPPPPSPEAPSHKNGGEGAVPEAEAAQYQPVPAPTLGPAVIPEFSRHRSSGRIVYDARDMRRRLRELTREVEALSGCYPLASGSSTAEETSKNWVYRSLTGR

SEQ ID NO: 5889 - protein, 564 aa, Homo sapiens
MLRTTRGPGLGPPLLQAALGLGRAGWHWPAGRAASGGRGRAWLQPTGRETGVQVYNSLTGRKEPLIVAHAEAASWYSCGPTVYDHAHLGHACSYVRFDIIRRILTKVFGCSIVMVMGITDVDDKIIKRANEMNISPASLASLYEEDFKQDMAALKVLPPTVYLRVTENIPQIISFIEGIIARGNAYSTAKGNVYFDLKSRGDKYGKLVGVVPGPVGEPADSDKRHASDFALWKAAKPQEVFWASPWGPGRPGWHIECSAIASMVFGSQLDIHSGGIDLAFPHHENEIAQCEVFHQCEQWGNYFLHSGHLHAKGKEEKMSKSLKNYITIKDFLKTFSPDVFRFFCLRSSYRSAIDYSDSAMLQAQQLLLGLGSFLEDARAYMKGQLACGSVREAMLWERLSSTKRAVKAALADDFDTPRVVDAILGLAHHGNGQLRASLKEPEGPRSPAVFGAIISYFEQFFETVGISLANQQYVSGDGSEATLHGVVDELVRFRQKVRQFALAMPEATGDARRQQLLERQPLLEACDTLRRGLTAHGINIKDRSSTTSTWELLDQRTKDQKSAG

SEQ ID NO: 5890 - protein, 129 aa, Homo sapiens
MLLKVRRASLKPPATPHQGAFRAGNVIGQLIYLLTWSLFTAWLRPPTLLQGPRTSPQGSPPRSPWGDCAEPSCLCEMKIRRRRHEGPAWGQSGFLAGGLHLVPSSLSLAACGVVRMKGLWGRGAGIRGR

SEQ ID NO: 5891 - protein, 338 aa, Homo sapiens
MTTTLVSATIFDLSEVLCKGNKMLNYSAPSAGGCLLDRKAVGTPAGGGFPRRHSVTLPSSKFHQNQLLSSLKGEPAPALSSRDSRFRDRSFSEGGERLLPTQKQPGGGQVNSSRYKTELCRPFEENGACKYGDKCQFAHGIHELRSLTRHPKYKTELCRTFHTIGFCPYGPRCHFIHNAEERRALAGARDLSADRPRLQHSFSFAGFPSAAATAAATGLLDSPTSITPPPILSADDLLGSPTLPDGTNNPFAFSSQELASLFAPSMGLPGGGSPTTFLFRPMSESPHMFDSPPSPQDSLSDQEGYLSSSSSSHSGSDSPTLDNSRRLPIFSRLSISDD

SEQ ID NO: 5892 - protein, 693 aa, Homo sapiens
MDRPDEGPPAKTRRLSSSESPQRDPPPPPPPPPLLRLPLPPPQQRPRLQEETEAAQVLADMRGVGLGPALPPPPPYVILEEGGIRAYFTLGAECPGWDSTIESGYGEAPPPTESLEALPTPEASGGSLEIDFQVVQSSSFGGEGALETCSAVGWAPQRLVDPKSKEEAIIIVEDEDEDERESMRSSRRRRRRRRRKQRKVKRESRERNAERMESILQALEDIQLDLEAVNIKAGKAFLRLKRKFIQMRRPFLERRDLIIQHIPGFWVKAFLNHPRISILINRRDEDIFRYLTNLQVQDLRHISMGYKMKLYFQTNPYFTNMVIVKEFQRNRSGRLVSHSTPIRWHRGQEPQARRHGNQDASHSFFSWFSNHSLPEADRIAEIIKNDLWVNPLRYYLRERGSRIKRKKQEMKKRKTRGRCEVVIMEDAPDYYAVEDIFSEISDIDETIHDIKISDFMETTDYFETTDNEITDINENICDSENPDHNEVPNNETTDNNESADDHETTDNNESADDNNENPEDNNKNTDDNEENPNNNENTYGNNFFKGGFWGSHGNNQDSSDSDNEADEASDDEDNDGNEGDNEGSDDDGNEGDNEGSDDDDRDIEYYEKVIEDFDKDQADYEDVIEIISDESVEEEGIEEGIQQDEDIYEEGNYEEEGSEDVWEEGEDSDDSDLEDVLQVPNGWANPGKRGKTG

SEQ ID NO: 5893 - protein, 1320 aa, Homo sapiens
MSSNDSSLMAGIIYYSQEKYFHHVQQAAAVGLEKFSNDPVLKFFKAYGVLKEEHIQDAISDLESIRHHPDVSLCSTMALIYAHKRCEIIDREAIQELEYSLKEIRKTVSGTALYYAGLFLWLIGRHDKAKEYIDRMLKISRGFREAYVLRGWVDLTSDKPHTAKKAIEYLEQGIQDTKDVLGLMGKAMYFMMQQNYSEALEVVNQITVTSGSFLPALVLKMQLFLARQDWEQTVEMGHRILEKDESNIDACQILTVHELAREGNMTTVSSLKTQKATNHVRNLIKALETREPENPSLHLKKIIVVSRLCGSHQVILGLVCSFIERTFMATPSYVHVATELGYLFILKNQVKEALLWYSEAMKLDKDGMAGLTGIILCHILEGHLEEAEYRLEFLKEVQKSLGKSEVLIFLQALLMSRKHKGEEETTALLKEAVELHFSSMQGIPLGSEYFEKLDPYFLVCIAKEYLLFCPKQPRLPGQIVSPLLKQVAVILNPVVKAAPALIDPLYLMAQVRYYSELENAQSILQRCLELDPASVDAHLLMCQIYLAQGNFGMCFHCLELGVSHNFQVRDHPLYHLIKARALNKAGDYPEAIKTLKMVIKLPALKKEEGRKFLRPSVQPSQRASILLELVEALRLNGELHEATKVMQDTINEFGGTPEENRITIANVDLVLSKGNVDVALNMLRNILPKQSCYMEAREKMANIYLQTLRDRRLYIRCYRELCEHLPGPHTSLLLGDALMSILEPEKALEVYDEAYRQNPHDASLASRIGHAYVKAHQYTEAIEYYEAAQKINGQDFLCCDLGKLLLKLKKVNKAEKVLKQALEHDIVQDIPSMMNDVKCLLLLAKVYKSHKKEAVIETLNKALDLQSRILKRVPLEQPEMIPSQKQLAASICIQFAEHYLAEKEYDKAVQSYKDVFSYLPTDNKVMLELAQLYLLQGHLDLCEQHCAILLQTEQNHETASVLMADLMFRKQKHEAAINLYHQVLEKAPDNFLVLHKLIDLLRRSGKLEDIPAFFELAKKVSSRVPLEPGFNYCRGIYCWHIGQPNEALKFLNKARKDSTWGQSAIYHMVQICLNPDNEVVGGEAFENQGAESNYMEKKELEQQGVSTAEKLLREFYPHSDSSQTQLRLLQGLCRLATREKANMEAALGSFIQIAQAEKDSVPALLALAQAYVFLKQIPKARMQLKRLAKTPWVLSEAEDLEKSWLLLADIYCQGSKFDLALELLRRCVQYNKSCYKAYEYMGFIMEKEQSYKDAVTNYKLAWKYSHHANPAIGFKLAFNYLKDKKFVEAIEICNDVLREHPDYPKIREEILEKARRSLRP

SEQ ID NO: 5894 - protein, 441 aa, Homo sapiens
MIPSQKQLAASICIQFAEHYLAEKEYDKAVQSYKDVFSYLPTDNKVMLELAQLYLLQGHLDLCEQHCAILLQTEQNHETASVLMADLMFRKQKHEAAINLYHQVLEKAPDNFLVLHKLIDLLRRSGKLEDIPAFFELAKKVSSRVPLEPGFNYCRGIYCWHIGQPNEALKFLNKARKDSTWGQSAIYHMVQICLNPDNEVVGGEAFENQGAESNYMEKKELEQQGVSTAEKLLREFYPHSDSSQTQLRLLQGLCRLATREKANMEAALGSFIQIAQAEKDSVPALLALAQAYVFLKQIPKARMQLKRLAKTPWVLSEAEDLEKSWLLLADIYCQGSKFDLALELLRRCVQYNKSCYKAYEYMGFIMEKEQSYKDAVTNYKLAWKYSHHANPAIGFKLAFNYLKDKKFVEAIEICNDVLREHPDYPKIREEILEKARRSLRP

SEQ ID NO: 5895 - protein, 1302 aa, Homo sapiens
MSSNDSSLMAGIIYYSQEKYFHHVQQAAAVGLEKFSNDPVLKFFKAYGVLKEEHIQDAISDLESIRHHPDVSLCSTMALIYAHKRCEIIDREAIQELEYSLKEIRKTVSGTALYYAGLFLWLIGRHDKAKEYIDRMLKISRGFREAYVLRGWVDLTSDKPHTAKKAIEYLEQGIQDTKDVLGLMGKAMYFMMQQNYSEALEVVNQITVTSGSFLPALVLKMQLFLARQDWEQTVEMGHRILEKDESNIDACQILTVHELAREGNMTTATNHVRNLIKALETREPENPSLHLKKIIVVSRLCGSHQVILGLVCSFIERTFMATPSYVHVATELGYLFILKNQVKEALLWYSEAMKLDKDGMAGLTGIILCHILEGHLEVQKSLGKSEVLIFLQALLMSRKHKGEEETTALLKEAVELHFSSMQGIPLGSEYFEKLDPYFLVCIAKEYLLFCPKQPRLPGQIVSPLLKQVAVILNPVVKAAPALIDPLYLMAQVRYYSGELENAQSILQRCLELDPASVDAHLLMCQIYLAQGNFGMCFHCLELGVSHNFQVRDHPLYHLIKARALNKAGDYPEAIKTLKMVIKLPALKKEEGRKFLRPSVQPSQRASILLELVEALRLNGELHEATKVMQDTINEFGGTPEENRITIANVDLVLSKGNVDVALNMLRNILPKQSCYMEAREKMANIYLQTLRDRRLYIRCYRELCEHLPGPHTSLLLGDALMSILEPEKALEVYDEAYRQNPHDASLASRIGHAYVKAHQYTEAIEYYEAAQKINGQDFLCCDLGKLLLKLKKVNKAEKVLKQALEHDIVQDIPSMMNDVKCLLLLAKVYKSHKKEAVIETLNKALDLQSRILKRVPLEQPEMIPSQKQLAASICIQFAEHYLAEKEYDKAVQSYKDVFSYLPTDNKVMLELAQLYLLQGHLDLCEQHCAILLQTEQNHETASVLMADLMFRKQKHEAAINLYHQVLEKAPDNFLVLHKLIDLLRRSGKLEDIPAFFELAKKVSSRVPLEPGFNYCRGIYCWHIGQPNEALKFLNKARKDSTWGQSAIYHMVQICLNPDNEVVGGEAFENQGAESNYMEKKELEQQGVSTAEKLLREFYPHSDSSQTQLRLLQGLCRLATREKANMEAALGSFIQIAQAEKDSVPALLALAQAYVFLKQIPKARMQLKRLAKTPWVLSEAEDLEKSWLLLADIYCQGSKFDLALELLRRCVQYNKSCYKAYEYMGFIMEKEQSYKDAVTNYKLAWKYSHHANPAIGFKLAFNYLKDKKFVEAIEICNDVLREHPDYPKIREEILEKARRSLRP

SEQ ID NO: 5896 - protein, 1272 aa, Homo sapiens
MSSNDSSLMAGIIYYSQEKYFHHVQQAAAVGLEKFSNDPVLKFFKAYGVLKEEHIQDAISDLESIRHHPDVSLCSTMALIYAHKRCEIIDREAIQELEYSLKEIRKTVSGTALYYAGLFLWLIGRHDKAKEYIDRMLKISRGFREAMYFMMQQNYSEALEVVNQITVTSGSFLPALVLKMQLFLARQDWEQTVEMGHRILEKDESNIDACQILTVHELAREGNMTTATNHVRNLIKALETREPENPSLHLKKIIVVSRLCGSHQVILGLVCSFIERTFMATPSYVHVATELGYLFILKNQVKEALLWYSEAMKLDKDGMAGLTGIILCHILEGHLEEAEYRLEFLKEVQKSLGKSEVLIFLQALLMSRKHKGEEETTALLKEAVELHFSSMQGIPLGSEYFEKLDPYFLVCIAKEYLLFCPKQPRLPGQIVSPLLKQVAVILNPVVKAAPALIDPLYLMAQVRYYSGELENAQSILQRCLELDPASVDAHLLMCQIYLAQGNFGMCFHCLELGVSHNFQVRDHPLYHLIKARALNKAGDYPEAIKTLKMVIKLPALKKEEGRKFLRPSVQPSQRASILLELVEALRLNGELHEATKVMQDTINEFGGTPEENRITIANVDLVLSKGNVDVALNMLRNILPKQSCYMEAREKMANIYLQTLRDRRLYIRCYRELCEHLPGPHTSLLLGDALMSILEPEKALEVYDEAYRQNPHDASLASRIGHAYVKAHQYTEAIEYYEAAQKINGQDFLCCDLGKLLLKLKKVNKAEKVLKQALEHDIVQDIPSMMNDVKCLLLLAKVYKSHKKEAVIETLNKALDLQSRILKRVPLEQPEMIPSQKQLAASICIQFAEHYLAEKEYDKAVQSYKDVFSYLPTDNKVMLELAQLYLLQGHLDLCEQHCAILLQTEQNHETASVLMADLMFRKQKHEAAINLYHQVLEKAPDNFLVLHKLIDLLRRSGKLEDIPAFFELAKKVSSRVPLEPGFNYCRGIYCWHIGQPNEALKFLNKARKDSTWGQSAIYHMVQICLNPDNEVVGGEAFENQGAESNYMEKKELEQQGVSTAEKLLREFYPHSDSSQTQLRLLQGLCRLATREKANMEAALGSFIQIAQAEKDSVPALLALAQAYVFLKQIPKARMQLKRLAKTPWVLSEAEDLEKSWLLLADIYCQGSKFDLALELLRRCVQYNKSCYKAYEYMGFIMEKEQSYKDAVTNYKLAWKYSHHANPAIGFKLAFNYLKDKKFVEAIEICNDVLREHPDYPKIREEILEKARRSLRP

SEQ ID NO: 5897 - protein, 1321 aa, Homo sapiens
MSSNDSSLMAGIIYYSQEKYFHHVQQAAAVGLEKFSNDPVLKFFKAYGVLKEEHIQDAISDLESIRHHPDVSLCSTMALIYAHKRCEIIDREAIQELEYSLKEIRKTVSGTALYYAGLFLWLIGRHDKAKEYIDRMLKISRGFREAYVLRGWVDLTSDKPHTAKKAIEYLEQGIQDTKDVLGLMGKAMYFMMQQNYSEALEVVNQITVTSGSFLPALVLKMQLFLARQDWEQTVEMGHRILEKDESNIDACQILTVHELAREGNMTTVSSLKTQKATNHVRNLIKALETREPENPSLHLKKIIVVSRLCGSHQVILGLVCSFIERTFMATPSYVHVATELGYLFILKNQVKEALLWYSEAMKLDKDGMAGLTGIILCHILEGHLEEAEYRLEFLKEVQKSLGKSEVLIFLQALLMSRKHKGEEETTALLKEAVELHFSSMQGIPLGSEYFEKLDPYFLVCIAKEYLLFCPKQPRLPGQIVSPLLKQVAVILNPVVKAAPALIDPLYLMAQVRYYSGELENAQSILQRCLELDPASVDAHLLMCQIYLAQGNFGMCFHCLELGVSHNFQVRDHPLYHLIKARALNKAGDYPEAIKTLKMVIKLPALKKEEGRKFLRPSVQPSQRASILLELVEALRLNGELHEATKVMQDTINEFGGTPEENRITIANVDLVLSKGNVDVALNMLRNILPKQSCYMEAREKMANIYLQTLRDRRLYIRCYRELCEHLPGPHTSLLLGDALMSILEPEKALEVYDEAYRQNPHDASLASRIGHAYVKAHQYTEAIEYYEAAQKINGQDFLCCDLGKLLLKLKKVNKAEKVLKQALEHDIVQDIPSMMNDVKCLLLLAKVYKSHKKEAVIETLNKALDLQSRILKRVPLEQPEMIPSQKQLAASICIQFAEHYLAEKEYDKAVQSYKDVFSYLPTDNKVMLELAQLYLLQGHLDLCEQHCAILLQTEQNHETASVLMADLMFRKQKHEAAINLYHQVLEKAPDNFLVLHKLIDLLRRSGKLEDIPAFFELAKKVSSRVPLEPGFNYCRGIYCWHIGQPNEALKFLNKARKDSTWGQSAIYHMVQICLNPDNEVVGGEAFENQGAESNYMEKKELEQQGVSTAEKLLREFYPHSDSSQTQLRLLQGLCRLATREKANMEAALGSFIQIAQAEKDSVPALLALAQAYVFLKQIPKARMQLKRLAKTPWVLSEAEDLEKSWLLLADIYCQGSKFDLALELLRRCVQYNKSCYKAYEYMGFIMEKEQSYKDAVTNYKLAWKYSHHANPAIGFKLAFNYLKDKKFVEAIEICNDVLREHPDYPKIREEILEKARRSLRP

SEQ ID NO: 5898 - protein, 665 aa, Homo sapiens
MAGLSGAQIPDGEFTAVVYRLIRNARYAEAVQLLGGELQRSPRSRAGLSLLGYCYYRLQEFALAAECYEQLGQLHPELEQYRLYQAQALYKACLYAEATRVAFLLLDNPAYHSRVLRLQAAIKYSEGDLPGSRSLVEQLPSREGGEESGGENETDGQINLGCLLYKEGQYEAACSKFFAALQASGYQPDLSYNLALAYYSSRQYASALKHIAEIIERGIRQHPELGVGMTTEGIDVRSVGNTLVLHQTALVEAFNLKAAIEYQLRNYEAAQEALTDMPPRAEEELDPVTLHNQALMNMDARPTEGFEKLQFLLQQNPFPPETFGNLLLLYCKYEYFDLAADVLAENAHLIYKFLTPYLYDFLDAVITCQTAPEEAFIKLDGLAGMLTEVLRKLTIQVQEARHNRDDEAIKKAVNEYDETMEKYIPVLMAQAKIYWNLENYPMVEKIFRKSVEFCNDHDVWKLNVAHVLFMQENKYKEAIGFYEPIVKKHYDNILNVSAIVLANLCVSYIMTSQNEEAEELMRKIEKEEEQLSYDDPDKKMYHLCIVNLVIGTLYCAKGNYDFGISRVIKSLEPYNKKLGTDTWYYAKRCFLSLLENMSKHTIMLRDSVIQECVQFLEHCELHGRNIPAVIEQPLEEERMHVGKNTVTYESRQLKALIYEIIGWNI

SEQ ID NO: 5899 - protein, 1703 aa, Homo sapiens
MSLLCVGVKKAKFDGAQEKFNTYVTLKVQNVKSTTIAVRGSQPSWEQDFMFEINRLDLGLTVEVWNKGLIWDTMVGTVWIPLRTIRQSNEEGPGEWLTLDSQVIMADSEICGTKDPTFHRILLDTRFELPLDIPEEEARYWAKKLEQLNAMRDQDEYSFQDEQDKPLPVPSNQCCNWNYFGWGEQHNDDPDSAVDDRDSDYRSETSNSIPPPYYTTSQPNASVHQYSVRPPPLGSRESYSDSMHSYEEFSEPQALSPTGSSRYASSGELSQGSSQLSEDFDPDEHSLQGSDMEDERDRDSYHSCHSSVSYHKDSPRWDQDEEELEEDLEDFLEEEELPEDEEELEEEEEEVPDDLGSYAQREDVAVAEPKDFKRISLPPAAPGKEDKAPVAPTEAPDMAKVAPKPATPDKVPAAEQIPEAEPPKDEESFRPREDEEGQEGQDSMSRAKANWLRAFNKVRMQLQEARGEGEMSKSLWFKGGPGGGLIIIDSMPDIRKRKPIPLVSDLAMSLVQSRKAGITSALASSTLNNEELKNHVYKKTLQALIYPISCTTPHNFEVWTATTPTYCYECEGLLWGIARQGMRCTECGVKCHEKCQDLLNADCLQRAAEKSSKHGAEDRTQNIIMVLKDRMKIRERNKPEIFELIQEIFAVTKTAHTQQMKAVKQSVLDGTSKWSAKISITVVCAQGLQAKDKTGSSDPYVTVQVGKTKKRTKTIYGNLNPVWEENFHFECHNSSDRIKVRVWDEDDDIKSRVKQRFKRESDDFLGQTIIEVRTLSGEMDVWYNLDKRTDKSAVSGAIRLHISVEIKGEEKVAPYHVQYTCLHENLFHFVTDVQNNGVVKIPDAKGDDAWKVYYDETAQEIVDEFAMRYGVESIYQAMTHFACLSSKYMCPGVPAVMSTLLANINAYYAHTTASTNVSASDRFAASNFGKERFVKLLDQLHNSLRIDLSMYRNNFPASSPERLQDLKSTVDLLTSITFFRMKVQELQSPPRASQVVKDCVKACLNSTYEYIFNNCHELYSREYQTDPAKKGEVLPEEQGPSIKNLDFWSKLITLIVSIIEEDKNSYTPCLNQFPQELNVGKISAEVMWNLFAQDMKYAMEEHDKHRLCKSADYMNLHFKVKWLYNEYVTELPAFKDRVPEYPAWFEPFVIQWLDENEEVSRDFLHGALERDKKDGFQQTSEHALFSCSVVDVFSQLNQSFEIIKKLECPDPQIVGHYMRRFAKTISNVLLQYADIISKDFASYCSKEKEKVPCILMNNTQQLRVQLEKMFEAMGGKELDAEASDILKELQVKLNNVLDELSRVFATSFQPHIEECVKQMGDILSQVKGTGNVPASACSSVAQDADNVLQPIMDLLDSNLTLFAKICEKTVLKRVLKELWKLVMNTMEKTIVLPPLTDQTMIGNLLRKHGKGLEKGRVKLPSHSDGTQMIFNAAKELGQLSKLKDHMVREEAKSLTPKQCAVVELALDTIKQYFHAGGVGLKKTFLEKSPDLQSLRYALSLYTQATDLLIKTFVQTQSAQGLGVEDPVGEVSVHVELFTHPGTGEHKVTVKVVAANDLKWQTSGIFRPFIEVNIIGPQLSDKKRKFATKSKNNSWAPKYNESFQFTLSADAGPECYELQVCVKDYCFAREDRTVGLAVLQLRELAQRGSAACWLPLGRRIHMDDTGLTVLRILSQRSNDEVAKEFVKLKSDTRSAEEGGAAPAP

SEQ ID NO: 5900 - protein, 169 aa, Homo sapiens
MAPPWVPAMGFTLAPSLGCFVGSRFVHGEGLRWYAGLQKPSWHPPHWVLGPVWGTLYSAMGYGSYLVWKELGGFTEKAVVPLGLYTGQLALNWAWPPIFFGARQMGWALVDLLLVSGAAAATTVAWYQVSPLAARLLYPYLAWLAFTTTLNYCVWRDNHGWRGGRRLPE

SEQ ID NO: 5901 - protein, 94 aa, Homo sapiens
MRKLRLRASNPGPSGAPGTRRHFSTSRGGHHCARRWLRRVRRSRSQTPSCQNLDPNPPIARFLLPLERISEVPRRACLHGRDASSVWPPPERSD

SEQ ID NO: 5902 - protein, 597 aa, Homo sapiens
MEAEPPLYPMAGAAGPQGDEDLLGVPDGPEAPLDELVGAYPNYNEEEEERRYYRRKRLGVLKNVLAASAGGMLTYGVYLGLLQMQLILHYDETYREVKYGNMGLPDIDSKMLMGINVTPIAALLYTPVLIRFFGTKWMMFLAVGIYALFVSTNYWERYYTLVPSAVALGMAIVPLWASMGNYITRMAQKYHEYSHYKEQDGQGMKQRPPRGSHAPYLLVFQAIFYSFFHLSFACAQLPMIYFLNHYLYDLNHTLYNVQSCGTNSHGILSGFNKTVLRTLPRSGNLIVVESVLMAVAFLAMLLVLGLCGAAYRPTEEIDLRSVGWGNIFQLPFKHVRDYRLRHLVPFFIYSGFEVLFACTGIALGYGVCSVGLERLAYLLVAYSLGASAASLLGLLGLWLPRPVPLVAGAGVHLLLTFILFFWAPVPRVLQHSWILYVAAALWGVGSALNKTGLSTLLGILYEDKERQDFIFTIYHWWQAVAIFTVYLGSSLHMKAKLAVLLVTLVAAAVSYLRMEQKLRRGVAPRQPRIPRPQHKVRGYRYLEEDNSDESDAEGEHGDGAEEEAPPAGPRPGPEPAGLGRRPCPYEQAQGGDGPEEQ

SEQ ID NO: 5903 - protein, 147 aa, Homo sapiens
MALKRIQKELTDLQRDPPAQCSAGPVGDDLFHWQATIMGPNDSPYQGGVFFLTIHFPTDYPFKPPKVAFTTKIYHPNINSNGSICLDILRSQWSPALTVSKVLLSICSLLCDPNPDDPLVPEIAHTYKADREKYNRLAREWTQKYAM

SEQ ID NO: 5904 - protein, 508 aa, Homo sapiens
MSRFVQDLSKAMSQDGASQFQEVIRQELELSVKKELEKILTTASSHEFEHTKKDLDGFRKLFHRFLQEKGPSVDWGKIQRPPEDSIQPYEKIKARGLPDNISSVLNKLVVVKLNGGLGTSMGCKGPKSLIGVRNENTFLDLTVQQIEHLNKTYNTDVPLVLMNSFNTDEDTKKILQKYNHCRVKIYTFNQSRYPRINKESLLPVAKDVSYSGENTEAWYPPGHGDIYASFYNSGLLDTFIGEGKEYIFVSNIDNLGATVDLYILNHLMNPPNGKRCEFVMEVTNKTRADVKGGTLTQYEGKLRLVEIAQVPKAHVDEFKSVSKFKIFNTNNLWISLAAVKRLQEQNAIDMEIIVNAKTLDGGLNVIQLETAVGAAIKSFENSLGINVPRSRFLPVKTTSDLLLVMSNLYSLNAGSLTMSEKREFPTVPLVKLGSSFTKVQDYLRRFESIPDMLELDHLTVSGDVTFGKNVSLKGTVIIIANHGDRIDIPPGAVLENKIVSGNLRILDH

SEQ ID NO: 5905 - protein, 497 aa, Homo sapiens
MSQDGASQFQEVIRQELELSVKKELEKILTTASSHEFEHTKKDLDGFRKLFHRFLQEKGPSVDWGKIQRPPEDSIQPYEKIKARGLPDNISSVLNKLVVVKLNGGLGTSMGCKGPKSLIGVRNENTFLDLTVQQIEHLNKTYNTDVPLVLMNSFNTDEDTKKILQKYNHCRVKIYTFNQSRYPRINKESLLPVAKDVSYSGENTEAWYPPGHGDIYASFYNSGLLDTFIGEGKEYIFVSNIDNLGATVDLYILNHLMNPPNGKRCEFVMEVTNKTRADVKGGTLTQYEGKLRLVEIAQVPKAHVDEFKSVSKFKIFNTNNLWISLAAVKRLQEQNAIDMEIIVNAKTLDGGLNVIQLETAVGAAIKSFENSLGINVPRSRFLPVKTTSDLLLVMSNLYSLNAGSLTMSEKREFPTVPLVKLGSSFTKVQDYLRRFESIPDMLELDHLTVSGDVTFGKNVSLKGTVIIIANHGDRIDIPPGAVLENKIVSGNLRILDH

SEQ ID NO: 5906 - protein, 325 aa, Homo sapiens
MGIFPGIILIFLRVKFATAAVIVSGHQKSTTVSHEMSGLNWKPFVYGGLASIVAEFGTFPVDLTKTRLQVQGQSIDARFKEIKYRGMFHALFRICKEEGVLALYSGIAPALLRQASYGTIKIGIYQSLKRLFVERLEDETLLINMICGVVSGVISSTIANPTDVLKIRMQAQGSLFQGSMIGSFIDIYQQEGTRGLWRGVVPTAQRAAIVVGVELPVYDITKKHLILSGMMGDTILTHFVSSFTCGLAGALASNPVDVVRTRMMNQRAIVGHVDLYKGTVDGILKMWKHEGFFALYKGFWPNWLRLGPWNIIFFITYEQLKRLQI

SEQ ID NO: 5907 - protein, 322 aa, Homo sapiens
MGIFPGIILIFLRVKFATAAVIHQKSTTVSHEMSGLNWKPFVYGGLASIVAEFGTFPVDLTKTRLQVQGQSIDARFKEIKYRGMFHALFRICKEEGVLALYSGIAPALLRQASYGTIKIGIYQSLKRLFVERLEDETLLINMICGVVSGVISSTIANPTDVLKIRMQAQGSLFQGSMIGSFIDIYQQEGTRGLWRGVVPTAQRAAIVVGVELPVYDITKKHLILSGMMGDTILTHFVSSFTCGLAGALASNPVDVVRTRMMNQRAIVGHVDLYKGTVDGILKMWKHEGFFALYKGFWPNWLRLGPWNIIFFITYEQLKRLQI

SEQ ID NO: 5908 - protein, 353 aa, Homo sapiens
MGIFPGIILIFLRVKFATAAVIHQKSTTVSHEMSGLNWKPFVYGGLASIVAEFGTFPVDLTKTRLQVQGQSIDARFKEIKYRGMFHALFRICKEEGVLALYSGIAPALLRQASYGTIKIGIYQSLKRLFVERLEDETLLINMICGVVSGVISSTIANPTDVLKIRMQAQGSLFQGSMIGSFIDIYQQEGTRGLWRCLCSKAVTGCVLWLMPVIPALWEANAGGSLEGVVPTAQRAAIVVGVELPVYDITKKHLILSGMMGDTILTHFVSSFTCGLAGALASNPVDVVRTRMMNQRAIVGHVDLYKGTVDGILKMWKHEGFFALYKGFWPNWLRLGPWNIIFFITYEQLKRLQI

SEQ ID NO: 5909 - protein, 344 aa, Homo sapiens
MFTSTGSSGLYKAPLSKSLLLVPSALSLLLALLLPHCQKLFVYDLHAVKNDFQIWRLICGRIICLDLKDTFCSSLLIYNFRIFERRYGSRKFASFLLGSWVLSALFDFLLIEAMQYFFGITAASNLPSGFLAPVFALFVPFYCSIPRVQVAQILGPLSITNKTLIYILGLQLFTSGSYIWIVAISGLMSGLCYDSKMFQVHQVLCIPSWMAKFFSWTLEPIFSSSEPTSEARIGMGATLDIQRQQRMELLDRQLMFSQFAQGRRQRQQQGGMINWNRLFPPLRQRQNVNYQGGRQSEPAAPPLEVSEEQVARLMEMGFSRGDALEALRASNNDLNVATNFLLQH

SEQ ID NO: 5910 - protein, 309 aa, Homo sapiens
MCFFFSLQEEFLDKHTLMRVLSSGGKLGSRGEGAQLCCWMLLFSWRVSGGQQTRRLCRRAFCWSPVPSPSCSPSSCLTARSSLCMTFTQSRTTSSLAPVFALFVPFYCSIPRVQVAQILGPLSITNKTLIYILGLQLFTSGSYIWIVAISGLMSGLCYDSKMFQVHQVLCIPSWMAKFFSWTLEPIFSSSEPTSEARIGMGATLDIQRQQRMELLDRQLMFSQFAQGRRQRQQQGGMINWNRLFPPLRQRQNVNYQGGRQSEPAAPPLEVSEEQVARLMEMGFSRGDALEALRASNNDLNVATNFLLQH

SEQ ID NO: 5911 - protein, 231 aa, Homo sapiens
MQYFFGITAASNLPSGFLAPVFALFVPFYCSIPRVQVAQILGPLSITNKTLIYILGLQLFTSGSYIWIVAISGLMSGLCYDSKMFQVHQVLCIPSWMAKFFSWTLEPIFSSSEPTSEARIGMGATLDIQRQQRMELLDRQLMFSQFAQGRRQRQQQGGMINWNRLFPPLRQRQNVNYQGGRQSEPAAPPLEVSEEQVARLMEMGFSRGDALEALRASNNDLNVATNFLLQH

SEQ ID NO: 5912 - protein, 157 aa, Homo sapiens
MSGLCYDSKMFQVHQVLCIPSWMAKFFSWTLEPIFSSSEPTSEARIGMGATLDIQRQQRMELLDRQLMFSQFAQGRRQRQQQGGMINWNRLFPPLRQRQNVNYQGGRQSEPAAPPLEVSEEQVARLMEMGFSRGDALEALRASNNDLNVATNFLLQH

SEQ ID NO: 5913 - protein, 141 aa, Homo sapiens
MFTSTGSSGLYKAPLSKSLLLVPSALSLLLALLLPHCQKLFVYDLHAVKNDFQPGTCVCSVCTILLLHTKSPSGTNSGSVVHHKQDIDLYIGTAAFHLWFLHLDCSHKWTYVRSVLRQQNVPGASGALHPQLDGKILFLDT

SEQ ID NO: 5914 - protein, 530 aa, Homo sapiens
MARAGWTGLLPLYVCLLLTCGFAKAGKLLVVPMDGSHWFTMQSVVEKLILRGHEVVVVMPEVSWQLGRSLNCTVKTYSTSYTLEDQDREFMVFADARWTAPLRSAFSLLTSSSNGIFDLFFSNCRSLFNDRKLVEYLKESCFDAVFLDPFDACGLIVAKYFSLPSVVFARGIFCHYLEEGAQCPAPLSYVPRLLLGFSDAMTFKERVWNHIMHLEEHLFCPYFFKNVLEIASEILQTPVTAYDLYSHTSIWLLRTDFVLEYPKPVMPNMIFIGGINCHQGKPVPMEFEAYINASGEHGIVVFSLGSMVSEIPEKKAMAIADALGKIPQTVLWRYTGTRPSNLANNTILVKWLPQNDLLGHPMTRAFITHAGSHGVYESICNGVPMVMMPLFGDQMDNAKRMETKGAGVTLNVLEMTSEDLENALKAVINDKSYKENIMRLSSLHKDRPVEPLDLAVFWVEFVMRHKGAPHLRPAAHDLTWYQYHSLDVIGFLLAVVLTVAFITFKCCAYGYRKCLGKKGRVKKAHKSKTH

SEQ ID NO: 5915 - protein, 441 aa, Homo sapiens
MARAGWTGLLPLYVCLLLTCGFAKAGKLLVVPMDGSHWFTMQSVVEKLILRGHEVVVVMPEVSWQLGRSLNCTVKTYSTSYTLEDQDREFMVFADARWTAPLRSAFSLLTSSSNGIFDLFFSNCRSLFNDRKLVEYLKESCFDAVFLDPFDACGLIVAKYFSLPSVVFARGIFCHYLEEGAQCPAPLSYVPRLLLGFSDAMTFKERVWNHIMHLEEHLFCPYFFKNVLEIASEILQTPVTAYDLYSHTSIWLLRTDFVLEYPKPVMPNMIFIGGINCHQGKPVPMEFEAYINASGEHGIVVFSLGSMVSEIPEKKAMAIADALGKIPQTVLWRYTGTRPSNLANNTILVKWLPQNDLLGHPMTRAFITHAGSHGVYESICNGVPMVMMPLFGDQMDNAKRMETKGAGVTLNVLEMTSEDLENALKAVINDKRKKQQSGRQM

SEQ ID NO: 5916 - protein, 1119 aa, Homo sapiens
MMTSVSSDHCRGAREKPQISAAQSTQPQKQVVQATAEQMRLAQVIFDKNDSDFEAKVKQLMEVTGKNQDECIVALHDCNGDVNKAINILLEGNSDTTSWETVGCKKKNFAKENSENKENREKKSEKESSRGRGNNNRKGRGGNRGREFRGEENGIDCNQVDKPSDRGKRARGRGFGRGRGRGAGRFSTQGMGTFNPADYSDSTSTDVCGTKLVVWEAAQNGADEGTELASNTHNIAQDLSNKSSYGLKGAWKNSVEEWTTEDWTEDLSETKVFTASSAPAENHILPGQSIDLVALLQKPVPHSQASEANSFETSQQQGFGQALVFTNSQHNNQMAPGTGSSTAVNSCSPQSLSSVLGSGFGELAPPKMANITSSQILDQLKAPSLGQFTTTPSTQQNSTSHPTTTTSWDLKPPTSQSSVLSHLDFKSQPEPSPVLSQLSQRQQHQSQAVTVPPPGLESFPSQAKLRESTPGDSPSTVNKLLQLPSTTIENISVSVHQPQPKHIKLAKRRIPPASKIPASAVEMPGSADVTGLNVQFGALEFGSEPSLSEFGSAPSSENSNQIPISLYSKSLSEPLNTSLSMTSAVQNSTYTTSVITSCSLTSSSLNSASPVAMSSSYDQSSVHNRIPYQSPVSSSESAPGTIMNGHGGGRSQQTLDTPKTTGPPSALPSVSSLPSTTSCTALLPSTSQHTGDLTSSPLSQLSSSLSSHQSSLSAHAALSSSTSHTHASVESASSHQSSATFSTAATSVSSSASSGASLSSSMNTANSLCLGGTPASASSSSSRAAPLVTSGKAPPNLPQGVPPLLHNQYLVGPGGLLPAYPIYGYDELQMLQSRLPVDYYGIPFAAPTALASRDGSLANNPYPGDVTKFGRGDSASPAPATTPAQPQQSQSQTHHTAQQPFVNPALPPGYSYTGLPYYTGMPSAFQYGPTMFVPPASAKQHGVNLSTPTPPFQQASGYGQHGYSTGYDDLTQGTAAGDYSKGGYAGSSQAPNKSAGSGPGKGVSVSSSTTGLPDMTGSVYNKTQTFDKQGFHAGTPPPFSLPSVLGSTGPLASGAAPGYAPPPFLHILPAHQQPHSQLLHHHLPQDAQSGSGQRSQPSSLQPKSQASKPAYGNSPYWTN

SEQ ID NO: 5917 - protein, 358 aa, Homo sapiens
MNTANSLCLGGTPASASSSSSRAAPLVTSGKAPPNLPQGVPPLLHNQYLVGPGGLLPAYPIYGYDELQMLQSRLPVDYYGIPFAAPTALASRDGSLANNPYPGDVTKFGRGDSASPAPATTPAQPQQSQSQTHHTAQQPFVNPALPPGYSYTGLPYYTGMPSAFQYGPTMFVPPASAKQHGVNLSTPTPPFQQASGYGQHGYSTGYDDLTQGTAAGDYSKGGYAGSSQAPNKSAGSGPGKGVSVSSSTTGLPDMTGSVYNKTQTFDKQGFHAGTPPPFSLPSVLGSTGPLASGAAPGYAPPPFLHILPAHQQPHSQLLHHHLPQDAQSGSGQRSQPSSLQPKSQASKPAYGNSPYWTN

SEQ ID NO: 5918 - protein, 532 aa, Homo sapiens
MACLLRSFQRISAGVFFLALWGMVVGDKLLVVPQDGSHWLSMKDIVEVLSDRGHEIVVVVPEVNLLLKESKYYTRKIYPVPYDQEELKNRYQSFGNNHFAERSFLTAPQTEYRNNMIVIGLYFINCQSLLQDRDTLNFFKESKFDALFTDPALPCGVILAEYLGLPSVYLFRGFPCSLEHTFSRSPDPVSYIPRCYTKFSDHMTFSQRVANFLVNLLEPYLFYCLFSKYEELASAVLKRDVDIITLYQKVSVWLLRYDFVLEYPRPVMPNMVFIGGINCKKRKDLSQEFEAYINASGEHGIVVFSLGSMVSEIPEKKAMAIADALGKIPQTVLWRYTGTRPSNLANNTILVKWLPQNDLLGHPMTRAFITHAGSHGVYESICNGVPMVMMPLFGDQMDNAKRMETKGAGVTLNVLEMTSEDLENALKAVINDKSYKENIMRLSSLHKDRPVEPLDLAVFWVEFVMRHKGAPHLRPAAHDLTWYQYHSLDVIGFLLAVVLTVAFITFKCCAYGYRKCLGKKGRVKKAHKSKTH

SEQ ID NO: 5919 - protein, 265 aa, Homo sapiens
MPNMVFIGGINCKKRKDLSQEFEAYINASGEHGIVVFSLGSMVSEIPEKKAMAIADALGKIPQTVLWRYTGTRPSNLANNTILVKWLPQNDLLGHPMTRAFITHAGSHGVYESICNGVPMVMMPLFGDQMDNAKRMETKGAGVTLNVLEMTSEDLENALKAVINDKSYKENIMRLSSLHKDRPVEPLDLAVFWVEFVMRHKGAPHLRPAAHDLTWYQYHSLDVIGFLLAVVLTVAFITFKCCAYGYRKCLGKKGRVKKAHKSKTH

SEQ ID NO: 5920 - protein, 443 aa, Homo sapiens
MACLLRSFQRISAGVFFLALWGMVVGDKLLVVPQDGSHWLSMKDIVEVLSDRGHEIVVVVPEVNLLLKESKYYTRKIYPVPYDQEELKNRYQSFGNNHFAERSFLTAPQTEYRNNMIVIGLYFINCQSLLQDRDTLNFFKESKFDALFTDPALPCGVILAEYLGLPSVYLFRGFPCSLEHTFSRSPDPVSYIPRCYTKFSDHMTFSQRVANFLVNLLEPYLFYCLFSKYEELASAVLKRDVDIITLYQKVSVWLLRYDFVLEYPRPVMPNMVFIGGINCKKRKDLSQEFEAYINASGEHGIVVFSLGSMVSEIPEKKAMAIADALGKIPQTVLWRYTGTRPSNLANNTILVKWLPQNDLLGHPMTRAFITHAGSHGVYESICNGVPMVMMPLFGDQMDNAKRMETKGAGVTLNVLEMTSEDLENALKAVINDKRKKQQSGRQM

SEQ ID NO: 5921 - protein, 529 aa, Homo sapiens [sequence omitted]

SEQ ID NO: 5922 - protein, 377 aa, Homo sapiens
MLLAVLYCLLWSFQTSAGHFPRACVSSKNLMEKECCPPWSGDRSPCGQLSGRGSCQNILLSNAPLGPQFPFTGVDDRESWPSVFYNRTCQCSGNFMGFNCGNCKFGFWGPNCTERRLLVRRNIFDLSAPEKDKFFAYLTLAKHTISSDYVIPIGTYGQMKNGSTPMFNDINIYDLFVWMHYYVSMDALLGGSEIWRDIDFAHEAPAFLPWHRLFLLRWEQEIQKLTGDENFTIPYWDWRDAEKCDICTDEYMGGQHPTNPNLLSPASFFSSWQIVCSRLEEYNSHQSLCNGTPEGPLRRNPGNHDKSRTPRLPSSADVEFCLSLTQYESGSMDKAANFSFRNTLEEMGFLHVGWAGLKLLTSRDPPPWPPKMLGLQA

SEQ ID NO: 5923 - protein, 110 aa, Homo sapiens
MKRILGALLGLLSAQVCCVRGIQVEQSPPDLILQEGANSTLRCNFSDSVNNLQWFHQNPWGQLINLFYIPSGTKQNGRLSATTVATERYSLLYISSSQTTDSGVYFCAVE

SEQ ID NO: 5924 - protein, 890 aa, Homo sapiens
MALRRSMGRPGLPPLPLPPPPRLGLLLAALASLLLPESAAAGLKLMGAPVKLTVSQGQPVKLNCSVEGMEEPDIQWVKDGAVVQNLDQLYIPVSEQHWIGFLSLKSVERSDAGRYWCQVEDGGETEISQPVWLTVEGVPFFTVEPKDLAVPPNAPFQLSCEAVGPPEPVTIVWWRGTTKIGGPAPSPSVLNVTGVTQSTMFSCEAHNLKGLASSRTATVHLQALPAAPFNITVTKLSSSNASVAWMPGADGRALLQSCTVQVTQAPGGWEVLAVVVPVPPFTCLLRDLVPATNYSLRVRCANALGPSPYADWVPFQTKGLAPASAPQNLHAIRTDSGLILEWEEVIPEAPLEGPLGPYKLSWVQDNGTQDELTVEGTRANLTGWDPQKDLIVRVCVSNAVGCGPWSQPLVVSSHDRAGQQGPPHSRTSWVPVVLGVLTALVTAAALALILLRKRRKETRFGQAFDSVMARGEPAVHFRAARSFNRERPERIEATLDSLGISDELKEKLEDVLIPEQQFTLGRMLGKGEFGSVREAQLKQEDGSFVKVAVKMLKADIIASSDIEEFLREAACMKEFDHPHVAKLVGVSLRSRAKGRLPIPMVILPFMKHGDLHAFLLASRIGENPFNLPLQTLIRFMVDIACGMEYLSSRNFIHRDLAARNCMLAEDMTVCVADFGLSRKIYSGDYYRQGCASKLPVKWLALESLADNLYTVQSDVWAFGVTMWEIMTRGQTPYAGIENAEIYNYLIGGNRLKQPPECMEDVYDLMYQCWSADPKQRPSFTCLRMELENILGQLSVLSASQDPLYINIERAEEPTAGGSLELPGRDQPYSGAGDGSGMGAVGGTPSDCRYILTPGGLAEQPGQAEHQPESPLNETQRLLLLQQGLLPHSSC

SEQ ID NO: 5925 - protein, 351 aa, Homo sapiens
MSFFPELYFNVDNGYLEGLVRGLKAGVLSQADYLNLVQCETLEDLKLHLQSTDYGNFLANEASPLTVSVIDDRLKEKMVVEFRHMRNHAYEPLASFLDFITYSYMIDNVILLITGTLHQRSIAELVPKCHPLGSFEQMEAVNIAQTPAELYNAILVDTPLAAFFQDCISEQDLDEMNIEIIRNTLYKAYLESFYKFCTLLGGTTADAMCPILEFEADRRAFIITINSFGTELSKEDRAKLFPHCGRLYPEGLAQLARADDYEQVKNVADYYPEYKLLFEGAGSNPGDKTLEDRFFEHEVKLNKLAFLNQFHFGVFYAFVKLKEQECRNIVWIAECIAQRHRAKIDNYIPIF

SEQ ID NO: 5926 - protein, 779 aa, Homo sapiens
MTPEFDEEVVFENSPLYQYLQDLGHTDFEICSSLSPKTEKCTTEGQQKPPTRVLPKQGILLKVAETIKSWIFFSQCNKKDDLLHKLDIGFRLDSLHTILQQEVLLQEDVELIELLDPSILSAGQSQQQENGHLPTLCSLATPNIWDLSMLFAFISLLVMLPTWWIVSSWLVWGVILFVYLVIRALRLWRTAKLQVTLKKYSVHLEDMATNSRAFTNLVRKALRLIQETEVISRGFTLVSAACPFNKAGQHPSQHLIGLRKAVYRTLRANFQAARLATLYMLKNYPLNSESDNVTNYICVVPFKELGLGLSEEQISEEEAHNFTDGFSLPALKVLFQLWVAQSSEFFRRLALLLSTANSPPGPLLTPALLPHRILSDVTQGLPHAHSACLEELKRSYEFYRYFETQHQSVPQCLSKTQQKSRELNNVHTAVRSLQLHLKALLNEVIILEDELEKLVCTKETQELVSEAYPILEQKLKLIQPHVQASNNCWEEAISQVDKLLRRNTDKKGKPEIACENPHCTVVPLKQPTLHIADKDPIPEEQELEAYVDDIDIDSDFRKDDFYYLSQEDKERQKREHEESKRVLQELKSVLGFKASEAERQKWKQLLFSDHAVLKSLSPVDPVEPISNSEPSMNSDMGKVSKNDTEEESNKSATTDNEISRTEYLCENSLEGKNKDNSSNEVFPQGAEERMCYQCESEDEPQADGSGLTTAPPTPRDSLQPSIKQRLARLQLSPDFTFTAGLAAEVAARSLSFTTMQEQTFGGEEEEQIIEENKNEIEEK

SEQ ID NO: 5927 - protein, 569 aa, Homo sapiens
MLKEWAIKQGILLKVAETIKSWIFFSQCNKKDDLLHKLDIGFRLDSLHTILQQEVLLQEDVELIELLDPSILSAGQSQQQENGHLPTLCSLATPNIWDLSMLFAFISLLVMLPTWWIVSSWLVWGVILFVYLVIRALRLWRTAKLQVTLKKYSVHLEDMATNSRAFTNLVRKALRLIQETEVISRGFTLVSAACPFNKAGQHPSQHLIGLRKAVYRTLRANFQAARLATLYMLKNYPLNSESDNVTNYICVVPFKELGLGLSEEQISEEEAHNFTDGFSLPALKVLFQLWVAQSSEFFRRLALLLSTANSPPGPLLTPALLPHRILSDVTQGLPHAHSACLEELKRSYEFYRYFETQHQSVPQCLSKTQQKSRELNNVHTAVRSLQLHLKALLNEVIILEDELEKLVCTKETQELVSEAYPILEQKLKLIQPHVQASNNCWEEAISQVDKLLRRNTDKKGKPEIACENPHCTVVPLKQPTLHIADKDPIPEEQELEAYVDDIDIDSDFRKDDFYYLSQEDKERQKREHEESKRVLQELKSVLGFKASEAERQKWKQLLFSDHGVKSAWN

SEQ ID NO: 5928 - protein, 65 aa, Homo sapiens
MTPEFDEEVVFENSPLYQYLQDLGHTDFEICSSLSPKTEKCTTEGQQKPPTRVLPKGSLSAICLH

SEQ ID NO: 5929 - protein, 79 aa, Homo sapiens
MTPEFDEEVVFENSPLYQYLQDLGHTDFEICSSLSPKTEKCTTEGQQKPPTRVLPKYLGYSNHSMNINCTYWHAQGMGY

SEQ ID NO: 5930 - protein, 317 aa, Homo sapiens
MSCLDVMYQVYGPPQPYFAAAYTPYHQKLAYYSKMQEAQECNASPSSSGSGSSSFSSQTPASIKEEEGSPEKERPPEAEYINSRCVLFTYFQGDISSVVDEHFSRALSQPSSYSPSCTSSKAPRSSGPWRDCSFPMSQRSFPASFWNSAYQAPVPPPLGSPLATAHSELPFAAADPYSPAALHGHLHQGATEPWHHAHPHHAHPHHPYALGGALGAQAAPYPRPAAVHEVYAPHFDPRYGPLLMPAASGRPARLATAPAPAPGSPPCELSGKGEPAGAAWAGPGGPFASPSGDVAQGLGLSVDSARRYSLCGASLLS

SEQ ID NO: 5931 - protein, 143 aa, Homo sapiens
MSCLDVMYQVYGPPQPYFAAAYTPYHQKLAYYSKMQEAQECNASPSSSGSGSSSFSSQTPASIKEEEGSPEKERPPEAEYINSRCVLFTYFQGDISSVVDEHFSRALSQPSSYSPSCTSSKAPRSSGPWRARRYSLCGASLLS

SEQ ID NO: 5932 - protein, 136 aa, Homo sapiens
MLERNLTSMMSVEEPLPRPLTSLYIRLSILERNHMNMTYMAKSSVKIHISKVIIGFVLKRSLTNVCGKVLSQNSHLVNHQRIHTGEKSYRCHECGKAFTQGSRFINHQIVHTGENFPNVLNVARLLRMALNSGLTK

SEQ ID NO: 5933 - protein, 351 aa, Homo sapiens
MIVQRVVLNSRPGKNGNPVAENFRMEEVYLPDNINEGQVQVRTLYLSVDPYMRCRMNEDTGTDYITPWQLSQVVDGGGIGIIEESKHTNLTKGDFVTSFYWPWQTKVILDGNSLEKVDPQLVDGHLSYFLGAIGMPGLTSLIGIQEKGHITAGSNKTMVVSGAAGACGSVAGQIGHFLGCSRVVGICGTHEKCILLTSELGFDAAINYKKDNVAEQLRESCPAGVDVYFDNVGGNISDTVISQMNENSHIILCGQISQYNKDVPYPPPLSPAIEAIQKERNITRERFLVLNYKDKFEPGILQLSQWFKEGKLKIKETVINGLENMGAAFQSMMTGGNIGKQIVCISEEISL

SEQ ID NO: 5934 - protein, 180 aa, Homo sapiens
MIVQRVVLNSRPGKNGNPVAENFRMEEVYLPDNINEGQVQVRTLYLSVDPYMRCRMNEDTGTDYITPWQLSQVVDGGGIGIIEESKHTNLTKGDFVTSFYWPWQTKVILDGNSLEKVDPQLVDGHLSYFLGAIGMPGLTSLIGIQEKGHITAGSNKTMVVSGAAGACGSVAGQVNFLRII

SEQ ID NO: 5935 - protein, 190 aa, Homo sapiens
MATHHTLWMGLALLGVLGDLQAAPEAQVSVQPNFQQDKFLGRWFSAGLASNSSWLREKKAALSMCKSVVAPATDGGLNLTSTFLRKNQCETRTMLLQPAGSLGSYSYRSPHWGSTYSVSVVETDYDQYALLYSQGSKGPGEDFRMATLYSRTQTPRAELKEKFTAFCKAQGFTEDTIVFLPQTDKCMTEQ

SEQ ID NO: 5936 - protein, 426 aa, Homo sapiens
MGLLSAPPCTQRITWKGLLLTASLLNFWNPPTTAQVTIEAQPTKVSEGKDVLLLVHNLPQNLTGYIWYKGQIRDLYHYITSYVVDGQIIIYGPAYSGRETIYSNASLLIQNVTQEDAGSYTLHIIMGGDENRGVTGHFTFTLYLETPKPSISSSKLNPREAMEAVSLTCDPETPDASYLWWMNGQSLPMSHRLQLSETNRTLFLLGVTKYTAGPYECEIRNPVSASRSDPFTLNLLPKLPKPYITINNLKPRENKDVLNFTCEPKSENYTYIWWLNGQSLPVSPRVKRPIENRILILPSVTRNETGPYQCEIRDQYGGIRSYPVTLNVLYGPDLPRIYPSFTYYRSGEVLYLSCSADSNPPAQYSWTINGKFQLSGQKLFIPQITTKHSGLYACSVRNSATGKESSKSMTVKVSGKRIPVSLAIGI

SEQ ID NO: 5937 - protein, 297 aa, Homo sapiens
MGLLSAPPCTQRITWKGLLLTVETPKPSISSSKLNPREAMEAVSLTCDPETPDASYLWWMNGQSLPMSHRLQLSETNRTLFLLGVTKYTAGPYECEIRNPVSASRSDPFTLNLLPKLPKPYITINNLKPRENKDVLNFTCEPKSENYTYIWWLNGQSLPVSPRVKRPIENRILILPSVTRNETGPYQCEIRDQYGGIRSYPVTLNVLYGPDLPRIYPSFTYYRSGEVLYLSCSADSNPPAQYSWTINGKFQLSGQKLFIPQITTKHSGLYACSVRNSATGKESSKSMTVKVSDWTLP

SEQ ID NO: 5938 - protein, 419 aa, Homo sapiens
MGLLSAPPCTQRITWKGLLLTASLLNFWNPPTTAQVTIEAQPTKVSEGKDVLLLVHNLPQNLTGYIWYKGQIRDLYHYITSYVVDGQIIIYGPAYSGRETIYSNASLLIQNVTQEDAGSYTLHIIMGGDENRGVTGHFTFTLYLETPKPSISSSKLNPREAMEAVSLTCDPETPDASYLWWMNGQSLPMSHRLQLSETNRTLFLLGVTKYTAGPYECEIRNPVSASRSDPFTLNLLPKLPKPYITINNLKPRENKDVLNFTCEPKSENYTYIWWLNGQSLPVSPRVKRPIENRILILPSVTRNETGPYQCEIRDQYGGIRSYPVTLNVLYGPDLPRIYPSFTYYRSGEVLYLSCSADSNPPAQYSWTINGKFQLSGQKLFIPQITTKHSGLYACSVRNSATGKESSKSMTVKVSDWTLP

SEQ ID NO: 5939 - protein, 335 aa, Homo sapiens
MGPLSAPPCTQHITWKGLLLTASLLNFWNLPITAQVTIEALPPKVSEGKDVLLLVHNLPQNLAGYIWYKGQLMDLYHYITSYVVDGQINIYGPAYTGRETVYSNASLLIQNVTREDAGSYTLHIIKRGDRTRGVTGYFTFNLYLKLPKPYITINNSKPRENKDVLAFTCEPKSENYTYIWWLNGQSLPVSPRVKRPIENRILILPSVTRNETGPYECEIRDRDGGMRSDPVTLNVLYGPDLPSIYPSFTYYRSGENLYLSCFAESNPPAEYFWTINGKFQQSGQKLSIPQITTKHRGLYTCSVRNSATGKESSKSMTVEVSAPSGIGRLPLLNPI

SEQ ID NO: 5940 - protein, 767 aa, Homo sapiens
MPWVEPKPRPGPEQKPKLTKPDSATGPQWYQESQESESEGKQPPPGPLAPPKSPEPSGPLASEQDAPLPEGDDAPPRPSMLDDAPRLPLELDDAPLPEEETPEPTAICRHRHRCHTDCLEGLLSRTFQWLGWQVGAHPWIFLLAPLMLTAALGTGFLYLPKDEEEDLEEHYTPVGSPAKAERRFVQGHFTTNDSYRFSASRRSTEANFVSLLVVSYSDSLLDPATFAEVSKLDGAVQDLRVAREKGSQIQYQQVCARYRALCVPPNPILYAWQVNKTLNLSSISFPAYNHGRHPLYLTGFFGGYILGGSLGMGQLLLRAKAMRLLYYLKTEDPEYDVQSKQWLTHLLDQFTNIKNILALKKIEVVHFTSLSRQLEFEATSVTVIPVFHLAYILIILFAVTSCFRFDCIRNKMCVAAFGVISAFLAVVSGFGLLLHIGVPFVIIVANSPFLILGVGVDDMFIMISAWHKTNLADDIRERMSNVYSKAAVSITITTITNILALYTGIMSSFRSVQCFCIYTGMTLLFCYFYNITCFGAFMALDGKREVVCLCWLKKADPKWPSFKKFCCFPFGSVPDEHGTDIHPISLFFRDYFGPFLTRSESKYFVVFIYVLYIISSIYGCFHVQEGLDLRNLASDDSYITPYFNVEENYFSDYGPRVMVIVTKKVDYWDKDVRQKLENCTKIFEKNVYVDKNLTEFWLDAYVQYLKGNSQDPNEKNTFMNNIPDFLSNFPNFQHDINISSSNEIISSRGFIQTTDVSSSAKKKILLF

SEQ ID NO: 5941 - protein, 389 aa, Homo sapiens
MPLENLEEEGLPKNPDLRIAQLRFLLSLPEHRGDAAVRDELMAAVRDNNMAPYYEALCKSLDWQIDVDLLNKMKKANEDELKRLDEELEDAEKNLGESEIRDAMMAKAEYLCRIGDKEGALTAFRKTYDKTVALGHRLDIVFYLLRIGLFYMDNDLITRNTEKAKSLIEEGGDWDRRNRLKVYQGLYCVAIRDFKQAAELFLDTVSTFTSYELMDYKTFVTYTVYVSMIALERPDLREKVIKGAEILEVLHSLPAVRQYLFSLYECRYSVFFQSLAVVEQEMKKDWLFAPHYRYYVREMRIHAYSQLLESYRSLTLGYMAEAFGVGVEFIDQELSRFIAAGRLHCKIDKVNEIVETNRPDSKNWQYQETIKKGDLLLNRVQKLSRVINM

SEQ ID NO: 5942 - protein, 351 aa, Homo sapiens
MNESNDSTNYDMAPYYEALCKSLDWQIDVDLLNKMKKANEDELKRLDEELEDAEKNLGESEIRDAMMAKAEYLCRIGDKEGALTAFRKTYDKTVALGHRLDIVFYLLRIGLFYMDNDLITRNTEKAKSLIEEGGDWDRRNRLKVYQGLYCVAIRDFKQAAELFLDTVSTFTSYELMDYKTFVTYTVYVSMIALERPDLREKVIKGAEILEVLHSLPAVRQYLFSLYECRYSVFFQSLAVVEQEMKKDWLFAPHYRYYVREMRIHAYSQLLESYRSLTLGYMAEAFGVGVEFIDQELSRFIAAGRLHCKIDKVNEIVETNRPDSKNWQYQETIKKGDLLLNRVQKLSRVINM

SEQ ID NO: 5943 - protein, 350 aa, Homo sapiens
MPLENLEEEDMAPYYEALCKSLDWQIDVDLLNKMKKANEDELKRLDEELEDAEKNLGESEIRDAMMAKAEYLCRIGDKEGALTAFRKTYDKTVALGHRLDIVFYLLRIGLFYMDNDLITRNTEKAKSLIEEGGDWDRRNRLKVYQGLYCVAIRDFKQAAELFLDTVSTFTSYELMDYKTFVTYTVYVSMIALERPDLREKVIKGAEILEVLHSLPAVRQYLFSLYECRYSVFFQSLAVVEQEMKKDWLFAPHYRYYVREMRIHAYSQLLESYRSLTLGYMAEAFGVGVEFIDQELSRFIAAGRLHCKIDKVNEIVETNRPDSKNWQYQETIKKGDLLLNRVQKLSRVINM

SEQ ID NO: 5944 - protein, 442 aa, Homo sapiens
MPLENLEEEGLPKNPDLRIAQLRFLLSLPEHRGDAAVRDELMAAVRDNNFWNRIRQEQTEDCPPSSPSRGWHCQDWPSRKPPTSIRLCFAKPIIKRHRMPSYMAPYYEALCKSLDWQIDVDLLNKMKKANEDELKRLDEELEDAEKNLGESEIRDAMMAKAEYLCRIGDKEGALTAFRKTYDKTVALGHRLDIVFYLLRIGLFYMDNDLITRNTEKAKSLIEEGGDWDRRNRLKVYQGLYCVAIRDFKQAAELFLDTVSTFTSYELMDYKTFVTYTVYVSMIALERPDLREKVIKGAEILEVLHSLPAVRQYLFSLYECRYSVFFQSLAVVEQEMKKDWLFAPHYRYYVREMRIHAYSQLLESYRSLTLGYMAEAFGVGVEFIDQELSRFIAAGRLHCKIDKVNEIVETNRPDSKNWQYQETIKKGDLLLNRVQKLSRVINM

SEQ ID NO: 5945 - protein, 239 aa, Homo sapiens
MAKPCGVRLSGEARKQVEVFRQNLFQEAEEFLYRFLPQKIIYLNQLLQEDSLNVADLTSLRAPLDIPIPDPPPKDDEMETDKQEKKEVHKCGFLPGNEKVLSLLALVKPEVWTLKEKCILVITWIQHLIPKIEDGNDFGVAIQEKVLERVNAVKTKVEAFQTTISKYFSERGDAVAKASKETHVMDYRALVHERDEAAYGELRAMVLDLRAFYAELYHIISSNLEKIVNPKGEEKPSMY

SEQ ID NO: 5946 - protein, 70 aa, Homo sapiens
MVSVCRPWPAVAIALLALLVCLGALVDTCPIKPEAPGEDESLEELSHYYASLCHYLNVVTRQWWEGADMW

SEQ ID NO: 5947 - protein, 63 aa, Homo sapiens
MAAATLTSKLYSLLFRRTSTFALTIIVGVMFFERAFDQGADAIYDHINEGKLWKHIKHKYENK

SEQ ID NO: 5948 - protein, 62 aa, Homo sapiens
MAAATLTSKLYSLLFRRTSTFALTIIVGVMFFERAFDQGADAIYDHINEGVRACAIPDLGPA

SEQ ID NO: 5949 - protein, 148 aa, Homo sapiens
MARALCRLPRRGLWLLLAHHLFMTTACQEANYGALLRELCLTQFQVDMEAVGETLWCDWGRTIRSYRELADCTWHMAEKLGCFWPNAEVDRFFLAVHGRYFRSCPISGRAVRDPPGSILYPFIVVPITVTLLVTALVVWQSKRTEGIV

SEQ ID NO: 5950 - protein, 231 aa, Homo sapiens
MASAVFEGTSLVNMFVRGCWVNGIRRLIVSRRGDEEEFFEIRTEWSDRSVLYLHRSLADLGRLWQRLRDAFPEDRSELAQGPLRQGLVAIKEAHDIETRLNEVEKLLKTIISMPCKYSRSEVVLTFFERSPLDQVLKNDNVHKIQPSFQSPVKISEIMRSNGFCLANTETIVIDHSIPNGRDQQLGVDPTEHLFENGSEFPSELEDGDDPAAYVTNLSYYHLVPFETDIWD

SEQ ID NO: 5951 - protein, 196 aa, Homo sapiens
MNNGGKAEKENTPSEANLQEEEVRTLFVSGLPLDIKPRELYLLFRPFKGYEGSLIKLTSKQPVGFVSFDSRSEAEAAKNALNGIRFDPEIPQTLRLEFAKANTKMAKNKLVGTPNPSTPLPNTVPQFIAREPYELTVPALYPSSPEVWAPYPLYPAELAPALPPPAFTYPASLHAQMRWLPPSEATSQGWKSRQFC

SEQ ID NO: 5952 - protein, 204 aa, Homo sapiens
MNNGGKAEKENTPSEANLQEEEVRTLFVSGLPLDIKPRELYLLFRPFKGYEGSLIKLTSKQPVGFVSFDSRSEAEAAKNALNGIRFDPEIPQTLRLEFAKANTKMAKNKLVGTPNPSTPLPNTVPQFIAREPYELTVPALYPSSPEVWAPYPLYPAELAPALPPPAFTYPASLHAQLCEGQTVRRSHPLSAPSPDSASLAWFPV

SEQ ID NO: 5953 - protein, 219 aa, Homo sapiens
MNNGGKAEKENTPSEANLQEEEVRTLFVSGLPLDIKPRELYLLFRPFKGYEGSLIKLTSKQPVGFVSFDSRSEAEAAKNALNGIRFDPEIPQTLRLEFAKANTKMAKNKLVGTPNPSTPLPNTVPQFIAREPYELTVPALYPSSPEVWAPYPLYPAELAPALPPPAFTYPASLHAQCFSPEAKPNTPVFCPLLQQIRFVSGNVFVTYQPTADQQRELPC

SEQ ID NO: 5954 - protein, 143 aa, Homo sapiens
MNNGGKAEKENTPSEANLQEEEVRTLFVSGLPLDIKPRELYLLFRPFKGYEGSLIKLTSKQPVGFVSFDSRSEAEAAKNALNGIRFDPEIPQTLRLEFAKANTKMAKNKLVGTPNPSTPLPNTVPQFIAREPLGGANEHGERQ

SEQ ID NO: 5955 - protein, 152 aa, Homo sapiens
MNNGGKAEKENTPSEANLQEEEVRTLFVSGLPLDIKPRELYLLFRPFKGYEGSLIKLTSKQPVGFVSFDSRSEAEAAKNALNGIRFDPEIPQTLRLEFAKANTKMAKNKLVGTPNPSTPLPNTVPQFIAREPMRWLPPSEATSQGWKSRQFC

SEQ ID NO: 5956 - protein, 1043 aa, Homo sapiens
MAASFPPTLGLSSAPDEIQHPHIKFSEWKFKLFRVRSFEKTPEEAQKEKKDSFEGKPSLEQSPAVLDKADGQKPVPTQPLLKAHPKFSKKFHDNEKARGKAIHQANLRHLCRICGNSFRADEHNRRYPVHGPVDGKTLGLLRKKEKRATSWPDLIAKVFRIDVKADVDSIHPTEFCHNCWSIMHRKFSSAPCEVYFPRNVTMEWHPHTPSCDICNTARRGLKRKSLQPNLQLSKKLKTVLDQARQARQHKRRAQARISSKDVMKKIANCSKIHLSTKLLAVDFPEHFVKSISCQICEHILADPVETNCKHVFCRVCILRCLKVMGSYCPSCRYPCFPTDLESPVKSFLSVLNSLMVKCPAKECNEEVSLEKYNHHISSHKESKEIFVHINKGGRPRQHLLSLTRRAQKHRLRELKLQVKAFADKEEGGDVKSVCMTLFLLALRARNEHRQADELEAIMQGKGSGLQPAVCLAIRVNTFLSCSQYHKMYRTVKAITGRQIFQPLHALRNAEKVLLPGYHHFEWQPPLKNVSSSTDVGIIDGLSGLSSSVDDYPVDTIAKRFRYDSALVSALMDMEEDILEGMRSQDLDDYLNGPFTVVVKESCDGMGDVSEKHGSGPVVPEKAVRFSFTIMKITIAHSSQNVKVFEEAKPNSELCCKPLCLMLADESDHETLTAILSPLIAEREAMKSSELMLELGGILRTFKFIFRGTGYDEKLVREVEGLEASGSVYICTLCDATRLEASQNLVFHSITRSHAENLERYEVWRSNPYHESVEELRDRVKGVSAKPFIETVPSIDALHCDIGNAAEFYKIFQLEIGEVYKNPNASKEERKRWQATLDKHLRKKMNLKPIMRMNGNFARKLMTKETVDAVCELIPSEERHEALRELMDLYLKMKPVWRSSCPAKECPESLCQYSFNSQRFAELLSTKFKYRYEGKITNYFHKTLAHVPEIIERDGSIGAWASEGNESGNKLFRRFRKMNARQSKCYEMEDVLKHHWLYTSKYLQKFMNAHNALKTSGFTMNPQASLGDPLGIEDSLESQDSMEF

SEQ ID NO: 5957 - protein, 931 aa, Homo sapiens
MAASFPPTLGLSSAPDEIQHPHIKFSEWKFKLFRVRSFEKTPEEAQKEKKDSFEGKPSLEQSPAVLDKADGQKPVPTQPLLKAHPKFSKKFHDNEKARGKAIHQANLRHLCRICGNSFRADEHNRRYPVHGPVDGKTLGLLRKKEKRATSWPDLIAKVFRIDVKADVDSIHPTEFCHNCWSIMHRKFSSAPCEVYFPRNVTMEWHPHTPSCDICNTARRGLKRKSLQPNLQLSKKLKTVLDQARQARQHKRRAQARISSKDVMKKIANCSKIHLSTKLLAVDFPEHFVKSISCQICEHILADPVETNCKHVFCRVCILRCLKVMGSYCPSCRYPCFPTDLESPVKSFLSVLNSLMVKCPAKECNEEVSLEKYNHHISSHKESKEIFVHINKGGRPRQHLLSLTRRAQKHRLRELKLQVKAFADKEEGGDVKSVCMTLFLLALRARNEHRQADELEAIMQGKGSGLQPAVCLAIRVNTFLSCSQYHKMYRTVKAITGRQIFQPLHALRNAEKVLLPGYHHFEWQPPLKNVSSSTDVGIIDGLSGLSSSVDDYPVDTIAKRFRYDSALVSALMDMEEDILEGMRSQDLDDYLNGPFTVVVKESCDGMGDVSEKHGSGPVVPEKAVRFSFTIMKITIAHSSQNVKVFEEAKPNSELCCKPLCLMLADESDHETLTAILSPLIAEREAMKSSELMLELGGILRTFKFIFRGTGYDEKLVREVEGLEASGSVYICTLCDATRLEASQNLVFHSITRSHAENLERYEVWRSNPYHESVEELRDRVKGVSAKPFIETVPSIDALHCDIGNAAEFYKIFQLEIGEVYKNPNASKEERKRWQATLDKHLRKKMNLKPIMRMNGNFARKLMTKETVDAVCELIPSEERHEALRELMDLYLKMKPVWRSSCPAKECPESLCQYSFNSQRFAELLSTKFKYRN

SEQ ID NO: 5958 - protein, 339 aa, Homo sapiens
MAMQMQLEANADTSVEEESFGPQPISRLEQCGINANDVKKLEEAGFHTVEAVAYAPKKELINIKGISEAKADKILAEAAKLVPMGFTTATEFHQRRSEIIQITTGSKELDKLLQGGIETGSITEMFGEFRTGKTQICHTLAVTCQLPIDRGGGEGKAMYIDTEGTFRPERLLAVAERYGLSGSDVLDNVAYARAFNTDHQTQLLYQASAMMVESRYALLIVDSATALYRTDYSGRGELSARQMHLARFLRMLLRLADEFGVAVVITNQVVAQVDGAAMFAADPKKPIGGNIIAHASTTRLYLRKGRGETRICKIYDSPCLPEAEAMFAINADGVGDAKD

SEQ ID NO: 5959 - protein, 242 aa, Homo sapiens
MAMQMQLEANADTSVEEESFGPQPISRLEQCGINANDVKKLEEAGFHTVEAVAYAPKKELINIKGISEAKADKILAVAERYGLSGSDVLDNVAYARAFNTDHQTQLLYQASAMMVESRYALLIVDSATALYRTDYSGRGELSARQMHLARFLRMLLRLADEFGVAVVITNQVVAQVDGAAMFAADPKKPIGGNIIAHASTTRLYLRKGRGETRICKIYDSPCLPEAEAMFAINADGVGDAKD

SEQ ID NO: 5960 - protein, 280 aa, Homo sapiens
MAMQMQLEANADTSVEEESFGPQPISRLEQCGINANDVKKLEEAGFHTVEAVAYAPKKELINIKGISEAKADKILAEAAKLVPMGFTTATEFHQRRSEIIQITTGSKELDKLLQGGIETGSITEMFGEFRTGKTQICHTLAVTCQLPIDRGGGEGKAMYIDTEGTFRPERLLAVAERYGLSGSDVLDNVAYARAFNTDHQTQLLYQASAMMVESRYALLIVDSATALYRTDYSGRGELSARQMHLARFLRMLLRLADEIVSEERKRGNQNLQNLRLSLSS

SEQ ID NO: 5961 - protein, 340 aa, Homo sapiens
MAMQMQLEANADTSVEEESFGPQPISRLEQCGINANDVKKLEEAGFHTVEAVAYAPKKELINIKGISEAKADKILTESRSVARLECNSVILVYCTLRLSGSSDSPASASRVVGTTGGIETGSITEMFGEFRTGKTQICHTLAVTCQLPIDRGGGEGKAMYIDTEGTFRPERLLAVAERYGLSGSDVLDNVAYARAFNTDHQTQLLYQASAMMVESRYALLIVDSATALYRTDYSGRGELSARQMHLARFLRMLLRLADEFGVAVVITNQVVAQVDGAAMFAADPKKPIGGNIIAHASTTRLYLRKGRGETRICKIYDSPCLPEAEAMFAINADGVGDAKD

SEQ ID NO: 5962 - protein, 620 aa, Homo sapiens
MAAATADPGAGNPQPGDSSGGGAGGGLPSPGEQELSRRLQRLYPAVNQQETPLPRSWSPKDKYNYIGLSQGNLRVHYKGHGKNHKDAASVRATHPIPAACGIYYFEVKIVSKGRDGYMGIGLSAQGVNMNRLPGWDKHSYGYHGDDGHSFCSSGTGQPYGPTFTTGDVIGCCVNLINGTCFYTKNGHSLGIAFTDLPANLYPTVGLQTPGEIVDANFGQQPFLFDIEDYMREWRAKVQGTVHCFPISARLGEWQAVLQNMVSSYLVHHGYCATATAFARMTETPIQEEQASIKNRQKIQKLVLEGRVGEAIETTQRFYPGLLEHNPNLLFMLKCRQFVEMVNGTDSEVRSLSSRSPKSQDSYPGSPSLSPRHGPSSSHMHNTGADSPSCSNGVASTKSKQNHSKYPAPSSSSSSSSSSSSSSPSSVNYSESNSTDSTKSQHHSSTSNQETSDSEMEMEAEHYPNGVLGSMSTRIVNGAYKHEDLQTDESSMDDRHPRRQLCGGNQAATERIILFGRELQALSEQLGREYGKNLAHTEMLQDAFSLLAYSDPWSCPVGQQLDPIQREPVCAALNSAILESQNLPKQPPLMLALGQASECLRLMARAGLGSCSFARVDDYLH

SEQ ID NO: 5963 - protein, 533 aa, Homo sapiens
MGIGLSAQGVNMNRLPGWDKHSYGYHGDDGHSFCSSGTGQPYGPTFTTGDVIGCCVNLINGTCFYTKNGHSLGIAFTDLPANLYPTVGLQTPGEIVDANFGQQPFLFDIEDYMREWRAKVQGTVHCFPISARLGEWQAVLQNMVSSYLVHHGYCATATAFARMTETPIQEEQASIKNRQKIQKLVLEGRVGEAIETTQRFYPGLLEHNPNLLFMLKCRQFVEMVNGTDSEVRSLSSRSPKSQDSYPGSPSLSPRHGPSSSHMHNTGADSPSCSNGVASTKSKQNHSKYPAPSSSSSSSSSSSSSSPSSVNYSESNSTDSTKSQHHSSTSNQETSNPWLQLERRPNQAAPTTPPGPTPTSTPPHSDSEMEMEAEHYPNGVLGSMSTRIVNGAYKHEDLQTDESSMDDRHPRRQLCGGNQAATERIILFGRELQALSEQLGREYGKNLAHTEMLQDAFSLLAYSDPWSCPVGQQLDPIQREPVCAALNSAILESQNLPKQPPLMLALGQASECLRLMARAGLGSCSFARVDDYLH

SEQ ID NO: 5964 - protein, 594 aa, Homo sapiens
MAAATADPGAGNPQPGDSSGGGAGGGLPSPGEQELSRRLQRLYPAVNQQETPLPRSWSPKDKYNYIGLSQGNLRVHYKGHGKNHKDAASVRATHPIPAACGIYYFEVKIVSKGRDGYMGIGLSAQGVNMNRLPGIAFTDLPANLYPTVGLQTPGEIVDANFGQQPFLFDIEDYMREWRAKVQGTVHCFPISARLGEWQAVLQNMVSSYLVHHGYCATATAFARMTETPIQEEQASIKNRQKIQKLVLEGRVGEAIETTQRFYPGLLEHNPNLLFMLKCRQFVEMVNGTDSEVRSLSSRSPKSQDSYPGSPSLSPRHGPSSSHMHNTGADSPSCSNGVASTKSKQNHSKYPAPSSSSSSSSSSSSSSPSSVNYSESNSTDSTKSQHHSSTSNQETSNPWLQLERRPNQAAPTTPPGPTPTSTPPHSDSEMEMEAEHYPNGVLGSMSTRIVNGAYKHEDLQTDESSMDDRHPRRQLCGGNQAATERIILFGRELQALSEQLGREYGKNLAHTEMLQDAFSLLAYSDPWSCPVGQQLDPIQREPVCAALNSAILESQNLPKQPPLMLALGQASECLRLMARAGLGSCSFARVDDYLH

SEQ ID NO: 5965 - protein, 551 aa, Homo sapiens
MEEELPLFSGDSGKPVQATLSSLKMLDVGKWPIFSLCSEEELQLIRQACVFGSAGNEVLYTTVNDEIFVLGTNCCGCLGLGDVQSTIEPRRLDSLNGKKIACLSYGSGPHIVLATTEGEVFTWGHNAYSQLGNGTTNHGLVPCHISTNLSNKQVIEVACGSYHSLVLTSDGEVFAWGYNNSGQVGSGSTVNQPIPRRVTGCLQNKVVVTIACGQMCCMAVVDTGEVYVWGYNGNGQLGLGNSGNQPTPCRVAALQGIRVQRVACGYAHTLVLTDEGQVYAWGANSYGQLGTGNKSNQSYPTPVTVEKDRIIEIAACHSTHTSAAKTQGGHVYMWGQCRGQSVILPHLTHFSCTDDVFACFATPAVTWRLLSVEPDDHLTVAESLKREFDNPDTADLKFLVDGKYIYAHKVLLKIRCEHFRSSLEDNEDDIVEMSEFSYPVYRAFLEYLYTDSISLSPEEAVGLLDLATFYRENRLKKLCQQTIKQGICEENAIALLSAAVKYDAQDLEEFCFRFCINHLTVVTQTSGFAEMDHDLLKNFISKASRVGAFKN

SEQ ID NO: 5966 - protein, 527 aa, Homo sapiens
MLDVGKWPIFSLCSEEELQLIRQACVFGSAGNEVLYTTVNDEIFVLGTNCCGCLGLGDVQSTIEPRRLDSLNGKKIACLSYGSGPHIVLATTEGEVFTWGHNAYSQLGNGTTNHGLVPCHISTNLSNKQVIEVACGSYHSLVLTSDGEVFAWGYNNSGQVGSGSTVNQPIPRRVTGCLQNKVVVTIACGQMCCMAVVDTGEVYVWGYNGNGQLGLGNSGNQPTPCRVAALQGIRVQRVACGYAHTLVLTDEGQVYAWGANSYGQLGTGNKSNQSYPTPVTVEKDRIIEIAACHSTHTSAAKTQGGHVYMWGQCRGQSVILPHLTHFSCTDDVFACFATPAVTWRLLSVEPDDHLTVAESLKREFDNPDTADLKFLVDGKYIYAHKVLLKIRCEHFRSSLEDNEDDIVEMSEFSYPVYRAFLEYLYTDSISLSPEEAVGLLDLATFYRENRLKKLCQQTIKQGICEENAIALLSAAVKYDAQDLEEFCFRFCINHLTVVTQTSGFAEMDHDLLKNFISKASRVGAFKN

SEQ ID NO: 5967 - protein, 212 aa, Homo sapiens
MAKQYDVLFRLLLIGDSGVGKTCLLCRFTDNEFHSSHISTIGVDFKMKTIEVDGIKVRIQIWDTAGQERYQTITKQYYRRAQGIFLVYDISSERSYQHIMKWVSDVDEYAPEGVQKILIGNKADEEQKRQVGREQGQQLAKEYGMDFYETSACTNLNIKESFTRLTELVLQAHRKELEGLRMRASNELALAELEEEEGKPEGPANSSKTCWC

SEQ ID NO: 5968 - protein, 208 aa, Homo sapiens
MAKQYDVLFRLLLIGDSGVGKTCLLCRFTDNEFHSSHISTIGVDFKMKTIEVDGIKVRIQIWDTAGQERYQTITKQYYRRAQGIFLVYDISSERSYQHIMKWVSDVDEVGDATSLPGCGEGASPGKARRGPDGKANASRKLCLPQPWMKTSGTHQKASRRSLLGIRLMRSRNGRWEESKGSSWRRSMAWTSMKQVPAPTSTLKSHSRV

SEQ ID NO: 5969 - protein, 238 aa, Homo sapiens
MPPRKKRRQPSQKAPLLFHQQPLEGPKHSCASTQLPITHTRQVPSKPIDHSTITSWVSPDFDTAAGSLFPAYQKHQNRARHSSRKPTTSKFPHLTFESPQSSSSETLGIPLIRECPSESEKDVSRRPLVPVLSPQSCGNMSVQALQSLPYVFIPPDIQTPESSSVKEELIPQDQKENSLLSCTLHTGTPNSPEPGPVLVKDTPEDKYGIKVTWRRRQHLLAYLRERGKLSRSQFLVKS

SEQ ID NO: 5970 - protein, 224 aa, Homo sapiens
MPPRKKRRQPSQKAPLLFHQQPLEGPKHSCASTQLPITHTRQVSPDFDTAAGSLFPAYQKHQNRARHSSRKPTTSKFPHLTFESPQSSSSETLGIPLIRECPSESEKDVSRRPLVPVLSPQSCGNMSVQALQSLPYVFIPPDIQTPESSSVKEELIPQDQKENSLLSCTLHTGTPNSPEPGPVLVKDTPEDKYGIKVTWRRRQHLLAYLRERGKLSRSQFLVKS

SEQ ID NO: 5971 - protein, 578 aa, Homo sapiens
MGCGLNKLEKRDEKRPGNIYSTLKRPQVETKIDVSYEYRFLEFTTLSAAELPGSSAVRLASLRDLPAQLLELYQQGFSLAALHPFVQPTHEREKTPLEHIFRAILIKKTDRSQKTDLHNEGYILELDCCSSLDHPTDQKLIPEFIKKIQEAASQGLKFVGVIPQYHSSVNSAGSSAPVSTANSTEDARDAKNARGDHASLENEKPGTGDVCSAPAGRNQSPEPSSGPRGEVPLAKQPSSPSGEGDGGELSPQGVSKTLDGPESNPLEVHEEPLSGKMEIFTLFNKPKSHQKCRQYYPVTIPLHVSKNGQTVSGLDANWLEHMSDHFRKGGMLVNAVFYLGIVNDSLHGLTDGVFIFEAVSTEDSKTIQGYDAIVVEQWTVLEGVEVQTDYVPLLNSLAAYGWQLTCVLPTPVVKTTSEGSVSTKQIVFLQRPCLPQKIKKKESKFQWRFSREEMHNRQMRKSKGKLSARDKQQAEENEKNLEDQSSKAGDMGNCVSGQQQEGGVSEEMKGPVQEDKGEQLSPGGLLCGVGVEGEAVQNGPASHSRALVGICTGHSNPGEDARDGDAEEVRELGTVEEN

SEQ ID NO: 5972 - protein, 378 aa, Homo sapiens
MEVAELGFPETAVSQSRICLCAVLCGHWDFADMMVIRSLSLIRLEGVEGRDPVGGGNLTNKRPSCAPSPQDLSAQWKQLEDRGASSRRVDMAALFQEASSCPVCSDYLEKPMSLECGCAVCLKCINSLQKEPHGEDLLCCCSSMVSRKNKIRRNRQLERLASHIKELEPKLKKILQMNPRMRKFQVDMTLDANTANNFLLISDDLRSVRSGRIRQNRQDLAERFDVSVCILGSPRFTCGRHCWEVDVGTSTEWDLGVCRESVHRKGRIQLTTELGFWTVSLRDGGRLSATTVPLTFLFVDRKLQRVGIFLDMGMQNVSFFDAESGSHVYTFRSVSAEEPLRPFLAPSVPPNGDQGVLSICPLMNSGTTDAPVRPGEAK

SEQ ID NO: 5973 - protein, 76 aa, Homo sapiens
MEVAELGFPETAVSQSRICLCAVLCGHWDFADMMVIRSLSGHGCTLPRSKQLSRLLRLSGKTNVPGVWMRRLPQVH

SEQ ID NO: 5974 - protein, 317 aa, Homo sapiens
MKRLSLVTTNRLSPHGNFFTLCTFPLAVDMAALFQEASSCPVCSDYLEKPMSLECGCAVCLKCINSLQKEPHGEDLLCCCSSMVSRKNKIRRNRQLERLASHIKELEPKLKKILQMNPRMRKFQVDMTLDANTANNFLLISDDLRSVRSGRIRQNRQDLAERFDVSVCILGSPRFTCGRHCWEVDVGTSTEWDLGVCRESVHRKGRIQLTTELGFWTVSLRDGGRLSATTVPLTFLFVDRKLQRVGIFLDMGMQNVSFFDAESGSHVYTFRSVSAEEPLRPFLAPSVPPNGDQGVLSICPLMNSGTTDAPVRPGEAK

SEQ ID NO: 5975 - protein, 518 aa, Homo sapiens
MSCVKLWPSGAPAPLVSIEELENQELVGKGGFGTVFRAQHRKWGYDVAVKIVNSKAISREVKAMASLDNEFVLRLEGVIEKVNWDQDPKPALVTKFMENGSLSGLLQSQCPRPWPLLCRLLKEVVLGMFYLHDQNPVLLHRDLKPSNVLLDPELHVKLADFGLSTFQGGSQSGTGSGEPGGTLGYLAPELFVNVNRKASTASDVYSFGILMWAVLAGREVELPTEPSLVYEAVCNRQNRPSLAELPQAGPETPGLEGLKELMQLCWSSEPKDRPSFQECLPKTDEVFQMVENNMNAAVSTVKDFLSQLRSSNRRFSIPESGQGGTEMDGFRRTIENQHSRNDVMVSEWLNKLNLEEPPSSVPKKCPSLTKRSRAQEEQVPQAWTAGTSSDSMAQPPQTPETSTFRNQMPSPTSTGTPSPGPRGNQGAERQGMNWSCRTPEPNPVTGRPLVNIYNCSGVQVGDNNYLTMQQTTALPTWGLAPSGKGRGLQHPPPVGSQEGPKDPEAWSRPQGWYNHSGK

SEQ ID NO: 5976 - protein, 252 aa, Homo sapiens
MSCVKLWPSGAPAPLVSIEELENQELVGKGGFGTVFRAQHRKWGYDVAVKIVNSKAISREVKAMASLDNEFVLRLEGVIEKVNWDQDPKPALVTKFMENGSLSGLLQSQCPRPWPLLCRLLKEVVLGMFYLHDQNPVLLHRDLKPSNVLLDPELHVKLADFGLSTFQGGSQSGTGSGEPGGTLGYLAPELFVNVNRKASTASDVYSFGILMWAVLAGRECQPNHHSCTKQCATGRTGLHWLSCPKPGLRLPA

SEQ ID NO: 5977 - protein, 231 aa, Homo sapiens
MSCVKLWPSGAPAPLVSIEELENQELVGKGGFGTVFRAQHRKWGYDVAVKIVNSKAISREVKAMASLDNEFVLRLEGVIEKVNWDQDPKPALVTKFMENGSLSGLLQSQCPRPWPLLCRLLKEVVLGMFYLHDQNPVLLHRDLKPSNVLLDPELHVKLADFGLSTFQGGSQSGTGSGEPGGTLGYLAPELFVNVNRKASTASDVYSFGILMWAVLAGREVECKTLGGFWDP

SEQ ID NO: 5978 - protein, 1223 aa, Homo sapiens
MMSLSVRPQRRLLSARVNRSQSFAGVLGSHERGPSLSFRSFPVFSPPGPPRKPPALSRVSRMFSVAHPAAKVPQPERLDLVYTALKRGLTAYLEVHQQEQEKLQGQIRESKRNSRLGFLYDLDKQVKSIERFLRRLEFHASKIDELYEAYCVQRRLRDGAYNMVRAYTTGSPGSREARDSLAEATRGHREYTESMCLLESELEAQLGEFHLRMKGLAGFARLCVGDQYEICMKYGRQRWKLRGRIEGSGKQVWDSEETIFLPLLTEFLSIKVTELKGLANHVVVGSVSCETKDLFAALPQVVAVDINDLGTIKLSLEVTWSPFDKDDQPSAASSVNKASTVTKRFSTYSQSPPDTPSLREQAFYNMLRRQEELENGTAWSLSSESSDDSSSPQLSGTARHSPAPRPLVQQPEPLPIQVAFRRPETPSSGPLDEEGAVAPVLANGHAPYSRTLSHISEASVDAALAEASVEAVGPESLAWGPSPPTHPAPTHGEHPSPVPPALDPGHSATSSTLGTTGSVPTSTDPAPSAHLDSVHKSTDSGPSELPGPTHTTTGSTYSAITTTHSAPSPLTHTTTGSTHKPIISTLTTTGPTLNIIGPVQTTTSPTHTMPSPTHTTASPTHTSTSPTHTPTSPTHKTSMSPPTTTSPTPSGMGLVQTATSPTHPTTSPTHPTTSPILINVSPSTSLELATLSSPSKHSDPTLPGTDSLPCSPPVSNSYTQADPMAPRTPHPSPAHSSRKPLTSPAPDPSESTVQSLSPTPSPPTPAPQHSDLCLAMAVQTPVPTAAGGSGDRSLEEALGALMAALDDYRGQFPELQGLEQEVTRLESLLMQRQGLTRSRASSLSITVEHALESFSFLNEDEDEDNDVPGDRPPSSPEAGAEDSIDSPSARPLSTGCPALDAALVRHLYHCSRLLLKLGTFGPLRCQEAWALERLLREARVLEAVCEFSRRWEIPASSAQEVVQFSASRPGFLTFWDQCTERLSCFLCPVERVLLTFCNQYGARLSLRQPGLAEAVCVKFLEDALGQKLPRRPQPGPGEQLTVFQFWSFVETLDSPTMEAYVTETAEEVLLVRNLNSDDQAVVLKALRLAPEGRLRRDGLRALSSLLVHGNNKVMAAVSTQLRSLSLGPTFRERALLCFLDQLEDEDVQTRVAGCLALGCIKAPEGIEPLVYLCQTDTEAVREAARQSLQQCGEEGQSAHRRLEESLDALPRIFGPGSMASTAF

SEQ ID NO: 5979 - protein, 1219 aa, Homo sapiens
MMSLSVRPQRRLLSARVNRSQSFAGVLGSHERGPRSFPVFSPPGPPRKPPALSRVSRMFSVAHPAAKVPQPERLDLVYTALKRGLTAYLEVHQQEQEKLQGQIRESKRNSRLGFLYDLDKQVKSIERFLRRLEFHASKIDELYEAYCVQRRLRDGAYNMVRAYTTGSPGSREARDSLAEATRGHREYTESMCLLESELEAQLGEFHLRMKGLAGFARLCVGDQYEICMKYGRQRWKLRGRIEGSGKQVWDSEETIFLPLLTEFLSIKVTELKGLANHVVVGSVSCETKDLFAALPQVVAVDINDLGTIKLSLEVTWSPFDKDDQPSAASSVNKASTVTKRFSTYSQSPPDTPSLREQAFYNMLRRQEELENGTAWSLSSESSDDSSSPQLSGTARHSPAPRPLVQQPEPLPIQVAFRRPETPSSGPLDEEGAVAPVLANGHAPYSRTLSHISEASVDAALAEASVEAVGPESLAWGPSPPTHPAPTHGEHPSPVPPALDPGHSATSSTLGTTGSVPTSTDPAPSAHLDSVHKSTDSGPSELPGPTHTTTGSTYSAITTTHSAPSPLTHTTTGSTHKPIISTLTTTGPTLNIIGPVQTTTSPTHTMPSPTHTTASPTHTSTSPTHTPTSPTHKTSMSPPTTTSPTPSGMGLVQTATSPTHPTTSPTHPTTSPILINVSPSTSLELATLSSPSKHSDPTLPGTDSLPCSPPVSNSYTQADPMAPRTPHPSPAHSSRKPLTSPAPDPSESTVQSLSPTPSPPTPAPQHSDLCLAMAVQTPVPTAAGGSGDRSLEEALGALMAALDDYRGQFPELQGLEQEVTRLESLLMQRQGLTRSRASSLSITVEHALESFSFLNEDEDEDNDVPGDRPPSSPEAGAEDSIDSPSARPLSTGCPALDAALVRHLYHCSRLLLKLGTFGPLRCQEAWALERLLREARVLEAVCEFSRRWEIPASSAQEVVQFSASRPGFLTFWDQCTERLSCFLCPVERVLLTFCNQYGARLSLRQPGLAEAVCVKFLEDALGQKLPRRPQPGPGEQLTVFQFWSFVETLDSPTMEAYVTETAEEVLLVRNLNSDDQAVVLKALRLAPEGRLRRDGLRALSSLLVHGNNKVMAAVSTQLRSLSLGPTFRERALLCFLDQLEDEDVQTRVAGCLALGCIKAPEGIEPLVYLCQTDTEAVREAARQSLQQCGEEGQSAHRRLEESLDALPRIFGPGSMASTAF

SEQ ID NO: 5980 - protein, 1233 aa, Homo sapiens
MNTKKRGSPARTHSMMSLSVRPQRRLLSARVNRSQSFAGVLGSHERGPRSFPVFSPPGPPRKPPALSRVSRMFSVAHPAAKVPQPERLDLVYTALKRGLTAYLEVHQQEQEKLQGQIRESKRNSRLGFLYDLDKQVKSIERFLRRLEFHASKIDELYEAYCVQRRLRDGAYNMVRAYTTGSPGSREARDSLAEATRGHREYTESMCLLESELEAQLGEFHLRMKGLAGFARLCVGDQYEICMKYGRQRWKLRGRIEGSGKQVWDSEETIFLPLLTEFLSIKVTELKGLANHVVVGSVSCETKDLFAALPQVVAVDINDLGTIKLSLEVTWSPFDKDDQPSAASSVNKASTVTKRFSTYSQSPPDTPSLREQAFYNMLRRQEELENGTAWSLSSESSDDSSSPQLSGTARHSPAPRPLVQQPEPLPIQVAFRRPETPSSGPLDEEGAVAPVLANGHAPYSRTLSHISEASVDAALAEASVEAVGPESLAWGPSPPTHPAPTHGEHPSPVPPALDPGHSATSSTLGTTGSVPTSTDPAPSAHLDSVHKSTDSGPSELPGPTHTTTGSTYSAITTTHSAPSPLTHTTTGSTHKPIISTLTTTGPTLNIIGPVQTTTSPTHTMPSPTHTTASPTHTSTSPTHTPTSPTHKTSMSPPTTTSPTPSGMGLVQTATSPTHPTTSPTHPTTSPILINVSPSTSLELATLSSPSKHSDPTLPGTDSLPCSPPVSNSYTQADPMAPRTPHPSPAHSSRKPLTSPAPDPSESTVQSLSPTPSPPTPAPQHSDLCLAMAVQTPVPTAAGGSGDRSLEEALGALMAALDDYRGQFPELQGLEQEVTRLESLLMQRQGLTRSRASSLSITVEHALESFSFLNEDEDEDNDVPGDRPPSSPEAGAEDSIDSPSARPLSTGCPALDAALVRHLYHCSRLLLKLGTFGPLRCQEAWALERLLREARVLEAVCEFSRRWEIPASSAQEVVQFSASRPGFLTFWDQCTERLSCFLCPVERVLLTFCNQYGARLSLRQPGLAEAVCVKFLEDALGQKLPRRPQPGPGEQLTVFQFWSFVETLDSPTMEAYVTETAEEVLLVRNLNSDDQAVVLKALRLAPEGRLRRDGLRALSSLLVHGNNKVMAAVSTQLRSLSLGPTFRERALLCFLDQLEDEDVQTRVAGCLALGCIKAPEGIEPLVYLCQTDTEAVREAARQSLQQCGEEGQSAHRRLEESLDALPRIFGPGSMASTAF

SEQ ID NO: 5981 - protein, 1239 aa, Homo sapiens
MTIWQMQKQAQRGSPARTHSMMSLSVRPQRRLLSARVNRSQSFAGVLGSHERGPRSFPVFSPPGPPRKPPALSRVSRMFSVAHPAAKVPQPERLDLVYTALKRGLTAYLEVHQQEQEKLQGQIRESKRNSRLGFLYDLDKQVKSIERFLRRLEFHASKIDELYEAYCVQRRLRDGAYNMVRAYTTGSPGSREARDSLAEATRGHREYTESMCLLESELEAQLGEFHLRMKGLAGFARLCVGDQYEICMKYGRQRWKLRGRIEGSGKQVWDSEETIFLPLLTEFLSIKVTELKGLANHVVVGSVSCETKDLFAALPQVVAVDINDLGTIKLSLEVTWSPFDKDDQPSAASSVNKASTVTKRFSTYSQSPPDTPSLREQAFYNMLRRQEELENGTAWSLSSESSDDSSSPQLSGTARHSPAPRPLVQQPEPLPIQVAFRRPETPSSGPLDEEGAVAPVLANGHAPYSRTLSHISEASVDAALAEASVEAVGPESLAWGPSPPTHPAPTHGEHPSPVPPALDPGHSATSSTLGTTGSVPTSTDPAPSAHLDSVHKSTDSGPSELPGPTHTTTGSTYSAITTTHSAPSPLTHTTTGSTHKPIISTLTTTGPTLNIIGPVQTTTSPTHTMPSPTHTTASPTHTSTSPTHTPTSPTHKTSMSPPTTTSPTPSGMGLVQTATSPTHPTTSPTHPTTSPILINVSPSTSLELATLSSPSKHSDPTLPGTDSLPCSPPVSNSYTQADPMAPRTPHPSPAHSSRKPLTSPAPDPSESTVQSLSPTPSPPTPAPQHSDLCLAMAVQTPVPTAAGGSGDRSLEEALGALMAALDDYRGQFPELQGLEQEVTRLESLLMQRQGLTRSRASSLSITVEHALESFSFLNEDEDEDNDVPGDRPPSSPEAGAEDSIDSPSARPLSTGCPALDAALVRHLYHCSRLLLKLGTFGPLRCQEAWALERLLREARVLEAVCEFSRRWEIPASSAQEVVQFSASRPGFLTFWDQCTERLSCFLCPVERVLLTFCNQYGARLSLRQPGLAEAVCVKFLEDALGQKLPRRPQPGPGEQLTVFQFWSFVETLDSPTMEAYVTETAEEVLLVRNLNSDDQAVVLKALRLAPEGRLRRDGLRALSSLLVHGNNKVMAAVSTQLRSLSLGPTFRERALLCFLDQLEDEDVQTRVAGCLALGCIKAPEGIEPLVYLCQTDTEAVREAARQSLQQCGEEGQSAHRRLEESLDALPRIFGPGSMASTAF

SEQ ID NO: 5982 - protein, 1297 aa, Homo sapiens
MGRSGKLPSGVSAKLKRWKKGHSSDSNPAICRHRQAARSRFFSRPSGRSDLTVDAVKLHNELQSGSLRLGKSEAPETPMEEEAELVLTEKSSGTFLSGLSDCTNVTFSKVQRFWESNSAAHKEICAVLAAVTEVIRSQGGKETETEYFAALMTTMEAVESPESLAAVAYLLNLVLKRVPSPVLIKKFSDTSKAFMDIMSAQASSGSTSVLRWVLSCLATLLRKQDLEAWGYPVTLQVYHGLLSFTVHPKPKIRKAAQHGVCSVLKGSEFMFEKAPAHHPAAISTAKFCIQEIEKSGGSKEATTTLHMLTLLKDLLPCFPEGLVKSCSETLLRVMTLSHVLVTACAMQAFHSLFHARPGLSTLSAELNAQIITALYDYVPSENDLQPLLAWLKVMEKAHINLVRLQWDLGLGHLPRFFGTAVTCLLSPHSQVLTAATQSLKEILKECVAPHMADIGSVTSSASGPAQSVAKMFRAVEEGLTYKFHAAWSSVLQLLCVFFEACGRQAHPVMRKCLQSLCDLRLSPHFPHTAALDQAVGAAVTSMGPEVVLQAVPLEIDGSEETLDFPRSWLLPVIRDHVQETRLGFFTTYFLPLANTLKSKAMDLAQAGSTVESKIYDTLQWQMWTLLPGFCTRPTDVAISFKGLARTLGMAISERPDLRVTVCQALRTLITKGCQAEADRAEVSRFAKNFLPILFNLYGQPVAAGDTPAPRRAVLETIRTYLTITDTQLVNSLLEKASEKVLDPASSDFTRLSVLDLVVALAPCADEAAISKLYSTIRPYLESKAHGVQKKAYRVLEEVCASPQGPGALFVQSHLEDLKKTLLDSLRSTSSPAKRPRLKCLLHIVRKLSAEHKEFITALIPEVILCTKEVSVGARKNAFALLVEMGHAFLRFGSNQEEALQCYLVLIYPGLVGAVTMVSCSILALTHLLFEFKGLMGTSTVEQLLENVCLLLASRTRDVVKSALGFIKVAVTVMDVAHLAKHVQLVMEAIGKLSDDMRRHFRMKLRNLFTKFIRKFGFELVKRLLPEEYHRVLVNIRKAEARAKRHRALSQAAVEEEEEEEEEEEPAQGKGDSIEEILADSEDEEDNEEEERSRGKEQRKLARQRSRAWLKEGGGDEPLNFLDPKVAQRVLATQPGPGRGRKKDHGFKVSADGRLIIREEADGNKMEEEEGAKGEDEEMADPMEDVIIRNKKHQKLKHQKEAEEEELEIPPQYQAGGSGIHRPVAKKAMPGAEYKAKKAKGDVKKKGRPDPYAYIPLNRSKLNRRKKMKLQGQFKGLVKAARRGSQVGHKNRRKDRRP

SEQ ID NO: 5983 - protein, 1197 aa, Homo sapiens
MGRSGKLPSGVSAKLKRWKKGHSSDSNPAICRHRQAARSRFFSRPSGRSDLTVDAVKLHNELQSGSLRLGKSEAPETPMEEEAELVLTEKSSGTFLSGLSDCTNVTFSKVQRFWESNSAAHKEICAVLAAVTEVIRSQGGKETETEYFAALIRKAAQHGVCSVLKGSEFMFEKAPAHHPAAISTAKFCIQEIEKSGGSKEATTTLHMLTLLKDLLPCFPEGLVKSCSETLLRVMTLSHVLVTACAMQAFHSLFHARPGLSTLSAELNAQIITALYDYVPSENDLQPLLAWLKVMEKAHINLVRLQWDLGLGHLPRFFGTAVTCLLSPHSQVLTAATQSLKEILKECVAPHMADIGSVTSSASGPAQSVAKMFRAVEEGLTYKFHAAWSSVLQLLCVFFEACGRQAHPVMRKCLQSLCDLRLSPHFPHTAALDQAVGAAVTSMGPEVVLQAVPLEIDGSEETLDFPRSWLLPVIRDHVQETRLGFFTTYFLPLANTLKSKAMDLAQAGSTVESKIYDTLQWQMWTLLPGFCTRPTDVAISFKGLARTLGMAISERPDLRVTVCQALRTLITKGCQAEADRAEVSRFAKNFLPILFNLYGQPVAAGDTPAPRRAVLETIRTYLTITDTQLVNSLLEKASEKVLDPASSDFTRLSVLDLVVALAPCADEAAISKLYSTIRPYLESKAHGVQKKAYRVLEEVCASPQGPGALFVQSHLEDLKKTLLDSLRSTSSPAKRPRLKCLLHIVRKLSAEHKEFITALIPEVILCTKEVSVGARKNAFALLVEMGHAFLRFGSNQEEALQCYLVLIYPGLVGAVTMVSCSILALTHLLFEFKGLMGTSTVEQLLENVCLLLASRTRDVVKSALGFIKVAVTVMDVAHLAKHVQLVMEAIGKLSDDMRRHFRMKLRNLFTKFIRKFGFELVKRLLPEEYHRVLVNIRKAEARAKRHRALSQAAVEEEEEEEEEEEPAQGKGDSIEEILADSEDEEDNEEEERSRGKEQRKLARQRSRAWLKEGGGDEPLNFLDPKVAQRVLATQPGPGRGRKKDHGFKVSADGRLIIREEADGNKMEEEEGAKGEDEEMADPMEDVIIRNKKHQKLKHQKEAEEEELEIPPQYQAGGSGIHRPVAKKAMPGAEYKAKKAKGDVKKKGRPDPYAYIPLNRSKLNRRKKMKLQGQFKGLVKAARRGSQVGHKNRRKDRRP

SEQ ID NO: 5984 - protein, 1236 aa, Homo sapiens
MGRSGKLPSGVSAKLKRWKKGHSSDSNPAICRHRQAARSRFFSRPSGRSDLTVDAVKLHNELQSGSLRLGKSEAPETPMEEEAELVLTEKSSGTFLSGLSDCTNVTFSKVQRFWESNSAAHKEICAVLAAVTEVIRSQGGKETETEYFAALVLSCLATLLRKQDLEAWGYPVTLQVYHGLLSFTVHPKPKIRKAAQHGVCSVLKGSEFMFEKAPAHHPAAISTAKFCIQEIEKSGGSKEATTTLHMLTLLKDLLPCFPEGLVKSCSETLLRVMTLSHVLVTACAMQAFHSLFHARPGLSTLSAELNAQIITALYDYVPSENDLQPLLAWLKVMEKAHINLVRLQWDLGLGHLPRFFGTAVTCLLSPHSQVLTAATQSLKEILKECVAPHMADIGSVTSSASGPAQSVAKMFRAVEEGLTYKFHAAWSSVLQLLCVFFEACGRQAHPVMRKCLQSLCDLRLSPHFPHTAALDQAVGAAVTSMGPEVVLQAVPLEIDGSEETLDFPRSWLLPVIRDHVQETRLGFFTTYFLPLANTLKSKAMDLAQAGSTVESKIYDTLQWQMWTLLPGFCTRPTDVAISFKGLARTLGMAISERPDLRVTVCQALRTLITKGCQAEADRAEVSRFAKNFLPILFNLYGQPVAAGDTPAPRRAVLETIRTYLTITDTQLVNSLLEKASEKVLDPASSDFTRLSVLDLVVALAPCADEAAISKLYSTIRPYLESKAHGVQKKAYRVLEEVCASPQGPGALFVQSHLEDLKKTLLDSLRSTSSPAKRPRLKCLLHIVRKLSAEHKEFITALIPEVILCTKEVSVGARKNAFALLVEMGHAFLRFGSNQEEALQCYLVLIYPGLVGAVTMVSCSILALTHLLFEFKGLMGTSTVEQLLENVCLLLASRTRDVVKSALGFIKVAVTVMDVAHLAKHVQLVMEAIGKLSDDMRRHFRMKLRNLFTKFIRKFGFELVKRLLPEEYHRVLVNIRKAEARAKRHRALSQAAVEEEEEEEEEEEPAQGKGDSIEEILADSEDEEDNEEEERSRGKEQRKLARQRSRAWLKEGGGDEPLNFLDPKVAQRVLATQPGPGRGRKKDHGFKVSADGRLIIREEADGNKMEEEEGAKGEDEEMADPMEDVIIRNKKHQKLKHQKEAEEEELEIPPQYQAGGSGIHRPVAKKAMPGAEYKAKKAKGDVKKKGRPDPYAYIPLNRSKLNRRKKMKLQGQFKGLVKAARRGSQVGHKNRRKDRRP

SEQ ID NO: 5985 - protein, 2426 aa, Homo sapiens
MATNIEQIFRSFVVSKFREIQQELSSGRNEGQLNGETNTPIEGNQAGDAAASARSLPNEEIVQKIEEVLSGVLDTELRYKPDLKEGSRKSRCVSVQTDPTDEIPTKKSKKHKKHKNKKKKKKKEKEKKYKRQPEESESKTKSHDDGNIDLESDSFLKFDSEPSAVALELPTRAFGPSETNESPAVVLEPPVVSMEVSEPHILETLKPATKTAELSVVSTSVISEQSEQSVAVMPEPSMTKILDSFAAAPVPTTTLVLKSSEPVVTMSVEYQMKSVLKSVESTSPEPSKIMLVEPPVAKVLEPSETLVVSSETPTEVYPEPSTSTTMDFPESSAIEALRLPEQPVDVPSEIADSSMTRPQELPELPKTTALELQESSVASAMELPGPPATSMPELQGPPVTPVLELPGPSATPVPELPGPLSTPVPELPGPPATAVPELPGPSVTPVPQLSQELPGLPAPSMGLEPPQEVPEPPVMAQELPGLPLVTAAVELPEQPAVTVAMELTEQPVTTTELEQPVGMTTVEHPGHPEVTTATGLLGQPEATMVLELPGQPVATTALELPGQPSVTGVPELPGLPSATRALELSGQPVATGALELPGPLMAAGALEFSGQSGAAGALELLGQPLATGVLELPGQPGAPELPGQPVATVALEISVQSVVTTSELSTMTVSQSLEVPSTTALESYNTVAQELPTTLVGETSVTVGVDPLMAPESHILASNTMETHILASNTMDSQMLASNTMDSQMLASNTMDSQMLASSTMDSQMLATSSMDSQMLATSSMDSQMLATSTMDSQMLATSSMDSQMLATSSMDSQMLATSSMDSQMLATSSMDSQMLATSTMDSQMLATSTMDSQMLATSSMDSQMLASGTMDSQMLASGTMDAQMLASGTMDAQMLASSTQDSAMLGSKSPDPYRLAQDPYRLAQDPYRLGHDPYRLGHDAYRLGQDPYRLGHDPYRLTPDPYRMSPRPYRIAPRSYRIAPRPYRLAPRPLMLASRRSMMMSYAAERSMMSSYERSMMSYERSMMSPMAERSMMSAYERSMMSAYERSMMSPMAERSMMSAYERSMMSAYERSMMSPMADRSMMSMGADRSMMSSYSAADRSMMSSYSAADRSMMSSYTADRSMMSMAADSYTDSYTDTYTEAYMVPPLPPEEPPTMPPLPPEEPPMTPPLPPEEPPEGPALPTEQSALTAENTWPTEVPSSPSEESVSQPEPPVSQSEISEPSAVPTDYSVSASDPSVLVSEAAVTVPEPPPEPESSITLTPVESAVVAEEHEVVPERPVTCMVSETPAMSAEPTVLASEPPVMSETAETFDSMRASGHVASEVSTSLLVPAVTTPVLAESILEPPAMAAPESSAMAVLESSAVTVLESSTVTVLESSTVTVLEPSVVTVPEPPVVAEPDYVTIPVPVVSALEPSVPVLEPAVSVLQPSMIVSEPSVSVQESTVTVSEPAVTVSEQTQVIPTEVAIESTPMILESSIMSSHVMKGINLSSGDQNLAPEIGMQEIALHSGEEPHAEEHLKGDFYESEHGINIDLNINNHLIAKEMEHNTVCAAGTSPVGEIGEEKILPTSETKQRTVLDTYPGVSEADAGETLSSTGPFALEPDATGTSKGIEFTTASTLSLVNKYDVDLSLTTQDTEHDMVISTSPSGGSEADIEGPLPAKDIHLDLPSNNNLVSKDTEEPLPVKESDQTLAALLSPKESSGGEKEVPPPPKETLPDSGFSANIEDINEADLVRPLLPKDMERLTSLRAGIEGPLLASDVGRDRSAASPVVSSMPERASESSSEEKDDYEIFVKVKDTHEKSKKNKNRDKGEKEKKRDSSLRSRSKRSKSSEHKSRKRTSESRSRARKRSSKSKSHRSQTRSRSRSRRRRRSSRSRSKSRGRRSVSKEKRKRSPKHRSKSRERKRKRSSSRDNRKTVRARSRTPSRRSRSHTPSRRRRSRSVGRRRSFSISPSRRSRTPSRRSRTPSRRSRTPSRRSRTPSRRSRTPSRRSRTPSRRRRSRSVVRRRSFSISPVRLRRSRTPLRRRFSRSPIRRKRSRSSERGRSPKRLTDLDKAQLLEIAKANAAAMCAKAGVPLPPNLKPAPPPTIEEKVAKKSGGATIEELTEKCKQIAQSKEDDDVIVNKPHVSDEEEEEPPFYHHPFKLSEPKPIFFNLNIAAAKPTPPKSQVTLTKEFPVSSGSQHRKKEADSVYGEWVPVEKNGEENKDDDNVFSSNLPSEPVDISTAMSERALAQKRLSENAFDLEAMSMLNRAQERIDAWAQLNSIPGQFTGSTGVQVLTQEQLANTGAQAWIKKDQFLRAAPVTGGMGAVLMRKMGWREGEGLGKNKEGNKEPILVDFKTDRKGLVAVGERAQKRSGNFSAAMKDLSGKHPVSALMEICNKRRWQPPEFLLVHDSGPDHRKHFLFRVLRNGALTRPNCMFFLNRY

SEQ ID NO: 5986 - protein, 2140 aa, Homo sapiens
MATNIEQIFRSFVVSKFREIQQELSSGRNEGQLNGETNTPIEGNQAGDAAASARSLPNEEIVQKIEEVLSGVLDTELRYKPDLKEGSRKSRCVSVQTDPTDEIPTKKSKKHKKHKNKKKKKKKEKEKKYKRQPEESESKTKSHDDGNIDLESDSFLKFDSEPSAVALELPTRAFGPSETNESPAVVLEPPVVSMEVSEPHILETLKPATKTAELSVVSTSVISEQSEQSVAVMPEPSMTKILDSFAAAPVPTTTLVLKSSEPVVTMSVEYQMKSVLKSVESTSPEPSKIMLVEPPVAKVLEPSETLVVSSETPTEVYPEPSTSTTMDFPESSAIEALRLPEQPVDVPSEIADSSMTRPQELPELPKTTALELQESSVASAMELPGPPATSMPELQGPPVTPVLELPGPSATPVPELPGPLSTPVPELPGPPATAVPELPGPSVTPVPQLSQELPGLPAPSMGLEPPQEVPEPPVMAQELPGLPLVTAAVELPEQPAVTVAMELTEQPVTTTELEQPVGMTTVEHPGHPEVTTATGLLGQPEATMVLELPGQPVATTALELPGQPSVTGVPELPGLPSATRALELSGQPVATGALELPGPLMAAGALEFSGQSGAAGALELLGQPLATGVLELPGQPGAPELPGQPVATVALEISVQSVVTTSELSTMTVSQSLEVPSTTALESYNTQRSMMSSYERSMMSYERSMMSPMAERSMMSAYERSMMSAYERSMMSPMAERSMMSAYERSMMSAYERSMMSPMADRSMMSMGADRSMMSSYSAADRSMMSSYSAADRSMMSSYTADRSMMSMAADSYTDSYTDTYTEAYMVPPLPPEEPPTMPPLPPEEPPMTPPLPPEEPPEGPALPTEQSALTAENTWPTEVPSSPSEESVSQPEPPVSQSEISEPSAVPTDYSVSASDPSVLVSEAAVTVPEPPPEPESSITLTPVESAVVAEEHEVVPERPVTCMVSETPAMSAEPTVLASEPPVMSETAETFDSMRASGHVASEVSTSLLVPAVTTPVLAESILEPPAMAAPESSAMAVLESSAVTVLESSTVTVLESSTVTVLEPSVVTVPEPPVVAEPDYVTIPVPVVSALEPSVPVLEPAVSVLQPSMIVSEPSVSVQESTVTVSEPAVTVSEQTQVIPTEVAIESTPMILESSIMSSHVMKGINLSSGDQNLAPEIGMQEIALHSGEEPHAEEHLKGDFYESEHGINIDLNINNHLIAKEMEHNTVCAAGTSPVGEIGEEKILPTSETKQRTVLDTYPGVSEADAGETLSSTGPFALEPDATGTSKGIEFTTASTLSLVNKYDVDLSLTTQDTEHDMVISTSPSGGSEADIEGPLPAKDIHLDLPSNNNLVSKDTEEPLPVKESDQTLAALLSPKESSGGEKEVPPPPKETLPDSGFSANIEDINEADLVRPLLPKDMERLTSLRAGIEGPLLASDVGRDRSAASPVVSSMPERASESSSEEKDDYEIFVKVKDTHEKSKKNKNRDKGEKEKKRDSSLRSRSKRSKSSEHKSRKRTSESRSRARKRSSKSKSHRSQTRSRSRSRRRRRSSRSRSKSRGRRSVSKEKRKRSPKHRSKSRERKRKRSSSRDNRKTVRARSRTPSRRSRSHTPSRRRRSRSVGRRRSFSISPSRRSRTPSRRSRTPSRRSRTPSRRSRTPSRRSRTPSRRSRTPSRRRRSRSVVRRRSFSISPVRLRRSRTPLRRRFSRSPIRRKRSRSSERGRSPKRLTDLDKAQLLEIAKANAAAMCAKAGVPLPPNLKPAPPPTIEEKVAKKSGGATIEELTEKCKQIAQSKEDDDVIVNKPHVSDEEEEEPPFYHHPFKLSEPKPIFFNLNIAAAKPTPPKSQVTLTKEFPVSSGSQHRKKEADSVYGEWVPVEKNGEENKDDDNVFSSNLPSEPVDISTAMSERALAQKRLSENAFDLEAMSMLNRAQERIDAWAQLNSIPGQFTGSTGVQVLTQEQLANTGAQAWIKKDQFLRAAPVTGGMGAVLMRKMGWREGEGLGKNKEGNKEPILVDFKTDRKGLVAVGERAQKRSGNFSAAMKDLSGKHPVSALMEICNKRRWQPPEFLLVHDSGPDHRKHFLFRVLINGSAYQPSFASPNKKHAKATAATVVLQAMGLVPKDLMANATCFRSASRR

SEQ ID NO: 5987 - protein, 2303 aa, Homo sapiens
MATNIEQIFRSFVVSKFREIQQELSSGRNEGQLNGETNTPIEGNQAGDAAASARSLPNEEIVQKIEEVLSGVLDTELRYKPDLKEGSRKSRCVSVQTDPTDEIPTKKSKKHKKHKNKKKKKKKEKEKKYKRQPEESESKTKSHDDGNIDLESDSFLKFDSEPSAVALELPTRAFGPSETNESPAVVLEPPVVSMEVSEPHILETLKPATKTAELSVVSTSVISEQSEQSVAVMPEPSMTKILDSFAAAPVPTTTLVLKSSEPVVTMSVEYQMKSVLKSVESTSPEPSKIMLVEPPVAKVLEPSETLVVSSETPTEVYPEPSTSTTMDFPESSAIEALRLPEQPVDVPSEIADSSMTRPQELPELPKTTALELQESSVASAMELPGPPATSMPELQGPPVTPVLELPGPSATPVPELPGPLSTPVPELPGPPATAVPELPGPSVTPVPQLSQELPGLPAPSMGLEPPQEVPEPPVMAQELPGLPLVTAAVELPEQPAVTVAMELTEQPVTTTELEQPVGMTTVEHPGHPEVTTATGLLGQPEATMVLELPGQPVATTALELPGQPSVTGVPELPGLPSATRALELSGQPVATGALELPGPLMAAGALEFSGQSGAAGALELLGQPLATGVLELPGQPGAPELPGQPVATVALEISVQSVVTTSELSTMTVSQSLEVPSTTALESYNTVAQELPTTLVGETSVTVGVDPLMAPESHILASNTMETHILASNTMDSQMLASNTMDSQMLASNTMDSQMLASSTMDSQMLATSSMDSQMLATSSMDSQMLATSTMDSQMLATSSMDSQMLATSSMDSQMLATSSMDSQMLATSSMDSQMLATSTMDSQMLATSTMDSQMLATSSMDSQMLASGTMDSQMLASGTMDAQMLASGTMDAQMLASSTQDSAMLGSKSPDPYRLAQDPYRLAQDPYRLGHDPYRLGHDAYRLGQDPYRLGHDPYRLTPDPYRMSPRPYRIAPRSYRIAPRPYRLAPRPLMLASRRSMMMSYAAERSMMSSYERSMMSYERSMMSPMAERSMMSAYERSMMSAYERSMMSPMAERSMMSAYERSMMSAYERSMMSPMADRSMMSMGADRSMMSSYSAADRSMMSSYSAADRSMMSSYTADRSMMSMAADSYTDSYTDTYTEAYMVPPLPPEEPPTMPPLPPEEPPMTPPLPPEEPPEGPALPTEQSALTAENTWPTEVPSSPSEESVSQPEPPVSQSEISEPSAVPTDYSVSASDPSVLVSEAAVTVPEPPPEPESSITLTPVESAVVAEEHEVVPERPVTCMVSETPAMSAEPTVLASEPPVMSETAETFDSMRASGHVASEVSTSLLVPAVTTPVLAESILEPPAMAAPESSAMAVLESSAVTVLESSTVTVLESSTVTVLEPSVVTVPEPPVVAEPDYVTIPVPVVSALEPSVPVLEPAVSVLQPSMIVSEPSVSVQESTVTVSEPAVTVSEQTQVIPTEVAIESTPMILESSIMSSHVMKGINLSSGDQNLAPEIGMQEIALHSGEEPHAEEHLKGDFYESEHGINIDLNINNHLIAKEMEHNTVCAAGTSPVGEIGEEKILPTSETKQRTVLDTYPGVSEADAGETLSSTGPFALEPDATGTSKGIEFTTASTLSLVNKYDVDLSLTTQDTEHDMVISTSPSGGSEADIEGPLPAKDIHLDLPSNNNLVSKDTEEPLPVKESDQTLAALLSPKESSGGEKEVPPPPKETLPDSGFSANIEDINEADLVRPLLPKDMERLTSLRAGIEGPLLASDVGRDRSAASPVVSSMPERASESSSEEKDDYEIFVKVKDTHEKSKKNKNRDKGEKEKKRDSSLRSRSKRSKSSEHKSRKRTSESRSRARKRSSKSKSHRSQTRSRSRSRRRRRSSRSRSKSRGRRSVSKEKRKRSPKHRSKSRERKRKRSSSRDNRKTVRARSRTPSRRSRSHTPSRRRRSRSVGRRRSFSISPSRRSRTPSRRSRTPSRRSRTPSRRSRTPSRRSRTPSRRSRTPSRRRRSRSVVRRRSFSISPVRLRRSRTPLRRRFSRSPIRRKRSRSSERGRSPKRLTDLDKAQLLEIAKANAAAMCAKAGVPLPPNLKPAPPPTIEEKVAKKSGGATIEELTEKCKQIAQSKEDDDVIVNKPHVSDEEEEEPPFYHHPFKLSEPKPIFFNLNIAAAKPTPPKSQVTLTKEFPVSSGSQHRKKEADSVYGEWVPVEKNGEENKDDDNVFSSNLPSEGRVKRQGRVRRQMKQPAASHLTVTRCNSLCGTKPQSEKHRIAENSVITSLPNIGPSLHLWEGSPRYNYLASRFASRLYSSRFWW

SEQ ID NO: 5988 - protein, 2325 aa, Homo sapiens
MATNIEQIFRSFVVSKFREIQQELSSGRNEGQLNGETNTPIEGNQAGDAAASARSLPNEEIVQKIEEVLSGVLDTELRYKPDLKEGSRKSRCVSVQTDPTDEIPTKKSKKHKKHKNKKKKKKKEKEKKYKRQPEESESKTKSHDDGNIDLESDSFLKFDSEPSAVALELPTRAFGPSETNESPAVVLEPPVVSMEVSEPHILETLKPATKTAELSVVSTSVISEQSEQSVAVMPEPSMTKILDSFAAAPVPTTTLVLKSSEPVVTMSVEYQMKSVLKSVESTSPEPSKIMLVEPPVAKVLEPSETLVVSSETPTEVYPEPSTSTTMDFPESSAIEALRLPEQPVDVPSEIADSSMTRPQELPELPKTTALELQESSVASAMELPGPPATSMPELQGPPVTPVLELPGPSATPVPELPGPLSTPVPELPGPPATAVPELPGPSVTPVPQLSQELPGLPAPSMGLEPPQEVPEPPVMAQELPGLPLVTAAVELPEQPAVTVAMELTEQPVTTTELEQPVGMTTVEHPGHPEVTTATGLLGQPEATMVLELPGQPVATTALELPGQPSVTGVPELPGLPSATRALELSGQPVATGALELPGPLMAAGALEFSGQSGAAGALELLGQPLATGVLELPGQPGAPELPGQPVATVALEISVQSVVTTSELSTMTVSQSLEVPSTTALESYNTVAQELPTTLVGETSVTVGVDPLMAPESHILASNTMETHILASNTMDSQMLASNTMDSQMLASNTMDSQMLASSTMDSQMLATSSMDSQMLATSSMDSQMLATSTMDSQMLATSSMDSQMLATSSMDSQMLATSSMDSQMLATSSMDSQMLATSTMDSQMLATSTMDSQMLATSSMDSQMLASGTMDSQMLASGTMDAQMLASGTMDAQMLASSTQDSAMLGSKSPDPYRLAQDPYRLAQDPYRLGHDPYRLGHDAYRLGQDPYRLGHDPYRLTPDPYRMSPRPYRIAPRSYRIAPRPYRLAPRPLMLASRRSMMMSYAAERSMMSSYERSMMSYERSMMSPMAERSMMSAYERSMMSAYERSMMSPMAERSMMSAYERSMMSAYERSMMSPMADRSMMSMGADRSMMSSYSAADRSMMSSYSAADRSMMSSYTADRSMMSMAADSYTDSYTDTYTEAYMVPPLPPEEPPTMPPLPPEEPPMTPPLPPEEPPEGPALPTEQSALTAENTWPTEVPSSPSEESVSQPEPPVSQSEISEPSAVPTDYSVSASDPSVLVSEAAVTVPEPPPEPESSITLTPVESAVVAEEHEVVPERPVTCMVSETPAMSAEPTVLASEPPVMSETAETFDSMRASGHVASEVSTSLLVPAVTTPVLAESILEPPAMAAPESSAMAVLESSAVTVLESSTVTVLESSTVTVLEPSVVTVPEPPVVAEPDYVTIPVPVVSALEPSVPVLEPAVSVLQPSMIVSEPSVSVQESTVTVSEPAVTVSEQTQVIPTEVAIESTPMILESSIMSSHVMKGINLSSGDQNLAPEIGMQEIALHSGEEPHAEEHLKGDFYESEHGINIDLNINNHLIAKEMEHNTVCAAGTSPVGEIGEEKILPTSETKQRTVLDTYPGVSEADAGETLSSTGPFALEPDATGTSKGIEFTTASTLSLVNKYDVDLSLTTQDTEHDMVISTSPSGGSEADIEGPLPAKDIHLDLPSNNNLVSKDTEEPLPVKESDQTLAALLSPKESSGGEKEVPPPPKETLPDSGFSANIEDINEADLVRPLLPKDMERLTSLRAGIEGPLLASDVGRDRSAASPVVSSMPERASESSSEEKDDYEIFVKVKDTHEKSKKNKNRDKGEKEKKRDSSLRSRSKRSKSSEHKSRKRTSESRSRARKRSSKSKSHRSQTRSRSRSRRRRRSSRSRSKSRGRRSVSKEKRKRSPKHRSKSRERKRKRSSSRDNRKTVRARSRTPSRRSRSHTPSRRRRSRSVGRRRSFSISPSRRSRTPSRRSRTPSRRSRTPSRRSRTPSRRSRTPSRRSRTPSRRRRSRSVVRRRSFSISPVRLRRSRTPLRRRFSRSPIRRKRSRSSERGRSPKRLTDLDKAQLLEIAKANAAAMCAKAGVPLPPNLKPAPPPTIEEKVAKKSGGATIEELTEKCKQIAQSKEDDDVIVNKPHVSDEEEEEPPFYHHPFKLSEPKPIFFNLNIAAAKPTPPKSQVTLTKEFPVSSGSQHRKKEADSVYGEWVPVEKNGEENKDDDNVFSSNLPSEPVDISTAMSERALAQKRLSENAFDLEAMSMLNRAQERIDAWAQLNSIPGQFTGSTGVQVLTQEQLANTGAQAWIKKGQILVAVFLPRSVPAVLFTTLLLPRPRISS

SEQ ID NO: 5989 - protein, 2459 aa, Homo sapiens
MATNIEQIFRSFVVSKFREIQQELSSGRNEGQLNGETNTPIEGNQAGDAAASARSLPNEEIVQKIEEVLSGVLDTELRYKPDLKEGSRKSRCVSVQTDPTDEIPTKKSKKHKKHKNKKKKKKKEKEKKYKRQPEESESKTKSHDDGNIDLESDSFLKFDSEPSAVALELPTRAFGPSETNESPAVVLEPPVVSMEVSEPHILETLKPATKTAELSVVSTSVISEQSEQSVAVMPEPSMTKILDSFAAAPVPTTTLVLKSSEPVVTMSVEYQMKSVLKSVESTSPEPSKIMLVEPPVAKVLEPSETLVVSSETPTEVYPEPSTSTTMDFPESSAIEALRLPEQPVDVPSEIADSSMTRPQELPELPKTTALELQESSVASAMELPGPPATSMPELQGPPVTPVLELPGPSATPVPELPGPLSTPVPELPGPPATAVPELPGPSVTPVPQLSQELPGLPAPSMGLEPPQEVPEPPVMAQELPGLPLVTAAVELPEQPAVTVAMELTEQPVTTTELEQPVGMTTVEHPGHPEVTTATGLLGQPEATMVLELPGQPVATTALELPGQPSVTGVPELPGLPSATRALELSGQPVATGALELPGPLMAAGALEFSGQSGAAGALELLGQPLATGVLELPGQPGAPELPGQPVATVALEISVQSVVTTSELSTMTVSQSLEVPSTTALESYNTVAQELPTTLVGETSVTVGVDPLMAPESHILASNTMETHILASNTMDSQMLASNTMDSQMLASNTMDSQMLASSTMDSQMLATSSMDSQMLATSSMDSQMLATSTMDSQMLATSSMDSQMLATSSMDSQMLATSSMDSQMLATSSMDSQMLATSTMDSQMLATSTMDSQMLATSSMDSQMLASGTMDSQMLASGTMDAQMLASGTMDAQMLASSTQDSAMLGSKSPDPYRLAQDPYRLAQDPYRLGHDPYRLGHDAYRLGQDPYRLGHDPYRLTPDPYRMSPRPYRIAPRSYRIAPRPYRLAPRPLMLASRRSMMMSYAAERSMMSSYERSMMSYERSMMSPMAERSMMSAYERSMMSAYERSMMSPMAERSMMSAYERSMMSAYERSMMSPMADRSMMSMGADRSMMSSYSAADRSMMSSYSAADRSMMSSYTADRSMMSMAADSYTDSYTDTYTEAYMVPPLPPEEPPTMPPLPPEEPPMTPPLPPEEPPEGPALPTEQSALTAENTWPTEVPSSPSEESVSQPEPPVSQSEISEPSAVPTDYSVSASDPSVLVSEAAVTVPEPPPEPESSITLTPVESAVVAEEHEVVPERPVTCMVSETPAMSAEPTVLASEPPVMSETAETFDSMRASGHVASEVSTSLLVPAVTTPVLAESILEPPAMAAPESSAMAVLESSAVTVLESSTVTVLESSTVTVLEPSVVTVPEPPVVAEPDYVTIPVPVVSALEPSVPVLEPAVSVLQPSMIVSEPSVSVQESTVTVSEPAVTVSEQTQVIPTEVAIESTPMILESSIMSSHVMKGINLSSGDQNLAPEIGMQEIALHSGEEPHAEEHLKGDFYESEHGINIDLNINNHLIAKEMEHNTVCAAGTSPVGEIGEEKILPTSETKQRTVLDTYPGVSEADAGETLSSTGPFALEPDATGTSKGIEFTTASTLSLVNKYDVDLSLTTQDTEHDMVISTSPSGGSEADIEGPLPAKDIHLDLPSNNNLVSKDTEEPLPVKESDQTLAALLSPKESSGGEKEVPPPPKETLPDSGFSANIEDINEADLVRPLLPKDMERLTSLRAGIEGPLLASDVGRDRSAASPVVSSMPERASESSSEEKDDYEIFVKVKDTHEKSKKNKNRDKGEKEKKRDSSLRSRSKRSKSSEHKSRKRTSESRSRARKRSSKSKSHRSQTRSRSRSRRRRRSSRSRSKSRGRRSVSKEKRKRSPKHRSKSRERKRKRSSSRDNRKTVRARSRTPSRRSRSHTPSRRRRSRSVGRRRSFSISPSRRSRTPSRRSRTPSRRSRTPSRRSRTPSRRSRTPSRRSRTPSRRRRSRSVVRRRSFSISPVRLRRSRTPLRRRFSRSPIRRKRSRSSERGRSPKRLTDLDKAQLLEIAKANAAAMCAKAGVPLPPNLKPAPPPTIEEKVAKKSGGATIEELTEKCKQIAQSKEDDDVIVNKPHVSDEEEEEPPFYHHPFKLSEPKPIFFNLNIAAAKPTPPKSQVTLTKEFPVSSGSQHRKKEADSVYGEWVPVEKNGEENKDDDNVFSSNLPSEPVDISTAMSERALAQKRLSENAFDLEAMSMLNRAQERIDAWAQLNSIPGQFTGSTGVQVLTQEQLANTGAQAWIKKDQFLRAAPVTGGMGAVLMRKMGWREGEGLGKNKEGNKEPILVDFKTDRKGLVAVGERAQKRSGNFSAAMKDLSGKHPVSALMEICNKRRWQPPEFLLVHDSGPDHRKHFLFRVLINGSAYQPSFASPNKKHAKATAATVVLQAMGLVPKDLMANATCFRSASRR

SEQ ID NO: 5990 - protein, 2108 aa, Homo sapiens
MATNIEQIFRSFVVSKFREIQQELSSGRNEGQLNGETNTPIEGNQAGDAAASARSLPNEEIVQKIEEVLSGVLDTELRYKPDLKEGSRKSRCVSVQTDPTDEIPTKKSKKHKKHKNKKKKKKKEKEKKYKRQPEESESKTKSHDDGNIDLESDSFLKFDSEPSAVALELPTRAFGPSETNESPAVVLEPPVVSMEVSEPHILETLKPATKTAELSVVSTSVISEQSEQSVAVMPEPSMTKILDSFAAAPVPTTTLVLKSSEPVVTMSVEYQMKSVLKSVESTSPEPSKIMLVEPPVAKVLEPSETLVVSSETPTEVYPEPSTSTTMDFPESSAIEALRLPEQPVDVPSEIADSSMTRPQELPELPKTTALELQESSVASAMELPGPPATSMPELQGPPVTPVLELPGPSATPVPELPGPLSTPVPELPGPPATAVPELPGPSVTPVPQLSQELPGLPAPSMGLEPPQEVPEPPVMAQELPGLPLVTAAVELPEQPAVTVAMELTEQPVTTTELEQPVGMTTVEHPGHPEVTTATGLLGQPEATMVLELPGQPVATTALELPGQPSVTGVPELPGLPSATRALELSGQPVATGALELPGPLMAAGALEFSGQSGAAGALELLGQPLATGVLELPGQPGAPELPGQPVATVALEISVQSVVTTSELSTMTVSQSLEVPSTTALESYNTVAQELPTTLVGETSVTVGVDPLMAPESHILASNTMETHILASNTMDSQMLASNTMDSQMLASNTMDSQMLASSTMDSQMLATSSMDSQMLATSSMDSQMLATSTMDSQMLATSSMDSQMLATSSMDSQMLATSSMDSQMLATSSMDSQMLATSTMDSQMLATSTMDSQMLATSSMDSQMLASGTMDSQMLASGTMDAQMLASGTMDAQMLASSTQDSAMLGSKSPDPYRLAQDPYRLAQDPYRLGHDPYRLGHDAYRLGQDPYRLGHDPYRLTPDPYRMSPRPYRIAPRSYRIAPRPYRLAPRPLMLASRRSMMMSYAAERSMMSSYERSMMSYERSMMSPMAERSMMSAYERSMMSAYERSMMSPMAERSMMSAYERSMMSAYERSMMSPMADRSMMSMGADRSMMSSYSAADRSMMSSYSAADRSMMSSYTADRSMMSMAADSYTDSYTDTYTEAYMVPPLPPEEPPTMPPLPPEEPPMTPPLPPEEPPEGPALPTEQSALTAENTWPTEVPSSPSEESVSQPEPPVSQSEISEPSAVPTDYSVSASDPSVLVSEAAVTVPEPPPEPESSITLTPVESAVVAEEHEVVPERPVTCMVSETPAMSAEPTVLASEPPVMSETAETFDSMRASGHVASEVSTSLLVPAVTTPVLAESILEPPAMAAPESSAMAVLESSAVTVLESSTVTVLESSTVTVLEPSVVTVPEPPVVAEPDYVTIPVPVVSALEPSVPVLEPAVSVLQPSMIVSEPSVSVQESTVTVSEPAVTVSEQTQVIPTEVAIESTPMILESSIMSSHVMKGINLSSGDQNLAPEIGMQEIALHSGEEPHAEEHLKGDFYESEHGINIDLNINNHLIAKEMEHNTVCAAGTSPVGEIGEEKILPTSETKQRTVLDTYPGVSEADAGETLSSTGPFALEPDATGTSKGIEFTTASTLSLVNKYDVDLSLTTQDTEHDMVISTSPSGGSEADIEGPLPAKDIHLDLPSNNNLVSKDTEEPLPVKESDQTLAALLSPKESSGGEKEVPPPPKETLPDSGFSANIEDINEADLVRPLLPKDMERLTSLRAGIEGPLLASDVGRDRSAASPVVSSMPERASESSSEEKDDYEIFVKVKDTHEKSKKNKNRDKGEKEKKRDSSLRSRSKRSKSSEHKSRKRTSESRSRARKRSSKSKSHRSQTRSRSRSRRRRRSSRSRSKSRGRRSVSKEKRKRSPKHRSKSRERKRKRSSSRDNRKTVRARSRTPSRRSRSHTPSRRRRSRSVGRRRSFSISPSRRSRTPSRRSRTPSRRSRTPSRRSRTPSRRSRTPSRRSRTPSRRRRSRSVVRRRSFSISPVRLRRSRTPLRRRFSRSPIRRKRSRSSERGRSPKRLTDLDKAQLLEIAKANAAAMCAKAGVPLPPNLKPAPPPTIEEKVAKKSGGATIEELTEF

SEQ ID NO: 5991 - protein, 2386 aa, Homo sapiens
MATNIEQIFRSFVVSKFREIQQELSSGRNEGQLNGETNTPIEGNQAGDAAASARSLPNEEIVQKIEEVLSGVLDTELRYKPDLKEGSRKSRCVSVQTDPTDEIPTKKSKKHKKHKNKKKKKKKEKEKKYKRQPEESESKTKSHDDGNIDLESDSFLKFDSEPSAVALELPTRAFGPSETNESPAVVLEPPVVSMEVSEPHILETLKPATKTAELSVVSTSVISEQSEQSVAVMPEPSMTKILDSFAAAPVPTTTLVLKSSEPVVTMSVEYQMKSVLKSVESTSPEPSKIMLVEPPVAKVLEPSETLVVSSETPTEVYPEPSTSTTMDFPESSAIEALRLPEQPVDVPSEIADSSMTRPQELPELPKTTALELQESSVASAMELPGPPATSMPELQGPPVTPVLELPGPSATPVPELPGPLSTPVPELPGPPATAVPELPGPSVTPVPQLSQELPGLPAPSMGLEPPQEVPEPPVMAQELPGLPLVTAAVELPEQPAVTVAMELTEQPVTTTELEQPVGMTTVEHPGHPEVTTATGLLGQPEATMVLELPGQPVATTALELPGQPSVTGVPELPGLPSATRALELSGQPVATGALELPGPLMAAGALEFSGQSGAAGALELLGQPLATGVLELPGQPGAPELPGQPVATVALEISVQSVVTTSELSTMTVSQSLEVPSTTALESYNTVAQELPTTLVGETSVTVGVDPLMAPESHILASNTMETHILASNTMDSQMLASNTMDSQMLATSTMDSQMLATSSMDSQMLATSSMDSQMLATSSMDSQMLATSSMDSQMLATSTMDSQMLATSTMDSQMLATSSMDSQMLASGTMDSQMLASGTMDAQMLASGTMDAQMLASSTQDSAMLGSKSPDPYRLAQDPYRLAQDPYRLGHDPYRLGHDAYRLGQDPYRLGHDPYRLTPDPYRMSPRPYRIAPRSYRIAPRPYRLAPRPLMLASRRSMMMSYAAERSMMSSYERSMMSYERSMMSPMAERSMMSAYERSMMSAYERSMMSPMAERSMMSAYERSMMSAYERSMMSPMADRSMMSMGADRSMMSSYSAADRSMMSSYSAADRSMMSSYTADRSMMSMAADSYTDSYTDTYTEAYMVPPLPPEEPPTMPPLPPEEPPMTPPLPPEEPPEGPALPTEQSALTAENTWPTEVPSSPSEESVSQPEPPVSQSEISEPSAVPTDYSVSASDPSVLVSEAAVTVPEPPPEPESSITLTPVESAVVAEEHEVVPERPVTCMVSETPAMSAEPTVLASEPPVMSETAETFDSMRASGHVASEVSTSLLVPAVTTPVLAESILEPPAMAAPESSAMAVLESSAVTVLESSTVTVLESSTVTVLEPSVVTVPEPPVVAEPDYVTIPVPVVSALEPSVPVLEPAVSVLQPSMIVSEPSVSVQESTVTVSEPAVTVSEQTQVIPTEVAIESTPMILESSIMSSHVMKGINLSSGDQNLAPEIGMQEIALHSGEEPHAEEHLKGDFYESEHGINIDLNINNHLIAKEMEHNTVCAAGTSPVGEIGEEKILPTSETKQRTVLDTYPGVSEADAGETLSSTGPFALEPDATGTSKGIEFTTASTLSLVNKYDVDLSLTTQDTEHDMVISTSPSGGSEADIEGPLPAKDIHLDLPSNNNLVSKDTEEPLPVKESDQTLAALLSPKESSGGEKEVPPPPKETLPDSGFSANIEDINEADLVRPLLPKDMERLTSLRAGIEGPLLASDVGRDRSAASPVVSSMPERASESSSEEKDDYEIFVKVKDTHEKSKKNKNRDKGEKEKKRDSSLRSRSKRSKSSEHKSRKRTSESRSRARKRSSKSKSHRSQTRSRSRSRRRRRSSRSRSKSRGRRSVSKEKRKRSPKHRSKSRERKRKRSSSRDNRKTVRARSRTPSRRSRSHTPSRRRRSRSVGRRRSFSISPSRRSRTPSRRSRTPSRRSRTPSRRSRTPSRRSRTPSRRSRTPSRRRRSRSVVRRRSFSISPVRLRRSRTPLRRRFSRSPIRRKRSRSSERGRSPKRLTDLDKAQLLEIAKANAAAMCAKAGVPLPPNLKPAPPPTIEEKVAKKSGGATIEELTEKCKQIAQSKEDDDVIVNKPHVSDEEEEEPPFYHHPFKLSEPKPIFFNLNIAAAKPTPPKSQVTLTKEFPVSSGSQHRKKEADSVYGEWVPVEKNGEENKDDDNVFSSNLPSEPVDISTAMSERALAQKRLSENAFDLEAMSMLNRAQERIDAWAQLNSIPGQFTGSTGVQVLTQEQLANTGAQAWIKKDQFLRAAPVTGGMGAVLMRKMGWREGEGLGKNKEGNKEPILVDFKTDRKGLVAVGERAQKRSGNFSAAMKDLSGKHPVSALMEICNKRRWQPPEFLLVHDSGPDHRKHFLFRVLRNGALTRPNCMFFLNRY

SEQ ID NO: 5992 - protein, 699 aa, Homo sapiens
MATNIEQIFRSFVVSKFREIQQELSSGRNEGQLNGETNTPIEGNQAGDAAASARSLPNEEIVQKIEEVLSGVLDTELRYKPDLKEGSRKSRCVSVQTDPTDEIPTKKSKKHKKHKNKKKKKKKEKEKKYKRQPEESESKTKSHDDGNIDLESDSFLKFDSEPSAVALELPTRAFGPSETNESPAVVLEPPVVSMEVSEPHILETLKPATKTAELSVVSTSVISEQSEQSVAVMPEPSMTKILDSFAAAPVPTTTLVLKSSEPVVTMSVEYQMKSVLKSVESTSPEPSKIMLVEPPVAKVLEPSETLVVSSETPTEVYPEPSTSTTMDFPESSAIEALRLPEQPVDVPSEIADSSMTRPQELPELPKTTALELQESSVASAMELPGPPATSMPELQGPPVTPVLELPGPSATPVPELPGPLSTPVPELPGPPATAVPELPGPSVTPVPQLSQELPGLPAPSMGLEPPQEVPEPPVMAQELPGLPLVTAAVELPEQPAVTVAMELTEQPVTTTELEQPVGMTTVEHPGHPEVTTATGLLGQPEATMVLELPGQPVATTALELPGQPSVTGVPELPGLPSATRALELSGQPVATGALELPGPLMAAGALEFSGQSGAAGALELLGQPLATGVLELPGQPGAPELPGQPVATVALEISVQSVVTTSELSTMTVSQSLEVPSTTALESYNTNVPPNCMFFLNRY

SEQ ID NO: 5993 - protein, 2466 aa, Homo sapiens
MATNIEQIFRSFVVSKFREIQQELSSGRNEGQLNGETNTPIEGNQAGDAAASARSLPNEEIVQKIEEVLSGVLDTELRYKPDLKEGSRKSRCVSVQTDPTDEIPTKKSKKHKKHKNKKKKKKKEKEKKYKRQPEESESKTKSHDDGNIDLESDSFLKFDSEPSAVALELPTRAFGPSETNESPAVVLEPPVVSMEVSEPHILETLKPATKTAELSVVSTSVISEQSEQSVAVMPEPSMTKILDSFAAAPVPTTTLVLKSSEPVVTMSVEYQMKSVLKSVESTSPEPSKIMLVEPPVAKVLEPSETLVVSSETPTEVYPEPSTSTTMDFPESSAIEALRLPEQPVDVPSEIADSSMTRPQELPELPKTTALELQESSVASAMELPGPPATSMPELQGPPVTPVLELPGPSATPVPELPGPLSTPVPELPGPPATAVPELPGPSVTPVPQLSQELPGLPAPSMGLEPPQEVPEPPVMAQELPGLPLVTAAVELPEQPAVTVAMELTEQPVTTTELEQPVGMTTVEHPGHPEVTTATGLLGQPEATMVLELPGQPVATTALELPGQPSVTGVPELPGLPSATRALELSGQPVATGALELPGPLMAAGALEFSGQSGAAGALELLGQPLATGVLELPGQPGAPELPGQPVATVALEISVQSVVTTSELSTMTVSQSLEVPSTTALESYNTVAQELPTTLVGETSVTVGVDPLMAPESHILASNTMETHILASNTMDSQMLASNTMDSQMLASNTMDSQMLASSTMDSQMLATSSMDSQMLASNTMDSQMLASNTMDSQMLASSTMDSQMLATSSMDSQMLATSSMDSQMLATSTMDSQMLATSSMDSQMLATSSMDSQMLATSSMDSQMLATSSMDSQMLATSTMDSQMLATSTMDSQMLATSSMDSQMLASGTMDSQMLASGTMDAQMLASGTMDAQMLASSTQDSAMLGSKSPDPYRLAQDPYRLAQDPYRLGHDPYRLGHDAYRLGQDPYRLGHDPYRLTPDPYRMSPRPYRIAPRSYRIAPRPYRLAPRPLMLASRRSMMMSYAAERSMMSSYERSMMSYERSMMSPMAERSMMSAYERSMMSAYERSMMSPMAERSMMSAYERSMMSAYERSMMSPMADRSMMSMGADRSMMSSYSAADRSMMSSYSAADRSMMSSYTADRSMMSMAADSYTDSYTDTYTEAYMVPPLPPEEPPTMPPLPPEEPPMTPPLPPEEPPEGPALPTEQSALTAENTWPTEVPSSPSEESVSQPEPPVSQSEISEPSAVPTDYSVSASDPSVLVSEAAVTVPEPPPEPESSITLTPVESAVVAEEHEVVPERPVTCMVSETPAMSAEPTVLASEPPVMSETAETFDSMRASGHVASEVSTSLLVPAVTTPVLAESILEPPAMAAPESSAMAVLESSAVTVLESSTVTVLESSTVTVLEPSVVTVPEPPVVAEPDYVTIPVPVVSALEPSVPVLEPAVSVLQPSMIVSEPSVSVQESTVTVSEPAVTVSEQTQVIPTEVAIESTPMILESSIMSSHVMKGINLSSGDQNLAPEIGMQEIALHSGEEPHAEEHLKGDFYESEHGINIDLNINNHLIAKEMEHNTVCAAGTSPVGEIGEEKILPTSETKQRTVLDTYPGVSEADAGETLSSTGPFALEPDATGTSKGIEFTTASTLSLVNKYDVDLSLTTQDTEHDMVISTSPSGGSEADIEGPLPAKDIHLDLPSNNNLVSKDTEEPLPVKESDQTLAALLSPKESSGGEKEVPPPPKETLPDSGFSANIEDINEADLVRPLLPKDMERLTSLRAGIEGPLLASDVGRDRSAASPVVSSMPERASESSSEEKDDYEIFVKVKDTHEKSKKNKNRDKGEKEKKRDSSLRSRSKRSKSSEHKSRKRTSESRSRARKRSSKSKSHRSQTRSRSRSRRRRRSSRSRSKSRGRRSVSKEKRKRSPKHRSKSRERKRKRSSSRDNRKTVRARSRTPSRRSRSHTPSRRRRSRSVGRRRSFSISPSRRSRTPSRRSRTPSRRSRTPSRRSRTPSRRSRTPSRRSRTPSRRRRSRSVVRRRSFSISPVRLRRSRTPLRRRFSRSPIRRKRSRSSERGRSPKRLTDLDKAQLLEIAKANAAAMCAKAGVPLPPNLKPAPPPTIEEKVAKKSGGATIEELTEKCKQIAQSKEDDDVIVNKPHVSDEEEEEPPFYHHPFKLSEPKPIFFNLNIAAAKPTPPKSQVTLTKEFPVSSGSQHRKKEADSVYGEWVPVEKNGEENKDDDNVFSSNLPSEPVDISTAMSERALAQKRLSENAFDLEAMSMLNRAQERIDAWAQLNSIPGQFTGSTGVQVLTQEQLANTGAQAWIKKDQFLRAAPVTGGMGAVLMRKMGWREGEGLGKNKEGNKEPILVDFKTDRKGLVAVGERAQKRSGNFSAAMKDLSGKHPVSALMEICNKRRWQPPEFLLVHDSGPDHRKHFLFRVLRNGALTRPNCMFFLNRY

SEQ ID NO: 5994 - protein, 2282 aa, Homo sapiens
MATNIEQIFRSFVVSKFREIQQELSSGRNEGQLNGETNTPIEGNQAGDAAASARSLPNEEIVQKIEEVLSGVLDTELRYKPDLKEGSRKSRCVSVQTDPTDEIPTKKSKKHKKHKNKKKKKKKEKEKKYKRQPEESESKTKSHDDGNIDLESDSFLKFDSEPSAVALELPTRAFGPSETNESPAVVLEPPVVSMEVSEPHILETLKPATKTAELSVVSTSVISEQSEQSVAVMPEPSMTKILDSFAAAPVPTTTLVLKSSEPVVTMSVEYQMKSVLKSVESTSPEPSKIMLVEPPVAKVLEPSETLVVSSETPTEVYPEPSTSTTMDFPESSAIEALRLPEQPVDVPSEIADSSMTRPQELPELPKTTALELQESSVASAMELPGPPATSMPELQGPPVTPVLELPGPSATPVPELPGPLSTPVPELPGPPATAVPELPGPSVTPVPQLSQELPGLPAPSMGLEPPQEVPEPPVMAQELPGLPLVTAAVELPEQPAVTVAMELTEQPVTTTELEQPVGMTTVEHPGHPEVTTATGLLGQPEATMVLELPGQPVATTALELPGQPSVTGVPELPGLPSATRALELSGQPVATGALELPGPLMAAGALEFSGQSGAAGALELLGQPLATGVLELPGQPGAPELPGQPVATVALEISVQSVVTTSELSTMTVSQSLEVPSTTALESYNTVAQELPTTLVGETSVTVGVDPLMAPESHILASNTMETHILASNTMDSQMLASNTMDSQMLASNTMDSQMLASSTMDSQMLATSSMDSQMLATSSMDSQMLATSTMDSQMLATSSMDSQMLATSSMDSQMLATSSMDSQMLATSSMDSQMLATSTMDSQMLATSTMDSQMLATSSMDSQMLASGTMDSQMLASGTMDAQMLASGTMDAQMLASSTQDSAMLGSKSPDPYRLAQDPYRLAQDPYRLGHDPYRLGHDAYRLGQDPYRLGHDPYRLTPDPYRMSPRPYRIAPRSYRIAPRPYRLAPRPLMLASRRSMMMSYAAERSMMSSYERSMMSYERSMMSPMAERSMMSAYERSMMSAYERSMMSPMAERSMMSAYERSMMSAYERSMMSPMADRSMMSMGADRSMMSSYSAADRSMMSSYSAADRSMMSSYTADRSMMSMAADSYTDSYTDTYTEAYMVPPLPPEEPPTMPPLPPEEPPMTPPLPPEEPPEGPALPTEQSALTAENTWPTEVPSSPSEESVSQPEPPVSQSEISEPSAVPTDYSVSASDPSVLVSEAAVTVPEPPPEPESSITLTPVESAVVAEEHEVVPERPVTCMVSETPAMSAEPTVLASEPPVMSETAETFDSMRASGHVASEVSTSLLVPAVTTPVLAESILEPPAMAAPESSAMAVLESSAVTVLESSTVTVLESSTVTVLEPSVVTVPEPPVVAEPDYVTIPVPVVSALEPSVPVLEPAVSVLQPSMIVSEPSVSVQESTVTVSEPAVTVSEQTQVIPTEVAIESTPMILESSIMSSHVMKGINLSSGDQNLAPEIGMQEIALHSGEEPHAEEHLKGDFYESEHGINIDLNINNHLIAKEMEHNTVCAAGTSPVGEIGEEKILPTSETKQRTVLDTYPGVSEADAGETLSSTGPFALEPDATGTSKGIEFTTASTLSLVNKYDVDLSLTTQDTEHDMVISTSPSGGSEADIEGPLPAKDIHLDLPSNNNLVSKDTEEPLPVKESDQTLAALLSPKESSGGEKEVPPPPKETLPDSGFSANIEDINEADLVRPLLPKDMERLTSLRAGIEGPLLASDVGRDRSAASPVVSSMPERASESSSEEKDDYEIFVKVKDTHEKSKKNKNRDKGEKEKKRDSSLRSRSKRSKSSEHKSRKRTSESRSRARKRSSKSKSHRSQTRSRSRSRRRRRSSRSRSKSRGRRSVSKEKRKRSPKHRSKSRERKRKRSSSRDNRKTVRARSRTPSRRSRSHTPSRRRRSRSVGRRRSFSISPSRRSRTPSRRSRTPSRRSRTPSRRSRTPSRRSRTPSRRSRTPSRRRRSRSVVRRRSFSISPVRLRRSRTPLRRRFSRSPIRRKRSRSSERGRSPKRLTDLDKAQLLEIAKANAAAMCAKAGVPLPPNLKPAPPPTIEEKVAKKSGGATIEELTEKCKQIAQSKEDDDVIVNKPHVSDEEEEEPPFYHHPFKLSEPKPIFFNLNIAAAKPTPPKSQVTLTKEFPVSSGSQHRKKEADSVYGEWVPVEKNGEENKDDDNVFSSNLPSEPVDISTAMSERALAQKRLSENAFDLEAMSMLNRAQERVCSSFLKKIIIYHQPTHTNVPVLMSK

SEQ ID NO: 5995 - protein, 165 aa, Homo sapiens
MLMPKKNRIAIYELLFKEGVMVAKKDVHMPKHPELADKNVPNLHVMKAMQSLKSRGYVKEQFAWRHFYWYLTNEGIQYLRDYLHLPPEIVPATLRRSRPETGRPRPKGLEGERPARLTRGEADRDTYRRSAVPPGADKKAEAGAGSATEFQFRGGFGRGRGQPPQ

SEQ ID NO: 5996 - protein, 199 aa, Homo sapiens
MENFRKVRSEEAPAGCGAEGGGPGSGPFADLAPGAVHMRVKEGSKIRNLMAFATASMAQPATRAIVFSGCGRATTKTVTCAEILKRRLAGLHQVTRLRYRSVREVWQSLPPGPTQGQTPGEPAASLSVLKNVPGLAILLSKDALDPRQPGYQPPNPHPGPSSPPAAPASKRSLGEPAAGEGSAKRSQPEPGVADEDQTA

SEQ ID NO: 5997 - protein, 283 aa, Homo sapiens
MAAAPQAPGRGSLRKTRPLVVKTSLNNPYIIRWSALESEDMHFILQTLEDRLKAIGLQKIEDKKKKNKTPFLKKESREKCSIAVDISENLKEKKTDAKQQVSGWTPAHVRKQLAIGVNEVTRALERRELLLVLVCKSVKPAMITSHLIQLSLSRSVPACQVPRLSERIAPVIGLKCVLALAFKKNTTDFVDEVRAIIPRVPSLSVPWLQDRIEDSGENLETEPLESQDRELLDTSFEDLSKPKRKLADGRQASVTLQPLKIKKLIPNPNKIRKPPKSKKATPK

SEQ ID NO: 5998 - protein, 418 aa, Homo sapiens
MSVAFAAPRQRGKGEITPAAIQKMLDDNNHLIQCIMDSQNKGKTSECSQYQQMLHTNLVYLATIADSNQNMQSLLPAPPTQNMPMGPGGMNQSGPPPPPRSHNMPSDGMVGGGPPAPHMQNQMNGQMPGPNHMPMQGPGPNQLNMTNSSMNMPSSSHGSMGGYNHSVPSSQSMPVQNQMTMSQGQPMGNYGPRPNMSMQPNQGPMMHQQPPSQQYNMPQGGGQHYQGQQPPMGMMGQVNQGNHMMGQRQIPPYRPPQQGPPQQYSGQEDYYGDQYSHGGQGPPEGMNQQYYPDGHNDYGYQQPSYPEQGYDRPYEDSSQHYYEGGNSQYGQQQDAYQGPPPQQGYPPQQQQYPGQQGYPGQQQGYGPSQGGPGPQYPNYPQGQGQQYGGYRPTQPGPPQPPQQRPYGYDQGQYGNYQQ

SEQ ID NO: 5999 - protein, 387 aa, Homo sapiens
MSVAFAAPRQRGKGEITPAAIQKMLDDNNHLIQCIMDSQNKGKTSECSQYQQMLHTNLVYLATIADSNQNMQSLLPAPPTQNMPMGPGGMNQSGPPPPPRSHNMPSDGMVGGGPPAPHMQNQMNGQMPGPNHMPMQGPGPNQLNMTNSSMNMPSSSHGSMGGYNHSVPSSQSMPVQNQMTMSQGQPMGNYGPRPNMSMQPNQGPMMHQQPPSQQYNMPQGGGQHYQGQQPPMGMMGQVNQGNHMMGQRQIPPYRPPQQGPPQQYSGQEDYYGDQYSHGGQGPPEGMNQQYYPDGNSQYGQQQDAYQGPPPQQGYPPQQQQYPGQQGYPGQQQGYGPSQGGPGPQYPNYPQGQGQQYGGYRPTQPGPPQPPQQRPYGYDQGQYGNYQQ

SEQ ID NO: 6000 - protein, 530 aa, Homo sapiens
MEDDSLYLGGEWQFNHFSKLTSSRPDAAFAEIQRTSLPEKSPLSCETRVDLCDDLAPVARQLAPREKLPLSSRRPAAVGAGLQNMGNTCYVNASLQCLTYTPPLANYMLSREHSQTCHRHKGCMLCTMQAHITRALHNPGHVIQPSQALAAGFHRGKQEDAHEFLMFTVDAMKKACLPGHKQVDHHSKDTTLIHQIFGGYWRSQIKCLHCHGISDTFDPYLDIALDIQAAQSVQQALEQLVKPEELNGENAYHCGVCLQRAPASKTLTLHTSAKVLILVLKRFSDVTGNKIAKNVQYPECLDMQPYMSQPNTGPLVYVLYAVLVHAGWSCHNGHYFSYVKAQEGQWYKMDDAEVTASSITSVLSQQAYVLFYIQKSEWERHSESVSRGREPRALGAEDTDRRATQGELKRDHPCLQAPELDEHLVERATQESTLDHWKFLQEQNKTKPEFNVRKVEGTLPPDVLVIHQSKYKCGMKNHHPEQQSSLLNLSSTTPTHQESMNTGTLASLRGRARRSKGKNKHSKRALLVCQ

SEQ ID NO: 6001 - protein, 447 aa, Homo sapiens
MELSQMSELMGLSVLLGLLALMATAAVARGWLRAGEERSGRPACQKANGFPPDKSSGSKKQKQYQRIRKEKPQQHNFTHRLLAAALKSHSGNISCMDFSSNGKYLATCADDRTIRIWSTKDFLQREHRSMRANVELDHATLVRFSPDCRAFIVWLANGDTLRVFKMTKREDGGYTFTATPEDFPKKHKAPVIDIGIANTGKFIMTASSDTTVLIWSLKGQVLSTINTNQMNNTHAAVSPCGRFVASCGFTPDVKVWEVCFGKKGEFQEVVRAFELKGHSAAVHSFAFSNDSRRMASVSKDGTWKLWDTDVEYKKKQDPYLLKTGRFEEAAGAAPCRLALSPNAQVLALASGSSIHLYNTRRGEKEECFERVHGECIANLSFDITGRFLASCGDRAVRLFHNTPGHRAMVEEMQGHLKRASNESTRQRLQQQLTQAQETLKSLGALKK

SEQ ID NO: 6002 - protein, 688 aa, Homo sapiens
MATASGASDLSGSGAPPPGVGAQAAAAAEEEEREVVRVRVKKCESFLPPEFRSFAVDPQITSLDVLQHILIRAFDLSGKKNFGISYLGRDRLGQEVYLSLLSDWDLSTAFATASKPYLQLRVDIRPSEDSPLLEDWDIISPKDVIGSDVLLAEKRSSLTTAALPFTQSILTQVGRTLSKVQQVLSWSYGEDVKPFKPPLSDAEFHTYLNHEGQLSRPEELRLRIYHGGVEPSLRKVVWRYLLNVYPDGLTGRERMDYMKRKSREYEQLKSEWAQRANPEDLEFIRSTVLKDVLRTDRAHPYYAGPEDGPHLRALHDLLTTYAVTHPQVSYCQGMSDLASPILAVMDHEGHAFVCFCGIMKRLAANFHPDGRAMATKFAHLKLLLRHADPDFYQYLQEAGADDLFFCYRWLLLELKREFAFDDALRMLEVTWSSLPPDPPEHEVELVGPPSQVADAGFGGHRGWPVRQRHMLRPAGGGGSTFEDAVDHLATASQGPGGGGRLLRQASLDGLQQLRDNMGSRRDPLVQLPHPAALISSKSLSEPLLNSPDPLLSSFSHPDSPSSSSPPSTQEASPTGDMAVGSPLMQEVGSPKDPGKSLPPVPPMGLPPPQEFGRGNPFMLFLCLAILLEHRDHIMRNGLDYNELAMHFDRLVRKHHLGRVLRRARALFADYLQSEVWDSEEGAEATAAS

SEQ ID NO: 6003 - protein, 100 aa, Homo sapiens
MATASGASDLSGSGAPPPGVGAQAAAAAEEEEREVVRVRVKKCESFLPPEFRSFAVDPQITSLDVLQHILIRAFDLSGPIARRLGHNQPQRCHWLRRVAG

SEQ ID NO: 6004 - protein, 607 aa, Homo sapiens
MAEKRRGSPCSMLSLKAHAFSVEALIGAEKQQQLQKKRRKLGAEEAAGAVDDGGCSRGGGAGEKGSSEGDEGAALPPPAGATSGPARSGADLERGAAGGCEDGFQQGASPLASPGGSPKGSPARSLARPGTPLPSPQAPRVDLQGAELWKRFHEIGTEMIITKAGRRMFPAMRVKISGLDPHQQYYIAMDIVPVDNKRYRYVYHSSKWMVAGNADSPVPPRVYIHPDSPASGETWMRQVISFDKLKLTNNELDDQGHIILHSMHKYQPRVHVIRKDCGDDLSPIKPVPSGEGVKAFSFPETVFTTVTAYQNQQITRLKIDRNPFAKGFRDSGRNRMGLEALVESYAFWRPSLRTLTFEDIPGIPKQGNASSSTLLQGTGNGVPATHPHLLSGSSCSSPAFHLGPNTSQLCSLAPADYSACARSGLTLNRYSTSLAETYNRLTNQAGETFAPPRTPSYVGVSSSTSVNMSMGGTDGDTFSCPQTSLSMQISGMSPQLQYIMPSPSSNAFATNQTHQGSYNTFRLHSPCALYGYNFSTSPKLAASPEKIVSSQGSFLGSSPSGTMTDRQMLPPVEGVHLLSSGGQQSFFDSRTLGSLTLSSSQVSAHMV

SEQ ID NO: 6005 - protein, 451 aa, Homo sapiens
MPREIITLQLGQCGNQIGFEFWKQLCAEHGISPEGIVEEFATEGTDRKDVFFYQADDEHYIPRAVLLDLEPRVIHSILNSPYAKLYNPENIYLSEHGGGAGNNWASGFSQGEKIHEDIFDIIDREADGSDSLEGFVLCHSIAGGTGSGLGSYLLERLNDRYPKKLVQTYSVFPNQDEMSDVVVQPYNSLLTLKRLTQNADCVVVLDNTALNRIATDRLHIQNPSFSQINQLVSTIMSASTTTLRYPGYMNNDLIGLIASLIPTPRLHFLMTGYTPLTTDQSVASVRKTTVLDVMRRLLQPKNVMVSTGRDRQTNHCYIAILNIIQGEVDPTQVHKSLQRIRERKLANFIPWGPASIQVALSRKSPYLPSAHRVSGLMMANHTSISSLFERTCRQYDKLRKREAFLEQFRKEDMFKDNFDEMDTSREIVQQLIDEYHAATRPDYISWGTQEQ

SEQ ID NO: 6006 - protein, 330 aa, Homo sapiens
MEHLGPHHLHPGHAEPISFGIDQILNSPDQGGCMGPASRLQDGEYGLGCLVGGAYTYGGGGSAAATGAGGAGAYGTGGPGGPGGPAGGGGACSMGPLTGSYNVNMALAGGPGPGGGGGSSGGAGALSAAGVIRVPAHRPLAGAVAHPQPLATGLPTVPSVPAMPGVNNLTGLTFPWMESNRRYTKDRFTGHPYQNRTPPKKKKPRTSFTRLQICELEKRFHRQKYLASAERAALAKALKMTDAQVKTWFQNRRTKWRRQTAEEREAERQQANRILLQLQQEAFQKSLAQPLPADPLCVHNSSLFALQNLQPWSDDSTKITSVTSVASACE

SEQ ID NO: 6007 - protein, 257 aa, Homo sapiens
MEHLGPHHLHPGHAEPISFGIDQILNSPDQGGCMGPASRLQDGEYGLGCLVGGAYTYGGGGSAAATGAGGAGAYGTGGPGGPGGPAGGGGACSMGPLTGSYNVNMALAGGPGPGGGGGSSGGAGALSAAGVIRVPAHRPLAGAVAHPQPLATGLPTVPSVPAMPGVNNLTGLTFPWMESNRRYTKDRFTGHPYQNRTPPKKKKPRTSFTRLQICELEKRFHRQKYLASAERAALAKALKMTDAQVKTWFQNRRTKWR

SEQ ID NO: 6008 - protein, 507 aa, Homo sapiens
MEFLLGNPFSTPVGQCLEKATDGSLQSEDWTLNMEICDIINETEEGPKDAIRALKKRLNGNRNYREVMLALTVLETCVKNCGHRFHILVANRDFIDSVLVKIISPKNNPPTIVQDKVLALIQAWADAFRSSPDLTGVVHIYEELKRKGVEFPMADLDALSPIHTPQRSVPEVDPAATMPRSQSQQRTSAGSYSSPPPAPYSAPQAPALSVTGPITANSEQIARLRSELDVVRGNTKVMSEMLTEMVPGQEDSSDLELLQELNRTCRAMQQRIVELISRVSNEEVTEELLHVNDDLNNVFLRYERFERYRSGRSVQNASNGVLNEVTEDNLIDLGPGSPAVVSPMVGNTAPPSSLSSQLAGLDLGTESVSGTLSSLQQCNPRDGFDMFAQTRGNSLAEQRKTVTYEDPQAVGGLASALDNRKQSSEGIPVAQPSVMDDIEVWLRTDLKGDDLEEGVTSEEFDKFLEERAKAAEMVPDLPSPPMEAPAPASNPSGRKKPERSEDALFAL

SEQ ID NO: 6009 - protein, 457 aa, Homo sapiens
MEFLLGNPFSTPVGQCLEKATDGSLQSEDWTLNMEICDIINETEEGPKDAIRALKKRLNGNRNYREVMLALTAWADAFRSSPDLTGVVHIYEELKRKGVEFPMADLDALSPIHTPQRSVPEVDPAATMPRSQSQQRTSAGSYSSPPPAPYSAPQAPALSVTGPITANSEQIARLRSELDVVRGNTKVMSEMLTEMVPGQEDSSDLELLQELNRTCRAMQQRIVELISRVSNEEVTEELLHVNDDLNNVFLRYERFERYRSGRSVQNASNGVLNEVTEDNLIDLGPGSPAVVSPMVGNTAPPSSLSSQLAGLDLGTESVSGTLSSLQQCNPRDGFDMFAQTRGNSLAEQRKTVTYEDPQAVGGLASALDNRKQSSEGIPVAQPSVMDDIEVWLRTDLKGDDLEEGVTSEEFDKFLEERAKAAEMVPDLPSPPMEAPAPASNPSGRKKPERSEDALFAL

SEQ ID NO: 6010 - protein, 462 aa, Homo sapiens
MEFLLGNPFSTPVGQCLEKATDGSLQSEDWTLNMEICDIINETEEGPKDAIRALKKRLNGNRNYREVMLALTVLETCVKNCGHRFHILVANRDFIDSVLVKIISPKNNPPTIVQDKVLALIQSVPEVDPAATMPRSQSQQRTSAGSYSSPPPAPYSAPQAPALSVTGPITANSEQIARLRSELDVVRGNTKVMSEMLTEMVPGQEDSSDLELLQELNRTCRAMQQRIVELISRVSNEEVTEELLHVNDDLNNVFLRYERFERYRSGRSVQNASNGVLNEVTEDNLIDLGPGSPAVVSPMVGNTAPPSSLSSQLAGLDLGTESVSGTLSSLQQCNPRDGFDMFAQTRGNSLAEQRKTVTYEDPQAVGGLASALDNRKQSSEGIPVAQPSVMDDIEVWLRTDLKGDDLEEGVTSEEFDKFLEERAKAAEMVPDLPSPPMEAPAPASNPSGRKKPERSEDALFAL

SEQ ID NO: 6011 - protein, 240 aa, Homo sapiens
MQQRIVELISRVSNEEVTEELLHVNDDLNNVFLRYERFERYRSGRSVQNASNGVLNEVTEDNLIDLGPGSPAVVSPMVGNTAPPSSLSSQLAGLDLGTESVSGTLSSLQQCNPRDGFDMFAQTRGNSLAEQRKTVTYEDPQAVGGLASALDNRKQSSEGIPVAQPSVMDDIEVWLRTDLKGDDLEEGVTSEEFDKFLEERAKAAEMVPDLPSPPMEAPAPASNPSGRKKPERSEDALFAL

SEQ ID NO: 6012 - protein, 483 aa, Homo sapiens
MEFLLGNPFSTPVGQCLEKATDGSLQSEDWTLNMEICDIINETEEGPKDAIRALKKRLNGNRNYREVMLALTVLETCVKNCGHRFHILVANRDFIDSVLVKIISPKNNPPTIVQDKVLALIQAWADAFRSSPDLTGVVHIYEELKRKGVEFPMADLDALSPIHTPQRIARLRSELDVVRGNTKVMSEMLTEMVPGQEDSSDLELLQELNRTCRAMQQRIVELISRVSNEEVTEELLHVNDDLNNVFLRYERFERYRSGRSVQNASNGVLNEVTEDNLIDLGPGSPAVVSPMVGNTAPPSSLSSQLAGLDLGTESVSGTLSSLQQCNPRDGFDMFAQTRGNSLAEQRKTVTYEDPQAVGGLASALDNRKQSSEGTFLSSAQKRGRGGESDLEPIDSWLITQGMIPVAQPSVMDDIEVWLRTDLKGDDLEEGVTSEEFDKFLEERAKAAEMVPDLPSPPMEAPAPASNPSGRKKPERSEDALFAL

SEQ ID NO: 6013 - protein, 504 aa, Homo sapiens
MSQPRTPEQALDTPGDCPPGRRDEDAGEGIQCSQRMLSFSDALLSIIATVMILPVTHTEISPEQQFDRSVQRLLATRIAVYLMTFLIVTVAWAAHTRLFQVVGKTDDTLALLNLACMMTITFLPYTFSLMVTFPDVPLGIFLFCVCVIAIGVVQALIVGYAFHFPHLLSPQIQRSAHRALYRRHVLGIVLQGPALCFAAAIFSLFFVPLSYLLMVTVILLPYVSKVTGWCRDRLLGHREPSAHPVEVFSFDLHEPLSKERVEAFSDGVYAIVATLLILDICEDNVPDPKDVKERFSGSLVAALSATGPRFLAYFGSFATVGLLWFAHHSLFLHVRKATRAMGLLNTLSLAFVGGLPLAYQQTSAFARQPRDELERVRVSCTIIFLASIFQLAMWTTALLHQAETLQPSVWFGGREHVLMFAKLALYPCASLLAFASTCLLSRFSVGIFHLMQIAVPCAFLLLRLLVGLALATLRVLRGLARPEHPPPAPTGQDDPQSQLLPAPC

SEQ ID NO: 6014 - protein, 388 aa, Homo sapiens
MMTITFLPYTFSLMVTFPDVPLGIFLFCVCVIAIGVVQALIVGYAFHFPHLLSPQIQRSAHRALYRRHVLGIVLQGPALCFAAAIFSLFFVPLSYLLMVTVILLPYVSKVTGWCRDRLLGHREPSAHPVEVFSFDLHEPLSKERVEAFSDGVYAIVATLLILDICEDNVPDPKDVKERFSGSLVAALSATGPRFLAYFGSFATVGLLWFAHHSLFLHVRKATRAMGLLNTLSLAFVGGLPLAYQQTSAFARQPRDELERVRVSCTIIFLASIFQLAMWTTALLHQAETLQPSVWFGGREHVLMFAKLALYPCASLLAFASTCLLSRFSVGIFHLMQIAVPCAFLLLRLLVGLALATLRVLRGLARPEHPPPAPTGQDDPQSQLLPAPC

SEQ ID NO: 6015 - protein, 373 aa, Homo sapiens
MDTLEEVTWANGSTALPPPLAPNISVPHRCLLLLYEDIGTSRVRYWDLLLLIPNVLFLIFLLWKLPSARAKIRITSSPIFITFYILVFVVALVGIARAVVSMTVSTSNAATVADKILWEITRFFLLAIELSVIILGLAFGHLESKSSIKRVLAITTVLSLAYSVTQGTLEILYPDAHLSAEDFNIYGHGGRQFWLVSSCFFFLVYSLVVILPKTPLKERISLPSRRSFYVYAGILALLNLLQGLGSVLLCFDIIEGLCCVDATTFLYFSFFAPLIYVAFLRGFFGSEPKILFSYKCQVDETEEPDVHLPQPYAVARREGLEAAGAAGASAASYSSTQFDSAGGVAYLDDIASMPCHTGSINSTDSERWKAINA

SEQ ID NO: 6016 - protein, 239 aa, Homo sapiens
MDTLEEVTWANGSTALPPPLAPNISVPHRCLLLLYEDIGTSRVRYWDLLLLIPNVLFLIFLLWKLPSARAKIRITSSPIFITFYILVFVVALVGIARAVVSMTVSTSNAATVADKILWEITRFFLLAIELSVIILGLAFGHLESKSSIKRVLAITTVLSLAYSVTQGTLEILYPDAHLSAEDFNIYGHGGRQFWLVSSCFFFLLGGASTCMRASWHCSTYCRGWGVCCCASTSSRGSAV

SEQ ID NO: 6017 - protein, 293 aa, Homo sapiens
MDTLEEVTWANGSTALPPPLAPNISVPHRCLLLLYEDIGTSRVRYWDLLLLIPNVLFLIFLLWKLPSARAKIRITSSPIFITFYILVFVVALVGIARAVVSMTVSTSNAATVADKILWEITRFFLLAIELSVIILGLAFGHLESKSSIKRVLAITTVLSLAYSVTQGTLEILYPDAHLSAEDFNIYGHGGRQFWLVSSCFFFLLCRCHNLPVLQLLRSAHLRGFPPGLLRLGAQDPLLLQMPSGRDRGARCTPTPALRCGPAGGPGGCRGCWGLSCQLLEHAVRLCRRGGLPG

SEQ ID NO: 6018 - protein, 539 aa, Homo sapiens
MATSAPLRSLEEEVTCSICLDYLRDPVTIDCGHVFCRSCTTDVRPISGSRPVCPLCKKPFKKENIRPVWQLASLVENIERLKVDKGRQPGEVTREQQDAKLCERHREKLHYYCEDDGKLLCVMCRESREHRPHTAVLMEKAAQPHREKILNHLSTLRRDRDKIQGFQAKGEADILAALKKLQDQRQYIVAEFEQGHQFLREREEHLLEQLAKLEQELTEGREKFKSRGVGELARLALVISELEGKAQQPAAELMQDTRDFLNRYPRKKFWVGKPIARVVKKKTGEFSDKLLSLQRGLREFQGKLLRDLEYKTVSVTLDPQSASGYLQLSEDWKCVTYTSLYKSAYLHPQQFDCEPGVLGSKGFTWGKVYWEVEVEREGWSEDEEEGDEEEEGEEEEEEEEAGYGDGYDDWETDEDEESLGDEEEEEEEEEEEVLESCMVGVARDSVKRKGDLSLRPEDGVWALRLSSSGIWANTSPEAELFPALRPRRVGIALDYEGGTVTFTNAESQELIYTFTATFTRRLVPFLWLKWPGTRLLLRP

SEQ ID NO: 6019 - protein, 257 aa, Homo sapiens
MASKIGSRRWMLQLIMQLGSVLLTRCPFWGCFSQLMLYAERAEARRKPDIPVPYLYFDMGAAVLCASFMSFGVKRRWFALGAALQLAISTYAAYIGGYVHYGDWLKVRMYSRTVAIIGGFLVLASGAGELYRRKPRSRSLQSTGQVFLGIYLICVAYSLQHSKEDRLAYLNHLPGGELMIQLFFVLYGILALAFLSGYYVTLAAQILAVLLPPVMLLIDGNVAYWHNTRRVEFWNQMKLLGESVGIFGTAVILATDG

SEQ ID NO: 6020 - protein, 1409 aa, Homo sapiens
MKSSGPVERLLRALGRRDSSRAASRPRKAEPHSFREKVFRKKPPVCAVCKVTIDGTGVSCRVCKVATHRKCEAKVTSACQALPPVELRRNTAPVRRIEHLGSTKSLNHSKQRSTLPRSFSLDPLMERRWDLDLTYVTERILAAAFPARPDEQRHRGHLRELAHVLQSKHRDKYLLFNLSEKRHDLTRLNPKVQDFGWPELHAPPLDKLCSICKAMETWLSADPQHVVVLYCKGNKGKLGVIVSAYMHYSKISAGADQALATLTMRKFCEDKVATELQPSQRRYISYFSGLLSGSIRMNSSPLFLHYVLIPMLPAFEPGTGFQPFLKIYQSMQLVYTSGVYHIAGPGPQQLCISLEPALLLKGDVMVTCYHKGGRGTDRTLVFRVQFHTCTIHGPQLTFPKDQLDEAWTDERFPFQASVEFVFSSSPEKIKGSTPRNDPSVSVDYNTTEPAVRWDSYENFNQHHEDSVDGSLTHTRGPLDGSPYAQVQRPPRQTPPAPSPEPPPPPMLSVSSDSGHSSTLTTEPAAESPGRPPPTAAERQELDRLLGGCGVASGGRGAGRETAILDDEEQPTVGGGPHLGVYPGHRPGLSRHCSCRQGYREPCGVPNGGYYRPEGTLERRRLAYGGYEGSPQGYAEASMEKRRLCRSLSEGLYPYPPEMGKPATGDFGYRAPGYREVVILEDPGLPALYPCPACEEKLALPTAALYGLRLEREAGEGWASEAGKPLLHPVRPGHPLPLLLPACGHHHAPMPDYSCLKPPKAGEEGHEGCSYTMCPEGRYGHPGYPALVTYSYGGAVPSYCPAYGRVPHSCGSPGEGRGYPSPGAHSPRAGSISPGSPPYPQSRKLSYEIPTEEGGDRYPLPGHLASAGPLASAESLEPVSWREGPSGHSTLPRSPRDAPCSASSELSGPSTPLHTSSPVQGKESTRRQDTRSPTSAPTQRLSPGEALPPVSQAGTGKAPELPSGSGPEPLAPSPVSPTFPPSSPSDWPQERSPGGHSDGASPRSPVPTTLPGLRHAPWQGPRGPPDSPDGSPLTPVPSQMPWLVASPEPPQSSPTPAFPLAASYDTNGLSQPPLPEKRHLPGPGQQPGPWGPEQASSPARGISHHVTFAPLLSDNVPQTPEPPTQESQSNVKFVQDTSKFWYKPHLSRDQAIALLKDKDPGAFLIRDSHSFQGAYGLALKVATPPPSAQPWKGDPVEQLVRHFLIETGPKGVKIKGCPSEPYFGSLSALVSQHSISPISLPCCLRIPSKDPLEETPEAPVPTNMSTAADLLRQGAACSVLYLTSVETESLTGPQAVARASSAALSCSPRPTPAVVHFKVSAQGITLTDNQRKLFFRRHYPVNSITFSSTDPQDRRWTNPDGTTSKIFGFVAKKPGSPWENVCHLFAELDPDQPAGAIVTFITKVLLGQRK

SEQ ID NO: 6021 - protein, 1312 aa, Homo sapiens
MKSSGPVERLLRALGRRDSSRAASRPRKAEPHSFREKVFRKKPPVCAVCKVTIDGTGVSCRVCKVATHRKCEAKVTSACQALPPVELRRNTAPVRRIEHLGSTKSLNHSKQRSTLPRSFSLDPLMERRWDLDLTYVTERILAAAFPARPDEQRHRGHLRELAHVLQSKHRDKYLLFNLSEKRHDLTRLNPKVQDFGWPELHAPPLDKLCSICKAMETWLSADPQHVVVLYCKGNKGKLGVIVSAYMHYSKISAGADQALATLTMRKFCEDKVATELQPSQRRYISYFSGLLSGSIRMNSSPLFLHYVLIPMLPAFEPGTGFQPFLKIYQSMQLVYTSGVYHIAGPGPQQLCISLEPALLLKGDVMVTCYHKGGRGTDRTLVFRVQFHTCTIHGPQLTFPKDQLDEAWTDERFPFQASVEFVFSSSPEKIKGSTPRNDPSVSVDYNTTEPAVRWDSYENFNQHHEDSVDGSLTHTRGPLDGSPYAQVQRPPRQTPPAPSPEPPPPPMLSVSSDSGHSSTLTTEPAAESPGRPPPTAAERQELDRLLGGCGVASGGRGAGRETAILDDEEQPTVGGGPHLGVYPGHRPGLSRHCSCRQGYREPCGVPNGGYYRPEGTLERRRLAYGGYEGSPQGYAEASMEKRRLCRSLSEGLYPYPPEMGKPATGDFGYRAPGYREVVILEDPGLPALYPCPACEEKLALPTAALYGLRLEREAGEGWASEAGKPLLHPVRPGHPLPLLLPACGHHHAPMPDYSCLKPPKAGEEGHEGCSYTMCPEESLEPVSWREGPSGHSTLPRSPRDAPCSASSELSGPSTPLHTSSPVQGKESTRRQDTRSPTSAPTQRLSPGEALPPVSQAGTGKAPELPSGSGPEPLAPSPVSPTFPPSSPSDWPQERSPGGHSDGASPRSPVPTTLPGLRHAPWQGPRGPPDSPDGSPLTPVPSQMPWLVASPEPPQSSPTPAFPLAASYDTNGLSQPPLPEKRHLPGPGQQPGPWGPEQASSPARGISHHVTFAPLLSDNVPQTPEPPTQESQSNVKFVQDTSKFWYKPHLSRDQAIALLKDKDPGAFLIRDSHSFQGAYGLALKVATPPPSAQPWKGDPVEQLVRHFLIETGPKGVKIKGCPSEPYFGSLSALVSQHSISPISLPCCLRIPSKDPLEETPEAPVPTNMSTAADLLRQGAACSVLYLTSVETESLTGPQAVARASSAALSCSPRPTPAVVHFKVSAQGITLTDNQRKLFFRRHYPVNSITFSSTDPQDRRWTNPDGTTSKIFGFVAKKPGSPWENVCHLFAELDPDQPAGAIVTFITKVLLGQRK

SEQ ID NO: 6022 - protein, 1419 aa, Homo sapiens
MDGGGVCVGRGDLLSSPQALGQLLRKESRPRRAMKPRKAEPHSFREKVFRKKPPVCAVCKVTIDGTGVSCRVCKVATHRKCEAKVTSACQALPPVELRRNTAPVRRIEHLGSTKSLNHSKQRSTLPRSFSLDPLMERRWDLDLTYVTERILAAAFPARPDEQRHRGHLRELAHVLQSKHRDKYLLFNLSEKRHDLTRLNPKVQDFGWPELHAPPLDKLCSICKAMETWLSADPQHVVVLYCKGNKGKLGVIVSAYMHYSKISAGADQALATLTMRKFCEDKVATELQPSQRRYISYFSGLLSGSIRMNSSPLFLHYVLIPMLPAFEPGTGFQPFLKIYQSMQLVYTSGVYHIAGPGPQQLCISLEPALLLKGDVMVTCYHKGGRGTDRTLVFRVQFHTCTIHGPQLTFPKDQLDEAWTDERFPFQASVEFVFSSSPEKIKGSTPRNDPSVSVDYNTTEPAVRWDSYENFNQHHEDSVDGSLTHTRGPLDGSPYAQVQRPPRQTPPAPSPEPPPPPMLSVSSDSGHSSTLTTEPAAESPGRPPPTAAERQELDRLLGGCGVASGGRGAGRETAILDDEEQPTVGGGPHLGVYPGHRPGLSRHCSCRQGYREPCGVPNGGYYRPEGTLERRRLAYGGYEGSPQGYAEASMEKRRLCRSLSEGLYPYPPEMGKPATGDFGYRAPGYREVVILEDPGLPALYPCPACEEKLALPTAALYGLRLEREAGEGWASEAGKPLLHPVRPGHPLPLLLPACGHHHAPMPDYSCLKPPKAGEEGHEGCSYTMCPEGRYGHPGYPALVTYSYGGAVPSYCPAYGRVPHSCGSPGEGRGYPSPGAHSPRAGSISPGSPPYPQSRKLSYEIPTEEGGDRYPLPGHLASAGPLASAESLEPVSWREGPSGHSTLPRSPRDAPCSASSELSGPSTPLHTSSPVQGKESTRRQDTRSPTSAPTQRLSPGEALPPVSQAGTGKAPELPSGSGPEPLAPSPVSPTFPPSSPSDWPQERSPGGHSDGASPRSPVPTTLPGLRHAPWQGPRGPPDSPDGSPLTPVPSQMPWLVASPEPPQSSPTPAFPLAASYDTNGLSQPPLPEKRHLPGPGQQPGPWGPEQASSPARGISHHVTFAPLLSDNVPQTPEPPTQESQSNVKFVQDTSKFWYKPHLSRDQAIALLKDKDPGAFLIRDSHSFQGAYGLALKVATPPPSAQPWKGDPVEQLVRHFLIETGPKGVKIKGCPSEPYFGSLSALVSQHSISPISLPCCLRIPSKDPLEETPEAPVPTNMSTAADLLRQGAACSVLYLTSVETESLTGPQAVARASSAALSCSPRPTPAVVHFKVSAQGITLTDNQRKLFFRRHYPVNSITFSSTDPQDRRWTNPDGTTSKIFGFVAKKPGSPWENVCHLFAELDPDQPAGAIVTFITKVLLGQRK

SEQ ID NO: 6023 - protein, 1285 aa, Homo sapiens
MERRWDLDLTYVTERILAAAFPARPDEQRHRGHLRELAHVLQSKHRDKYLLFNLSEKRHDLTRLNPKVQDFGWPELHAPPLDKLCSICKAMETWLSADPQHVVVLYCKGNKGKLGVIVSAYMHYSKISAGADQALATLTMRKFCEDKVATELQPSQRRYISYFSGLLSGSIRMNSSPLFLHYVLIPMLPAFEPGTGFQPFLKIYQSMQLVYTSGVYHIAGPGPQQLCISLEPALLLKGDVMVTCYHKGGRGTDRTLVFRVQFHTCTIHGPQLTFPKDQLDEAWTDERFPFQASVEFVFSSSPEKIKGSTPRNDPSVSVDYNTTEPAVRWDSYENFNQHHEDSVDGSLTHTRGPLDGSPYAQVQRPPRQTPPAPSPEPPPPPMLSVSSDSGHSSTLTTEPAAESPGRPPPTAAERQELDRLLGGCGVASGGRGAGRETAILDDEEQPTVGGGPHLGVYPGHRPGLSRHCSCRQGYREPCGVPNGGYYRPEGTLERRRLAYGGYEGSPQGYAEASMEKRRLCRSLSEGLYPYPPEMGKPATGDFGYRAPGYREVVILEDPGLPALYPCPACEEKLALPTAALYGLRLEREAGEGWASEAGKPLLHPVRPGHPLPLLLPACGHHHAPMPDYSCLKPPKAGEEGHEGCSYTMCPEGRYGHPGYPALVTYSYGGAVPSYCPAYGRVPHSCGSPGEGRGYPSPGAHSPRAGSISPGSPPYPQSRKLSYEIPTEEGGDRYPLPGHLASAGPLASAESLEPVSWREGPSGHSTLPRSPRDAPCSASSELSGPSTPLHTSSPVQGKESTRRQDTRSPTSAPTQRLSPGEALPPVSQAGTGKAPELPSGSGPEPLAPSPVSPTFPPSSPSDWPQERSPGGHSDGASPRSPVPTTLPGLRHAPWQGPRGPPDSPDGSPLTPVPSQMPWLVASPEPPQSSPTPAFPLAASYDTNGLSQPPLPEKRHLPGPGQQPGPWGPEQASSPARGISHHVTFAPLLSDNVPQTPEPPTQESQSNVKFVQDTSKFWYKPHLSRDQAIALLKDKDPGAFLIRDSHSFQGAYGLALKVATPPPSAQPWKGDPVEQLVRHFLIETGPKGVKIKGCPSEPYFGSLSALVSQHSISPISLPCCLRIPSKDPLEETPEAPVPTNMSTAADLLRQGAACSVLYLTSVETESLTGPQAVARASSAALSCSPRPTPAVVHFKVSAQGITLTDNQRKLFFRRHYPVNSITFSSTDPQDRRWTNPDGTTSKIFGFVAKKPGSPWENVCHLFAELDPDQPAGAIVTFITKVLLGQRK

SEQ ID NO: 6024 - protein, 1407 aa, Homo sapiens
MKSSGPVERLLRALGRRDSSRAASRPRKAEPHSFREKVFRKKPPVCAVCKVTIDGTGVSCRVCKVATHRKCEAKVTSACQALPPVELRRNTAPVRRIEHLGSTKSLNHSKQRSTLPRSFSLDPLMERRWDLDLTYVTERILAAAFPARPDEQRHRGHLRELAHVLQSKHRDKYLLFNLSEKRHDLTRLNPKVQDFGWPELHAPPLDKLCSICKAMETWLSADPQHVVVLYCKGNKGKLGVIVSAYMHYSKISAGADQALATLTMRKFCEDKVATELQPSQRRYISYFSGLLSGSIRMNSSPLFLHYVLIPMLPAFEPGTGFQPFLKIYQSMQLVYTSGVYHIAGPGPQQLCISLEPALLLKGDVMVTCYHKGGRGTDRTLVFRVQFHTCTIHGPQLTFPKDQLDEAWTDERFPFQASVEFVFSSSPEKIKGSTPRNDPSVSVDYNTTEPAVRWDSYENFNQHHEDSVDGSLTHTRGPLDGSPYAQVQRPPRQTPPAPSPEPPPPPMLSVSSDSGHSSTLTTEPAAESPGRPPPTAAERQELDRLLGGCGVASGGRGAGRETAILDDEEQPTVGGGPHLGVYPGHRPGLSRHCSCRQGYREPCGVPNGGYYRPEGTLERRRLAYGGYEGSPQGYAEASMEKRRLCRSLSEGLYPYPPEMGKPATGDFGYRAPGYREVVILEDPGLPALYPCPACEEKLALPTAALYGLRLEREAGEGWASEAGKPLLHPVRPGHPLPLLLPACGHHHAPMPDYSCLKPPKAGEEGHEGCSYTMCPEGRYGHPGYPALVTYSYGGAVPSYCPAYGRVPHSCGSPGEGRGYPSPGAHSPRAGSISPGSPPYPQSRKLSYEIPTEEGGDRYPLPGHLASAGPLASAESLEPVSWREGPSGHSTLPRSPRDAPCSASSELSGPSTPLHTSSPVQGKESTRRQDTRSPTSAPTQRLSPGEALPPVSQAGTGKAPELPSGSGPEPLAPSPVSPTFPPSSPSDWPQERSPGGHSDGASPRSPVPTTLPGLRHAPWQGPRGPPDSPDGSPLTPVPSQMPWLVASPEPPQSSPTPAFPLAASYDTNGLSQPPLPEKRHLPGPGQQPGPWGPEQASSPARGISHHVTFAPLLSDNVPQTPEPPTQESQSNVKFVQDTSKFWYKPHLSRDQAIALLKDKDPGAFLIRDSHSFQGAYGLALKVATPPPSAQPWKGDPVEQLVRHFLIETGPKGVKIKGCPSEPYFGSLSALVSQHSISPISLPCCLRIPSKDPLEETPEAPVPTNMSTAADLLRQACSVLYLTSVETESLTGPQAVARASSAALSCSPRPTPAVVHFKVSAQGITLTDNQRKLFFRRHYPVNSITFSSTDPQDRRWTNPDGTTSKIFGFVAKKPGSPWENVCHLFAELDPDQPAGAIVTFITKVLLGQRK

SEQ ID NO: 6025 - protein, 467 aa, Homo sapiens
MWRCPLGLLLLLPLAGHLALGAQQGRGRRELAPGLHLRGIRDAGGRYCQEQDLCCRGRADDCALPYLGAICYCDLFCNRTVSDCCPDFWDFCLGVPPPFPPIQGCMHGGRIYPVLGTYWDNCNRCTCQENRQWQCDQEPCLVDPDMIKAINQGNYGWQAGNHSAFWGMTLDEGIRYRLGTIRPSSSVMNMHEIYTVLNPGEVLPTAFEASEKWPNLIHEPLDQGNCAGSWAFSTAAVASDRVSIHSLGHMTPVLSPQNLLSCDTHQQQGCRGGRLDGAWWFLRRRGVVSDHCYPFSGRERDEAGPAPPCMMHSRAMGRGKRQATAHCPNSYVNNNDIYQVTPVYRLGSNDKEIMKELMENGPVQALMEVHEDFFLYKGGIYSHTPVSLGRPERYRRHGTHSVKITGWGEETLPDGRTLKYWTAANSWGPAWGERGHFRIVRGVNECDIESFVLGVWGRVGMEDMGHH

SEQ ID NO: 6026 - protein, 284 aa, Homo sapiens
MVLGSSTQVKIGGSWNPAAAGGLKIKLQKALDLVALQCQWAPEGQARAEQEADRATFILQTVLNPGEVLPTAFEASEKWPNLIHEPLDQGNCAGSWAFSTAAVASDRVSIHSLGHMTPVLSPQNLLSCDTHQQQGCRGGRLDGAWWFLRRRGYAATGDVGREEGKELRGHGLGHDALSLSAFAPSCCLCRVVSDHCYPFSGRERDEAGPAPPCMMHSRAMGRGKRQATAHCPNSYVNNNDIYQVTPVYRLGSNDKEIMKELMENGPVQGKPPYPAPWFQKLVPA

SEQ ID NO: 6027 - protein, 436 aa, Homo sapiens
MWRCPLGLLLLLPLAGHLALGAQQGRGRRELAPGLHLRGIRDAGGRYCQEQDLCCRGRADDCALPYLGAICYCDLFCNRTVSDCCPDFWDFCLGVPPPFPPIQGCMHGGRIYPVLGTYWDNCNRCWQAGNHSAFWGMTLDEGIRYRLGTIRPSSSVMNMHEIYTVLNPGEVLPTAFEASEKWPNLIHEPLDQGNCAGSWAFSTAAVASDRVSIHSLGHMTPVLSPQNLLSCDTHQQQGCRGGRLDGAWWFLRRRGVVSDHCYPFSGRERDEAGPAPPCMMHSRAMGRGKRQATAHCPNSYVNNNDIYQVTPVYRLGSNDKEIMKELMENGPVQALMEVHEDFFLYKGGIYSHTPVSLGRPERYRRHGTHSVKITGWGEETLPDGRTLKYWTAANSWGPAWGERGHFRIVRGVNECDIESFVLGVWGRVGMEDMGHH

SEQ ID NO: 6028 - protein, 218 aa, Homo sapiens
MGRVFLTGEKANSILKRYPRANGFFEEIRQGNIERECKEEFCTFEEAREAFENNEKTKEFWSTYTKAQQGESNRGSDWFQFYLTFPLIFGLFIILLVIFLIWRCFLRNKTRRQTVTEGHIPFPQHLNIITPPPPPDEVFDSSGLSPGFLGYVVGRSDSVSTRLSNCDPPPTYEEATGQVNLQRSETEPHLDPPPEYEDIVNSNSASAIPMVPVVTTIK

SEQ ID NO: 6029 - protein, 82 aa, Homo sapiens
MGRVFLTGEKANSILKRYPRANGFFEEIRQGNIERECKEEFCTFEEAREAFENNEKTGLVLLPRLECSCEHGSLQPQLPVPK

SEQ ID NO: 6030 - protein, 843 aa, Homo sapiens
MPQCPTLESQEGENSEEKGDSSKEDPKETVALAFVRENPGAQNGLQNAQQQGKKKRKKKRLVINLSSCRYESVRRAAQQYGFREGGEDDDWTLYWTDYSVSLERVMEMKSYQKINHFPGMSEICRKDLLARNMSRMLKMFPKDFRFFPRTWCLPADWGDLQTYSRSRKNKTYICKPDSGCQGKGIFITRTVKEIKPGEDMICQLYISKPFIIDGFKFDLRIYVLVTSCDPLRIFVYNEGLARFATTSYSRPCTDNLDDICMHLTNYSINKHSSNFSRDAHSGSKRKLSTFSAYLEDHSYNVEQIWRDIEDVIIKTLISAHPIIRHNYHTCFPNHTLNSACFEILGFDILLDHKLKPWLLEVNHSPSFSTDSRLDKEVKDGLLYDTLVLINLESCDKKKVLEEERQRGQFLQQCCSREMRIEEAKGFRAVQLKKTETYEKENCGGFRLIYPSLNSEKYEKFFQDNNSLFQNTVASRAREEYARQLIQELRLKREKKPFQMKKKVEMQGESAGEQVRKKGMRGWQQKQQQKDKAATQASKQYIQPLTLVSYTPDLLLSVRGERKNETDSSLNQEAPTEEASSVFPKLTSAKPFSSLPDLRNINLSSSKLEPSKPNFSIKEAKSASAVNVFTGTVHLTSVETTPESTTQLSISPKSPPTLAVTASSEYSGPETDRVVSFKCKKQQTPPHLTQKKMLKSFLPTKSKSFWESPNTNWTLLKSDMNKPHLISELLTKLQLSGKLSFFPAHYNPKLGMNNLSQNPSLPGECHSRSDSSGEKRQLDVSSLLLQSPQSYNVTLRDLLVIATPAQLDPRPCRSHASAMRDPCMQDQEAYSHCLISGQKGCERS

SEQ ID NO: 6031 - protein, 569 aa, Homo sapiens
MEGCLGVAELRKLSTFSAYLEDHSYNVEQIWRDIEDVIIKTLISAHPIIRHNYHTCFPNHTLNSACFEILGFDILLDHKLKPWLLEVNHSPSFSTDSRLDKEVKDGLLYDTLVLINLESCDKKKVLEEERQRGQFLQQCCSREMRIEEAKGFRAVQLKKTETYEKENCGGFRLIYPSLNSEKYEKFFQDNNSLFQNTVASRAREEYARQLIQELRLKREKKPFQMKKKVEMQGESAGEQVRKKGMRGWQQKQQQKDKAATQASKQYIQPLTLVSYTPDLLLSVRGERKNETDSSLNQEAPTEEASSVFPKLTSAKPFSSLPDLRNINLSSSKLEPSKPNFSIKEAKSASAVNVFTGTVHLTSVETTPESTTQLSISPKSPPTLAVTASSEYSGPETDRVVSFKCKKQQTPPHLTQKKMLKSFLPTKSKSFWESPNTNWTLLKSDMNKPHLISELLTKLQLSGKLSFFPAHYNPKLGMNNLSQNPSLPGECHSRSDSSGEKRQLDVSSLLLQSPQSYNVTLRDLLVIATPAQLDPRPCRSHASAMRDPCMQDQEAYSHCLISGQKGCERS

SEQ ID NO: 6032 - protein, 643 aa, Homo sapiens
  MOD_RES (642)..(642): Selenocysteine
MERSPPQSPGPGKAGDAPNRRSGHVRGARVLSPPGRRARLSSPGPSRSSEAREELRRHLVGLIERSRVVIFSKSYCPHSTRVKELFSSLGVECNVLELDQVDDGARVQEVLSEITNQKTVPNIFVNKVHVGGCDQTFQAYQSGLLQKLLQEDLAYDYDLIIIGGGSGGLSCAKEAAILGKKVMVLDFVVPSPQGTSWGLGGTCVNVGCIPKKLMHQAALLGQALCDSRKFGWEYNQQVRHNWETMTKAIQNHISSLNWGYRLSLREKAVAYVNSYGEFVEHHKIKATNKKGQETYYTAAQFVIATGERPRYLGIQGDKEYCITSDDLFSLPYCPGKTLVVGASYVALECAGFLAGFGLDVTVMVRSILLRGFDQEMAEKVGSYMEQHGVKFLRKFIPVMVQQLEKGSPGKLKVLAKSTEGTETIEGVYNTVLLAIGRDSCTRKIGLEKIGVKINEKSGKIPVNDVEQTNVPYVYAVGDILEDKPELTPVAIQSGKLLAQRLFGASLEKCDYINVPTTVFTPLEYGCCGLSEEKAIEVYKKENLEIYHTLFWPLEWTVAGRENNTCYAKIICNKFDHDRVIGFHILGPNAGEVTQGFAAAMKCGLTKQLLDDTIGIHPTCGEVFTTLEITKSSGLDITQKGCXG

SEQ ID NO: 6033 - protein, 1089 aa, Homo sapiens
MAVFDTPEEAFGVLRPVCVQLTKTQTVENVEHLQTRLQAVSDSALQELQQYILFPLRFTLKTPGPKRERLIQSVVECLTFVLSSTCVKEQELLQELFSELSACLYSPSSQKPAAVSEELKLAVIQGLSTLMHSAYGDIILTFYEPSILPRLGFAVSLLLGLAEQEKSKQIKIAALKCLQVLLLQCDCQDHPRSLDELEQKQLGDLFASFLPGISTALTRLITGDFKQGHSIVVSSLKIFYKTVSFIMADEQLKRISKVQAKPAVEHRVAELMVYREADWVKKTGDKLTILIKKIIECVSVHPHWKVRLELVELVEDLLLKCSQSLVECAGPLLKALVGLVNDESPEIQAQCNKVLRHFADQKVVVGNKALADILSESLHSLATSLPRLMNSQDDQGKFSTLSLLLGYLKLLGPKINFVLNSVAHLQRLSKALIQVLELDVADIKIVEERRWNSDDLNASPKTSATQPWNRIQRRYFRFFTDERIFMLLRQVCQLLGYYGNLYLLVDHFMELYHQSVVYRKQAAMILNELVTGAAGLEVEDLHEKHIKTNPEELREIVTSILEEYTSQENWYLVTCLETEEMGEELMMEHPGLQAITSGEHTCQVTSFLAFSKPSPTICSMNSNIWQICIQLEGIGQFAYALGKDFCLLLMSALYPVLEKAGDQTLLISQVATSTMMDVCRACGYDSLQHLINQNSDYLVNGISLNLRHLALHPHTPKVLEVMLRNSDANLLPLVADVVQDVLATLDQFYDKRAASFVSVLHALMAALAQWFPDTGNLGHLQEQSLGEEGSHLNQRPAALEKSTTTAEDIEQFLLNYLKEKDVADGNVSDFDNEEEEQSVPPKVDENDTRPDVEPPLPLQIQIAMDVMERCIHLLSDKNLQIRLKVLDVLDLCVVVLQSHKNQLLPLAHQAWPSLVHRLTRDAPLAVLRAFKVLRTLGSKCGDFLRSRFCKDVLPKLAGSLVTQAPISARAGPVYSHTLAFKLQLAVLQGLGPLCERLDLGEGDLNKVADACLIYLSVKQPVKLQEAARSVFLHLMKVDPDSTWFLLNELYCPVQFTPPHPSLHPVQLHGASGQQNPYTTNVLQLLKELQ

SEQ ID NO: 6034 - protein, 275 aa, Homo sapiens
MLNLLLLALPVLASRAYAAPAPGQALQRVGIVGGQEAPRSKWPWQVSLRVHGPYWMHFCGGSLIHPQWVLTAAHCVGPDVKDLAALRVQLREQHLYYQDQLLPVSRIIVHPQFYTAQIGADIALLELEEPVNVSSHVHTVTLPPASETFPPGMPCWVTGWGDVDNDERLPPPFPLKQVKVPIMENHICDAKYHLGAYTGDDVRIVRDDMLCAGNTRRDSCQGDSGGPLVCKVNGTWLQAGVVSWGEGCAQPNRPGIYTRVTYYLDWIHHYVPKKP

SEQ ID NO: 6035 - protein, 353 aa, Homo sapiens
MPWPLLLLLAVSGAQTTRPCFPGCQCEVETFGLFDSFSLTRVDCSGLGPHIMPVPIPLDTAHLDLSSNRLEMVNESVLAGPGYTTLAGLDLSHNLLTSISPTAFSRLRYLESLDLSHNGLTALPAESFTSSPLSDVNLSHNQLREVSVSAFTTHSQGRALHVDLSHNLIHRLVPHPTRAGLPAPTIQSLNLAWNRLHAVPNLRDLPLRYLSLDGNPLAVIGPGAFAGLGGLTHLSLASLQRLPELAPSGFRELPGLQVLDLSGNPKLNWAGAEVFSGLSSLQELDLSGTNLVPLPEALLLHLPALQSVSVGQDVRCRRLVREGTYPRRPGSSPKVALHCVDTRDSAARGPTIL

SEQ ID NO: 6036 - protein, 1244 aa, Homo sapiens
MSGGGEQLDILSVGILVKERWKVLRKIGGGGFGEIYDALDMLTRENVALKVESAQQPKQVLKMEVAVLKKLQGKDHVCRFIGCGRNDRFNYVVMQLQGRNLADLRRSQSRGTFTISTTLRLGRQILESIESIHSVGFLHRDIKPSNFAMGRFPSTCRKCYMLDFGLARQFTNSCGDVRPPRAVAGFRGTVRYASINAHRNREMGRHDDLWSLFYMLVEFVVGQLPWRKIKDKEQVGSIKERYDHRLMLKHLPPEFSIFLDHISSLDYFTKPDYQLLTSVFDNSIKTFGVIESDPFDWEKTGNDGSLTTTTTSTTPQLHTRLTPAAIGIANATPIPGDLLRENTDEVFPDEQLSDGENGIPVGVSPDKLPGSLGHPRPQEKDVWEEMDANKNKIKLGICKAATEEENSHGQANGLLNAPSLGSPIRVRSEITQPDRDIPLVRKLRSIHSFELEKRLTLEPKPDTDKFLETCLEKMQKDTSAGKESILPALLHKPCVPAVSRTDHIWHYDEEYLPDASKPASANTPEQADGGGSNGFIAVNLSSCKQEIDSKEWVIVDKEQDLQDFRTNEAVGHKTTGSPSDEEPEVLQVLEASPQDEKLQLGPWAENDHLKKETSGVVLALSAEGPPTAASEQYTDRLELQPGAASQFIAATPTSLMEAQAEGPLTAITIPRPSVASTQSTSGSFHCGQQPEKKDLQPMEPTVELYSPRENFSGLVVTEGEPPSGGSRTDLGLQIDHIGHDMLPNIRESNKSQDLGPKELPDHNRLVVREFENLPGETEEKSILLESDNEDEKLSRGQHCIEISSLPGDLVIVEKDHSATTEPLDVTKTQTFSVVPNQDKNNEIMKLLTVGTSEISSRDIDPHVEGQIGQVAEMQKNKISKDDDIMSEDLPGHQGDLSTFLHQEGKREKITPRNGELFHCVSENEHGAPTRKDMVRSSFVTRHSRIPVLAQEIDSTLESSSPVSAKEKLLQKKAYQPDLVKLLVEKRQFKSFLGDLSSASDKLLEEKLATVPAPFCEEEVLTPFSRLTVDSHLSRSAEDSFLSPIISQSRKSKIPRPVSWVNTDQVNSSTSSQFFPRPPPGKPPTRPGVEARLRRYKVLGSSNSDSDLFSRLAQILQNGSQKPRSTTQCKSPGSPHNPKTPPKSPVVPRRSPSASPRSSSLPRTSSSSPSRAGRPHHDQRSSSPHLGRSKSPPSHSGSSSSRRSCQQEHCKPSKNGLKGSGSLHHHSASTKTPQGKSKPASKLSR

SEQ ID NO: 6037 - protein, 1167 aa, Homo sapiens
MESGKDHVCRFIGCGRNDRFNYVVMQLQGRNLADLRRSQSRGTFTISTTLRLGRQILESIESIHSVGFLHRDIKPSNFAMGRFPSTCRKCYMLDFGLARQFTNSCGDVRPPRAVAGFRGTVRYASINAHRNREMGRHDDLWSLFYMLVEFVVGQLPWRKIKDKEQVGSIKERYDHRLMLKHLPPEFSIFLDHISSLDYFTKPDYQLLTSVFDNSIKTFGVIESDPFDWEKTGNDGSLTTTTTSTTPQLHTRLTPAAIGIANATPIPGDLLRENTDEVFPDEQLSDGENGIPVGVSPDKLPGSLGHPRPQEKDVWEEMDANKNKIKLGICKAATEEENSHGQANGLLNAPSLGSPIRVRSEITQPDRDIPLVRKLRSIHSFELEKRLTLEPKPDTDKFLETCLEKMQKDTSAGKESILPALLHKPCVPAVSRTDHIWHYDEEYLPDASKPASANTPEQADGGGSNGFIAVNLSSCKQEIDSKEWVIVDKEQDLQDFRTNEAVGHKTTGSPSDEEPEVLQVLEASPQDEKLQLGPWAENDHLKKETSGVVLALSAEGPPTAASEQYTDRLELQPGAASQFIAATPTSLMEAQAEGPLTAITIPRPSVASTQSTSGSFHCGQQPEKKDLQPMEPTVELYSPRENFSGLVVTEGEPPSGGSRTDLGLQIDHIGHDMLPNIRESNKSQDLGPKELPDHNRLVVREFENLPGETEEKSILLESDNEDEKLSRGQHCIEISSLPGDLVIVEKDHSATTEPLDVTKTQTFSVVPNQDKNNEIMKLLTVGTSEISSRDIDPHVEGQIGQVAEMQKNKISKDDDIMSEDLPGHQGDLSTFLHQEGKREKITPRNGELFHCVSENEHGAPTRKDMVRSSFVTRHSRIPVLAQEIDSTLESSSPVSAKEKLLQKKAYQPDLVKLLVEKRQFKSFLGDLSSASDKLLEEKLATVPAPFCEEEVLTPFSRLTVDSHLSRSAEDSFLSPIISQSRKSKIPRPVSWVNTDQVNSSTSSQFFPRPPPGKPPTRPGVEARLRRYKVLGSSNSDSDLFSRLAQILQNGSQKPRSTTQCKSPGSPHNPKTPPKSPVVPRRSPSASPRSSSLPRTSSSSPSRAGRPHHDQRSSSPHLGRSKSPPSHSGSSSSRRSCQQEHCKPSKNGLKGSGSLHHHSASTKTPPREE

SEQ ID NO: 6038 - protein, 478 aa, Homo sapiens
MSGGGEQLDILSVGILVKERWKVLRKIGGGGFGEIYDALDMLTRENVALKVESAQQPKQVLKMEVAVLKKLQGKDHVCRFIGCGRNDRFNYVVMQLQGRNLADLRRSQSRGTFTISTTLRLGRQILESIESIHSVGFLHRDIKPSNFAMGRFPSTCRKCYMLDFGLARQFTNSCGDVRPPRAVAGFRGTVRYASINAHRNREMGRHDDLWSLFYMLVEFVVGQLPWRKIKDKEQVGSIKERYDHRLMLKHLPPEFSIFLDHISSLDYFTKPDYQLLTSVFDNSIKTFGVIESDPFDWEKTGNDGSLTTTTTSTTPQLHTRLTPAAIGIANATPIPGDLLRENTDEVFPDEQLSDGENGIPVGVSPDKLPGSLGHPRPQEKDVWEEMDANKNKIKLGICKAATEEENSHGQANGLLNAPSLGSPIRVRSEITQPDRDIPLVRKLRSIHSFELEKRLTLEPKPDTDKFLETWYKIVYFSF

SEQ ID NO: 6039 - protein, 1170 aa, Homo sapiens
MGLAWGLGVLFLMHVCGTNRIPESGGDNSVFDIFELTGAARKGSGRRLVKGPDPSSPAFRIEDANLIPPVPDDKFQDLVDAVRAEKGFLLLASLRQMKKTRGTLLALERKDHSGQVFSVVSNGKAGTLDLSLTVQGKQHVVSVEEALLATGQWKSITLFVQEDRAQLYIDCEKMENAELDVPIQSVFTRDLASIARLRIAKGGVNDNFQGVLQNVRFVFGTTPEDILRNKGCSSSTSVLLTLDNNVVNGSSPAIRTNYIGHKTKDLQAICGISCDELSSMVLELRGLRTIVTTLQDSIRKVTEENKELANELRRPPLCYHNGVQYRNNEEWTVDSCTECHCQNSVTICKKVSCPIMPCSNATVPDGECCPRCWPSDSADDGWSPWSEWTSCSTSCGNGIQQRGRSCDSLNNRCEGSSVQTRTCHIQECDKRFKQDGGWSHWSPWSSCSVTCGDGVITRIRLCNSPSPQMNGKPCEGEARETKACKKDACPINGGWGPWSPWDICSVTCGGGVQKRSRLCNNPTPQFGGKDCVGDVTENQICNKQDCPIDGCLSNPCFAGVKCTSYPDGSWKCGACPPGYSGNGIQCTDVDECKEVPDACFNHNGEHRCENTDPGYNCLPCPPRFTGSQPFGQGVEHATANKQVCKPRNPCTDGTHDCNKNAKCNYLGHYSDPMYRCECKPGYAGNGIICGEDTDLDGWPNENLVCVANATYHCKKDNCPNLPNSGQEDYDKDGIGDACDDDDDNDKIPDDRDNCPFHYNPAQYDYDRDDVGDRCDNCPYNHNPDQADTDNNGEGDACAADIDGDGILNERDNCQYVYNVDQRDTDMDGVGDQCDNCPLEHNPDQLDSDSDRIGDTCDNNQDIDEDGHQNNLDNCPYVPNANQADHDKDGKGDACDHDDDNDGIPDDKDNCRLVPNPDQKDSDGDGRGDACKDDFDHDSVPDIDDICPENVDISETDFRRFQMIPLDPKGTSQNDPNWVVRHQGKELVQTVNCDPGLAVGYDEFNAVDFSGTFFINTERDDDYAGFVFGYQSSSRFYVVMWKQVTQSYWDTNPTRAQGYSGLSVKVVNSTTGPGEHLRNALWHTGNTPGQVRTLWHDPRHIGWKDFTAYRWRLSHRPKTGFIRVVMYEGKKIMADSGPIYDKTYAGGRLGLFVFSQEMVFFSDLKYECRDP

SEQ ID NO: 6040 - protein, 1085 aa, Homo sapiens
MGLAWGLGVLFLMHVCGTLLALERKDHSGQVFSVVSNGKAGTLDLSLTVQGKQHVVSVEEALLATGQWKSITLFVQEDRAQLYIDCEKMENAELDVPIQSVFTRDLASIARLRIAKGGVNDNFQGVLQNVRFVFGTTPEDILRNKGCSSSTSVLLTLDNNVVNGSSPAIRTNYIGHKTKDLQAICGISCDELSSMVLELRGLRTIVTTLQDSIRKVTEENKELANELRRPPLCYHNGVQYRNNEEWTVDSCTECHCQNSVTICKKVSCPIMPCSNATVPDGECCPRCWPSDSADDGWSPWSEWTSCSTSCGNGIQQRGRSCDSLNNRCEGSSVQTRTCHIQECDKRFKQDGGWSHWSPWSSCSVTCGDGVITRIRLCNSPSPQMNGKPCEGEARETKACKKDACPINGGWGPWSPWDICSVTCGGGVQKRSRLCNNPTPQFGGKDCVGDVTENQICNKQDCPIDGCLSNPCFAGVKCTSYPDGSWKCGACPPGYSGNGIQCTDVDECKEVPDACFNHNGEHRCENTDPGYNCLPCPPRFTGSQPFGQGVEHATANKQVCKPRNPCTDGTHDCNKNAKCNYLGHYSDPMYRCECKPGYAGNGIICGEDTDLDGWPNENLVCVANATYHCKKDNCPNLPNSGQEDYDKDGIGDACDDDDDNDKIPDDRDNCPFHYNPAQYDYDRDDVGDRCDNCPYNHNPDQADTDNNGEGDACAADIDGDGILNERDNCQYVYNVDQRDTDMDGVGDQCDNCPLEHNPDQLDSDSDRIGDTCDNNQDIDEDGHQNNLDNCPYVPNANQADHDKDGKGDACDHDDDNDGIPDDKDNCRLVPNPDQKDSDGDGRGDACKDDFDHDSVPDIDDICPENVDISETDFRRFQMIPLDPKGTSQNDPNWVVRHQGKELVQTVNCDPGLAVGYDEFNAVDFSGTFFINTERDDDYAGFVFGYQSSSRFYVVMWKQVTQSYWDTNPTRAQGYSGLSVKVVNSTTGPGEHLRNALWHTGNTPGQVRTLWHDPRHIGWKDFTAYRWRLSHRPKTGFIRVVMYEGKKIMADSGPIYDKTYAGGRLGLFVFSQEMVFFSDLKYECRDP

SEQ ID NO: 6041 - protein, 380 aa, Homo sapiens
MSLSDWHLAVKLADQPLTPKSILRLPETELGEYSLGGYSISFLKQLIAGKLQESVPDPELIDLIYCGRKLKDDQTLDFYGIQPGSTVHVLRKSWPEPDQKPEPVDKVAAMREFRVLHTALHSSSSYREAVFKMLSNKESLDQIIVATPGLSSDPIALGVLQDKDLFSVFADPNMLDTLVPAHPALVNAIVLVLHSVAGSAPMPGTDSSSRSMPSSSYRDMPGGFLFEGLSDDEDDFHPNTRSTPSSSTPSSRPASLGYSGAAGPRPITQSELATALALASTPESSSHTPTPGTQGHSSGTSPMSSGVQSGTPITNDLFSQALQHALQASGQPSLQSQWQPQLQQLRDMGIQDDELSLRALQATGGDIQAALELIFAGGAP

SEQ ID NO: 6042 - protein, 228 aa, Homo sapiens
MSVSEIFVELQGFLAAEQDIREEIRKVVQSLEQTAREILTLLQGVHQGAGFQDIPKRCLKAREHFGTVKTHLTSLKTKFPAEQYYRFHEHWRFVLQRLVFLAAFVVYLETETLVTREAVTEILGIEPDREKGFHLDVEDYLSGVLILASELSRLSVNSVTAGDYSRPLHISTFINELDSGFRLLNLKNDSLRKRYDGLKYDVKKVEEVVYDLSIRGFNKETAAACVEK

SEQ ID NO: 6043 - protein, 148 aa, Homo sapiens
MSVSEIFVELQGFLAAEQDIREEIRKVVQSLEQTAREILTLLQGVHQGAGFQDIPKRCLKAREHFGTVKTHLTSLKTKFPAEQYYRFHEHWRFVLQRLVFLAAFVVYLETETLVTREAVTEILGIEAVCQQRDCWRLLPTPPHLHLHQ

SEQ ID NO: 6044 - protein, 536 aa, Homo sapiens
MVSIRDFTMPKKFVQMLVFNLTLTEVVLSGNVLIWPTDGSHWLNIKIILEELIQRNHNVTVLASSATLFINSNPDSPVNFEVIPVSYKKSNIDSLIEHMIMLWIDHRPTPLTIWAFYKELGKLLDTFFQINIQLCDGVLKNPKLMARLQKGGFDVLVADPVTICGDLVALKLGIPFMYTLRFSPASTVERHCGKIPAPVSYVPAALSELTDQMTFGERIKNTISYSLQDYIFQSYWGEWNSYYSKILGRPTTLCETMGKAEIWLIRTYWDFEFPRPYLPNFEFVGGLHCKPAKPLPKEMEEFIQSSGKNGVVVFSLGSMVKNLTEEKANLIASALAQIPQKVLWRYKGKKPATLGNNTQLFDWIPQNDLLGHPKTKAFITHGGTNGIYEAIYHGVPMVGVPMFADQPDNIAHMKAKGAAVEVNLNTMTSVDLLSALRTVINEPSYKENAMRLSRIHHDQPVKPLDRAVFWIEFVMRHKGAKHLRVAAHDLTWFQYHSLDVIGFLLVCVTTAIFLVIQCCLFSCQKFGKIGKKKKRE

SEQ ID NO: 6045 - protein, 492 aa, Homo sapiens
MVSIRDFTMPKKFVQMLVFNLTLTEVVLSGNVLIWPTDGSHWLNIKIILEELIQRNHNVTVLASSATLFINSNPDSPVNFEVIPVSYKKSNIDSLIEHMIMLWIDHRPTPLTIWAFYKELGKLLDTFFQINIQLCDGVLKNPKLMARLQKGGFDVLVADPVTICGDLVALKLGIPFMYTLRFSPASTVERHCGKIPAPVSYVPAALSELTDQMTFGERIKNTISYSLQDYIFQSYWGEWNSYYSKILGRPTTLCETMGKAEIWLIRTYWDFEFPRPYLPNFEFVGGLHCKPAKPLPKVLWRYKGKKPATLGNNTQLFDWIPQNDLLGHPKTKAFITHGGTNGIYEAIYHGVPMVGVPMFADQPDNIAHMKAKGAAVEVNLNTMTSVDLLSALRTVINEPSYKENAMRLSRIHHDQPVKPLDRAVFWIEFVMRHKGAKHLRVAAHDLTWFQYHSLDVIGFLLVCVTTAIFLVIQCCLFSCQKFGKIGKKKKRE

SEQ ID NO: 6046 - protein, 114 aa, Homo sapiens
MEKNPLAAPLLILWFHLDCVSSILNVEQSPQSLHVQEGDSTNFTCSFPSSNFYALHWYRWETAKSPEALFVMTLNGDEKKKGRISATLNTKEGYSYLYIKGSQPEDSATYLCAF

SEQ ID NO: 6047 - protein, 673 aa, Homo sapiens
MCSRVPLLLPLLLLLALGPGVQGCPSGCQCSQPQTVFCTARQGTTVPRDVPPDTVGLYVFENGITMLDAGSFAGLPGLQLLDLSQNQIASLPSGVFQPLANLSNLDLTANRLHEITNETFRGLRRLERLYLGKNRIRHIQPGAFDTLDRLLELKLQDNELRALPPLRLPRLLLLDLSHNSLLALEPGILDTANVEALRLAGLGLQQLDEGLFSRLRNLHDLDVSDNQLERVPPVIRGLRGLTRLRLAGNTRIAQLRPEDLAGLAALQELDVSNLSLQALPGDLSGLFPRLRLLAAARNPFNCVCPLSWFGPWVRESHVTLASPEETRCHFPPKNAGRLLLELDYADFGCPATTTTATVPTTRPVVREPTALSSSLAPTWLSPTEPATEAPSPPSTAPPTVGPVPQPQDCPPSTCLNGGTCHLGTRHHLACLCPEGFTGLYCESQMGQGTRPSPTPVTPRPPRSLTLGIEPVSPTSLRVGLQRYLQGSSVQLRSLRLTYRNLSGPDKRLVTLRLPASLAEYTVTQLRPNATYSVCVMPLGPGRVPEGEEACGEAHTPPAVHSNHAPVTQAREGNLPLLIAPALAAVLLAALAAVGAAYCVRRGRAMAAAAQDKGQVGPGAGPLELEGVKVPLEPGPKATEGGGEALPSGSECEVPLMGFPGPGLQSPLHAKPYI

SEQ ID NO: 6048 - protein, 709 aa, Homo sapiens
MDQKLSKLVEELTTSGEPRLNPEKMKELKKICKSSEEQLSRAYRLLIAQLTQEHAEIRLSAFQIVEELFVRSHQFRMLVVSNFQEFLELTLGTDPAQPLPPPREAAQRLRQATTRAVEGWNEKFGEAYKKLALGYHFLRHNKKVDFQDTNARSLAERKREEEKQKHLDKIYQERASQAEREMQEMSGEIESCLTEVESCFRLLVPFDFDPNPETESLGMASGMSDALRSSCAGQVGPCRSGTPDPRDGEQPCCSRDLPASAGHPRAGGGAQPSQTATGDPSDEDEDSDLEEFVRSHGLGSHKYTLDVELCSEGLKVQENEDNLALIHAARDTLKLIRNKFLPAVCSWIQRFTRVGTHGGCLKRAIDLKAELELVLRKYKELDIEPEGGERRRTEALGDAEEDEDDEDFVEVPEKEGYEPHIPDHLRPEYGLEAAPEKDTVVRCLRTRTRMDEEVSDPTSAAAQLRQLRDHLPPPSSASPSRALPEPQEAQKLAAERARAPVVPYGVDLHYWGQELPTAGKIVKSDSQHRFWKPSEVEEEVVNADISEMLRSRHITFAGKFEPVQHWCRAPRPDGRLCERQDRLKCPFHGKIVPRDDEGRPLDPEDRAREQRRQLQKQERPEWQDPELMRDVEAATGQDLGSSRYSGKGRGKKRRYPSLTNLKAQADTARARIGRKVFAKAAVRRVVAAMNRMDQKKHEKFSNQFNYALN

SEQ ID NO: 6049 - protein, 260 aa, Homo sapiens
MDEEVSDPTSAAAQLRQLRDHLPPPSSASPSRALPEPQEAQKLAAERARAPVVPYGVDLHYWGQELPTAGKIVKSDSQHRFWKPSEVEEEVVNADISEMLRSRHITFAGKFEPVQHWCRAPRPDGRLCERQDRLKCPFHGKIVPRDDEGRPLDPEDRAREQRRQLQKQERPEWQDPELMRDVEAATGQDLGSSRYSGKGRGKKRRYPSLTNLKAQADTARARIGRKVFAKAAVRRVVAAMNRMDQKKHEKFSNQFNYALN

SEQ ID NO: 6050 - protein, 457 aa, Homo sapiens
MRPPSPLPARWLCVLAGALAWALGPAGGQAARLQEECDYVQMIEVQHKQCLEEAQLENETIGCSKMWDNLTCWPATPRGQVVVLACPLIFKLFSSIQGRNVSRSCTDEGWTHLEPGPYPIACGLDDKAASLDEQQTMFYGSVKTGYTIGYGLSLATLLVATAILSLFRKLHCTRNYIHMHLFISFILRAAAVFIKDLALFDSGESDQCSEGSVGCKAAMVFFQYCVMANFFWLLVEGLYLYTLLAVSFFSERKYFWGYILIGWGVPSTFTMVWTIARIHFEDYGCWDTINSSLWWIIKGPILTSILVNFILFICIIRILLQKLRPPDIRKSDSSPYSRLARSTLLLIPLFGVHYIMFAFFPDNFKPEVKMVFELVVGSFQGFVVAILYCFLNGEVQAELRRKWRRWHLQGVLGWNPKYRHPSGGSNGATCSTQVSMLTRVSPGARRSSSFQAEVSLV

SEQ ID NO: 6051 - protein, 492 aa, Homo sapiens
MPPPPLLSLRRLGGGWSAVTRLVVAAAGARSRGGRGGSRGAGGGGRGGVARRRRLELRAARSLLGSSLQEECDYVQMIEVQHKQCLEEAQLENETIGCSKMWDNLTCWPATPRGQVVVLACPLIFKLFSSIQGRNVSRSCTDEGWTHLEPGPYPIACGLDDKAASLDEQQTMFYGSVKTGYTIGYGLSLATLLVATAILSLFRKLHCTRNYIHMHLFISFILRAAAVFIKDLALFDSGESDQCSEGSVGCKAAMVFFQYCVMANFFWLLVEGLYLYTLLAVSFFSERKYFWGYILIGWGVPSTFTMVWTIARIHFEDYGCWDTINSSLWWIIKGPILTSILVNFILFICIIRILLQKLRPPDIRKSDSSPYSRLARSTLLLIPLFGVHYIMFAFFPDNFKPEVKMVFELVVGSFQGFVVAILYCFLNGEVQAELRRKWRRWHLQGVLGWNPKYRHPSGGSNGATCSTQVSMLTRVSPGARRSSSFQAEVSLV

SEQ ID NO: 6052 - protein, 247 aa, Homo sapiens
MTRQRVWMRWAVRQPWSFSNIVSWLTSSGCWWRASTCTPCLPSPSSLSGSTSGGVPSTFTMVWTIARIHFEDYGCWDTINSSLWWIIKGPILTSILVNFILFICIIRILLQKLRPPDIRKSDSSPYSRLARSTLLLIPLFGVHYIMFAFFPDNFKPEVKMVFELVVGSFQGFVVAILYCFLNGEVQAELRRKWRRWHLQGVLGWNPKYRHPSGGSNGATCSTQVSMLTRVSPGARRSSSFQAEVSLV

SEQ ID NO: 6053 - protein, 409 aa, Homo sapiens
MRAGRRPRLGPWAGGCSKMWDNLTCWPATPRGQVVVLACPLIFKLFSSIQGRNVSRSCTDEGWTHLEPGPYPIACGLDDKAASLDEQTMFYGSVKTGYTIGYGLSLATLLVATAILSLFRKLHCTRNYIHMHLFISFILRAAAVFIKDLALFDSGESDQCSEGSVGCKAAMVFFQYCVMANFFWLLVEGLYLYTLLAVSFFSERKYFWGYILIGWGVPSTFTMVWTIARIHFEDYGCWDTINSSLWWIIKGPILTSILVNFILFICIIRILLQKLRPPDIRKSDSSPYSRLARSTLLLIPLFGVHYIMFAFFPDNFKPEVKMVFELVVGSFQGFVVAILYCFLNGEVQAELRRKWRRWHLQGVLGWNPKYRHPSGGSNGATCSTQVSMLTRVSPGARRSSSFQAEVSLV

SEQ ID NO: 6054 - protein, 416 aa, Homo sapiens
MIEVQHKQCLEEAQLENETIGCSKMWDNLTCWPATPRGQVVVLACPLIFKLFSSIQGRNVSRSCTDEGWTHLEPGPYPIACGLDDKAASLDEQQTMFYGSVKTGYTIGYGLSLATLLVATAILSLFRKLHCTRNYIHMHLFISFILRAAAVFIKDLALFDSGESDQCSEGSVGCKAAMVFFQYCVMANFFWLLVEGLYLYTLLAVSFFSERKYFWGYILIGWGVPSTFTMVWTIARIHFEDYGCWDTINSSLWWIIKGPILTSILVNFILFICIIRILLQKLRPPDIRKSDSSPYSRLARSTLLLIPLFGVHYIMFAFFPDNFKPEVKMVFELVVGSFQGFVVAILYCFLNGEVQAELRRKWRRWHLQGVLGWNPKYRHPSGGSNGATCSTQVSMLTRVSPGARRSSSFQAEVSLV

SEQ ID NO: 6055 - protein, 799 aa, Homo sapiens
MPSQNYDLPQKKQEKMTKFQEAVTFKDVAVVFSREELRLLDLTQRKLYRDVMVENFKNLVAVGHLPFQPDMVSQLEAEEKLWMMETETQRSSKHQNKMETLQKFALKYLSNQELSCWQIWKQVASELTRCLQGKSSQLLQGDSIQVSENENNIMNPKGDSSIYIENQEFPFWRTQHSCGNTYLSESQIQSRGKQIDVKNNLQIHEDFMKKSPFHEHIKTDTEPKPCKGNEYGKIISDGSNQKLPLGEKPHPCGECGRGFSYSPRLPLHPNVHTGEKCFSQSSHLRTHQRIHPGEKLNRCHESGDCFNKSSFHSYQSNHTGEKSYRCDSCGKGFSSSTGLIIHYRTHTGEKPYKCEECGKCFSQSSNFQCHQRVHTEEKPYKCEECGKGFGWSVNLRVHQRVHRGEKPYKCEECGKGFTQAAHFHIHQRVHTGEKPYKCDVCGKGFSHNSPLICHRRVHTGEKPYKCEACGKGFTRNTDLHIHFRVHTGEKPYKCKECGKGFSQASNLQVHQNVHTGEKRFKCETCGKGFSQSSKLQTHQRVHTGEKPYRCDVCGKDFSYSSNLKLHQVIHTGEKPYKCEECGKGFSWRSNLHAHQRVHSGEKPYKCEQCDKSFSQAIDFRVHQRVHTGEKPYKCGVCGKGFSQSSGLQSHQRVHTGEKPYKCDVCGKGFRYSSQFIYHQRGHTGEKPYKCEECGKGFGRSLNLRHHQRVHTGEKPHICEECGKAFSLPSNLRVHLGVHTREKLFKCEECGKGFSQSARLEAHQRVHTGEKPYKCDICDKDFRHRSRLTYHQKVHTGKKL

SEQ ID NO: 6056 - protein, 748 aa, Homo sapiens
MVENFKNLVAVGHLPFQPDMVSQLEAEEKLWMMETETQRSSKHQNKMETLQKFALKYLSNQELSCWQIWKQVASELTRCLQGKSSQLLQGDSIQVSENENNIMNPKGDSSIYIENQEFPFWRTQHSCGNTYLSESQIQSRGKQIDVKNNLQIHEDFMKKSPFHEHIKTDTEPKPCKGNEYGKIISDGSNQKLPLGEKPHPCGECGRGFSYSPRLPLHPNVHTGEKCFSQSSHLRTHQRIHPGEKLNRCHESGDCFNKSSFHSYQSNHTGEKSYRCDSCGKGFSSSTGLIIHYRTHTGEKPYKCEECGKCFSQSSNFQCHQRVHTEEKPYKCEECGKGFGWSVNLRVHQRVHRGEKPYKCEECGKGFTQAAHFHIHQRVHTGEKPYKCDVCGKGFSHNSPLICHRRVHTGEKPYKCEACGKGFTRNTDLHIHFRVHTGEKPYKCKECGKGFSQASNLQVHQNVHTGEKRFKCETCGKGFSQSSKLQTHQRVHTGEKPYRCDVCGKDFSYSSNLKLHQVIHTGEKPYKCEECGKGFSWRSNLHAHQRVHSGEKPYKCEQCDKSFSQAIDFRVHQRVHTGEKPYKCGVCGKGFSQSSGLQSHQRVHTGEKPYKCDVCGKGFRYSSQFIYHQRGHTGEKPYKCEECGKGFGRSLNLRHHQRVHTGEKPHICEECGKAFSLPSNLRVHLGVHTREKLFKCEECGKGFSQSARLEAHQRVHTGEKPYKCDICDKDFRHRSRLTYHQKVHTGKKL

SEQ ID NO: 6057 - protein, 678 aa, Homo sapiens
MEPGGDHRSRSSGGRGGPGPAVASARGRRLPPAGSSGSAEPEEDEGGQDLQLEGGALGSWGSAPLPSSRARGPASSGRKYSDHCEARASRPGKSRIPGRDHRRYYHDHWRLEYLMDFNPARHGMVCMVCGSSLATLKLSTIKRHIRQKHPYSLHWSPREKEVISNSWDAHLGLGACGEAEGLGVQGAEEEEEEEEEEEEEGAGVPACPPKGPGKAPAGGGCRRQRRGGPVAPRARRLRLSASRRAGGSRGLGARRLERRLKESLQNWFRAECLMDYDPRGNRLVCMACGRALPSLHLDDIRAHVLEVHPGSLGLSGPQRSALLQAWGGQPEALSELTQSPPGDDLAPQDLTGKSRDSASAAGAPSSQDLSPPDVKEEAGWVPERPGPAEEEEELEEGEGERAGVPGRSPRGRAHRRHPQERWRLEYLMELDGGRRGLVCGVCGGALASLKMSTIERHIRRRHPGSTRLGGPVQALIAREWSEKAAHLLALGPPRPESPQGPIPPGTAAASDEGGGDEEEEPEEEEEEWGDVPLSPGAPLERPAEEEEDEEDGQEPGGLALPPPPPPPPPPPPRSREQRRNYQPRWRGEYLMDYDGSRRGLVCMVCGGALATLKVSTIKRHILQVHPFSMDFTPEERQTILEAYEEAALRCYGHEGFGPPAPAPRDGGADLKSGAVCRA

SEQ ID NO: 6058 - protein, 281 aa, Homo sapiens
MAEAAPARDPETDKHTEDQSPSTPLPQPAAEKNSYLYSTEITLWTVVAAIQALEKKVDSCLTRLLTLEGRTGTAEKKLADCEKTAVEFGNQLEGKWAVLGTLLQEYGLLQRRLENVENLLRNRNFWILRLPPGSKGEAPKVPVTFDDVAVYFSELEWGKLEDWQKELYKHVMRGNYETLVSLDYAISKPDILTRIERGEEPCLDRWGQEKGNEVEVGRPRMMGTGLPPYPEHLTSPLSPAQEELKEGQAPKQQQDSEARVAPAGPEAGLALRTDLQGEAQI

SEQ ID NO: 6059 - protein, 546 aa, Homo sapiens
MAEAAPARDPETDKHTEDQSPSTPLPQPAAEKNSYLYSTEITLWTVVAAIQALEKKVDSCLTRLLTLEGRTGTAEKKLADCEKTAVEFGNQLEGKWAVLGTLLQEYGLLQRRLENVENLLRNRNFWILRLPPGSKGEAPKVPVTFDDVAVYFSELEWGKLEDWQKELYKHVMRGNYETLVSLDYAISKPDILTRIERGEEPCLDRWGQEKGNEVEVGRPRMMGTGLPPYPEHLTSPLSPAQEELKEGQAPKQQQDSEARVAPAGPEAGGGVAIKTEAQSEDEMTPERLFLGVSRGQTECRIPRGPRNRPGGPSRHQAQGMPRVRAGEPRPPGASGETPRVLSRRRQRAFPCPDCGQSFRLKINLTIHQRTHVEEGRQEAPGRSPTSCGDSQAMLEPGEVVVPGPVIRWLPEEPEGRRSVAGGRALVGRRPAASKMYHCSECLRFFQQRKSLLLHQRLHTGNGQGWPACPYCGKAFRRPSDLFRHQRIHTGERPYQCPQCGRTFNRNHHLAVHMQTHARGQVGPHFPAAPARHGSLPLPWPSRKEEG

SEQ ID NO: 6060 - protein, 532 aa, Homo sapiens
MMFQDSVAFEDVAVSFTQEEWALLDPSQKNLYRDVMQETFKNLTSVGKTWKVQNIEDEYKNPRRNLSLMREKLCESKESHHCGESFNQIADDMLNRKTLPGITPCESSVCGEVGTGHSSLNTHIRADTGHKSSEYQEYGENPYRNKECKKAFSYLDSFQSHDKACTKEKPYDGKECTETFISHSCIQRHRVMHSGDGPYKCKFCGKAFYFLNLCLIHERIHTGVKPYKCKQCGKAFTRSTTLPVHERTHTGVNADECKECGNAFSFPSEIRRHKRSHTGEKPYECKQCGKVFISFSSIQYHKMTHTGEKPYECKQCGKAFRCGSHLQKHGRTHTGEKPYECRQCGKAFRCTSDLQRHEKTHTEDKPYGCKQCGKGFRCASQLQIHERTHSGEKPHECKECGKVFKYFSSLRIHERTHTGEKPHECKQCGKAFRYFSSLHIHERTHTGDKPYECKVCGKAFTCSSSIRYHERTHTGEKPYECKHCGKAFISNYIRYHERTHTGEKPYQCKQCGKAFIRASSCREHERTHTINR

SEQ ID NO: 6061 - protein, 203 aa, Homo sapiens
MHTGEKPYTCEECVKLLTNPQALLYTGAFILNKNFTNVKNAAKPLLNPHPLINKRIHTGEKPYTCEECGKAFYRSSHLTEHKNIHTGEKSYKCEECGNAFYRSSHLTKHKRIHSGQKPYKCEECGKAFRQSSALNEHKKIHTAEKPYKCKECGKAFRWSRSLNEHTNIHIGEKPYTCEECGKDFTWSSTLTVHQRIQTGEKHS

SEQ ID NO: 6062 - protein, 543 aa, Homo sapiens
MMFGGYETIEAYEDDLYRDESSSELSVDSEVEFQLYSQIHYAQDLDDVIREEEHEEKNSGNSESSSSKPNQKKLIVLSDSEVIQLSDGSEVITLSDEDSIYRCKGKNVRVQAQENAHGLSSSLQSNELVDKKCKSDIEKPKSEERSGVIREVMIIEVSSSEEEESTISEGDNVESWMLLGCEVDDKDDDILLNLVGCENSVTEGEDGINWSISDKDIEAQIANNRTPGRWTQRYYSANKNIICRNCDKRGHLSKNCPLPRKVRRCFLCSRRGHLLYSCPAPLCEYCPVPKMLDHSCLFRHSWDKQCDRCHMLGHYTDACTEIWRQYHLTTKPGPPKKPKTPSRPSALAYCYHCAQKGHYGHECPEREVYDPSPVSPFICYYDDKYEIQEREKRLKQKIKVLKKNGVIPEPSKLPYIKAANENPHHDIRKGRASWKSNRWPQENKETQKEMKNKNRNWEKHRKADRHREVDEDFPRGPKTYSSPGSFKTQKPSKPFHRSSHYHTSREDKSPKEGKRGKQKKKERCWEDDDNDNLFLIKQRKKKS

SEQ ID NO: 6063 - protein, 206 aa, Homo sapiens
MMFGGYETIEAYEDDLYRDESSSELSVDSEVEFQLYSQIHYAQDLDDVIREEEHEEKNSGNSESSSSKPNQKKLIVLSDSEVIQLSDGSEVITLSDEDSIYRCKGKNVRVQAQENAHGLSSSLQSNELVDKKCKSDIEKPKSEERSGVIREVMIIEVSSSEEEESTISEGDNVESWMLLGCEVDDKDDDILLNLVGCENSVTEGQE

SEQ ID NO: 6064 - protein, 640 aa, Homo sapiens
MAEAALVITPQIPMVTEEFVKPSQGHVTFEDIAVYFSQEEWGLLDEAQRCLYHDVMLENFSLMASVGCLHGIEAEEAPSEQTLSAQGVSQARTPKLGPSIPNAHSCEMCILVMKDILYLSEHQGTLPWQKPYTSVASGKWFSFGSNLQQHQNQDSGEKHIRKEESSALLLNSCKIPLSDNLFPCKDVEKDFPTILGLLQHQTTHSRQEYAHRSRETFQQRRYKCEQVFNEKVHVTEHQRVHTGEKAYKRREYGKSLNSKYLFVEHQRTHNAEKPYVCNICGKSFLHKQTLVGHQQRIHTRERSYVCIECGKSLSSKYSLVEHQRTHNGEKPYVCNVCGKSFRHKQTFVGHQQRIHTGERPYVCMECGKSFIHSYDRIRHQRVHTGEGAYQCSECGKSFIYKQSLLDHHRIHTGERPYECKECGKAFIHKKRLLEHQRIHTGEKPYVCIICGKSFIRSSDYMRHQRIHTGERAYECSDCGKAFISKQTLLKHHKIHTRERPYECSECGKGFYLEVKLLQHQRIHTREQLCECNECGKVFSHQKRLLEHQKVHTGEKPCECSECGKCFRHRTSLIQHQKVHSGERPYNCTACEKAFIYKNKLVEHQRIHTGEKPYECGKCGKAFNKRYSLVRHQKVHITEEP

SEQ ID NO: 6065 - protein, 627 aa, Homo sapiens
MAEAALVITPQGHVTFEDIAVYFSQEEWGLLDEAQRCLYHDVMLENFSLMASVGCLHGIEAEEAPSEQTLSAQGVSQARTPKLGPSIPNAHSCEMCILVMKDILYLSEHQGTLPWQKPYTSVASGKWFSFGSNLQQHQNQDSGEKHIRKEESSALLLNSCKIPLSDNLFPCKDVEKDFPTILGLLQHQTTHSRQEYAHRSRETFQQRRYKCEQVFNEKVHVTEHQRVHTGEKAYKRREYGKSLNSKYLFVEHQRTHNAEKPYVCNICGKSFLHKQTLVGHQQRIHTRERSYVCIECGKSLSSKYSLVEHQRTHNGEKPYVCNVCGKSFRHKQTFVGHQQRIHTGERPYVCMECGKSFIHSYDRIRHQRVHTGEGAYQCSECGKSFIYKQSLLDHHRIHTGERPYECKECGKAFIHKKRLLEHQRIHTGEKPYVCIICGKSFIRSSDYMRHQRIHTGERAYECSDCGKAFISKQTLLKHHKIHTRERPYECSECGKGFYLEVKLLQHQRIHTREQLCECNECGKVFSHQKRLLEHQKVHTGEKPCECSECGKCFRHRTSLIQHQKVHSGERPYNCTACEKAFIYKNKLVEHQRIHTGEKPYECGKCGKAFNKRYSLVRHQKVHITEEP

SEQ ID NO: 6066 - protein, 350 aa, Homo sapiens
MIRGFEAPMAENPPPPPPPVIFCHDSPKRVLVSVIRTTPIKPTCGGGGEPEPPPPLIPTSPGFSDFMVYPWRWGENAHNVTLSPGAAGAAASAALPAAAAAEHSGLRGRGAPPPAASASAAASGGEDEEEASSPDSGHLKDGIRRGRPRADTVRDLINEGEHSSSRIRCNICNRVFPREKSLQAHKRTHTGERPYLCDYPDCGKAFVQSGQLKTHQRLHTGEKPFVCSENGCLSRFTHANRHCPKHPYARLKREEPTDTLSKHQAADNKAAAEWLARYWEMREQRTPTLKGKLVQKADQEQQDPLEYLQSDEEDDEKRGAQRRLQEQRERLHGALALIELANLTGAPLRQ

SEQ ID NO: 6067 - protein, 306 aa, Homo sapiens
MIRGFEAPMAENPPPPPPPVIFCHDSPKRVLVSVIRTTPIKPTCGGGGEPEPPPPLIPTSPGFSDFMVYPWRWGENAHNVTLSPGAAGAAASAALPAAAAAEHSGLRGRGAPPPAASASAAASGGEDEEEASSPDSGHLKDGIRRGRPRADTVRDLINEGEHSSSRIRCNICNRVFPREKSLQAHKRTHTGERPYLCDYPDCGKAFVQSGQLKTHQRLHTGEKPFVCSENGCLSRFTHANRHCPKHPYARLKREEPTDTLSKHQAADNKAAAEWLARSGMLPLVHREDAQRGLGLCQGPGHASHFK

SEQ ID NO: 6068 - protein, 312 aa, Homo sapiens
MEEKPSGPIPDMLATAEPSSSETDKEVLSPAVPAAAPSSSMSEEPGPEQAATPPVWERGGAGGMQQGSSPAPDSCQPGPGPSPGLTSIVSGTSEDLRPPRRRPPPGKQIPCSSPGCCLSFPSVRDLAQHLRTHCPPTQSLEGKLFRCSALSCTETFPSMQELVAHSKLHYKPNRYFKCENCLLRFRTHRSLFKHLHVCAEHAQSPAPPPPPALDREPPAPERPPEVDPASAPGLPFPLLEPFTTPAPAPTGPFLPYLNPAPFGLSPPRLRPFLAAAPGPPASSAAVWKKSQGAGSSPRRPQGGSDAPSGACR

SEQ ID NO: 6069 - protein, 390 aa, Homo sapiens
MEEKPSGPIPDMLATAEPSSSETDKEVLSPAVPAAAPSSSMSEEPGPEQAATPPVWERGGAGGMQQGSSPAPDSCQPGPGPSPGLTSIVSGTSEDLRPPRRRPPPGKQIPCSSPGCCLSFPSVRDLAQHLRTHCPPTQSLEGKLFRCSALSCTETFPSMQELVAHSKLHYKPNRYFKCENCLLRFRTHRSLFKHLHVCAEHAQSPAPPPPPALDREPPAPERPPEVDPASAPGLPFPLLEPFTTPAPAPTGPFLPYLNPAPFGLSPPRLRPFLAAAPGPPASSAAVWKKSQGAGSSPRRPQGGSDAPSGHAAPSRIVWEHTRGRYSCMQCAFSTASRPAMTLHLEDHRPGAPAAPAAGPPRPDAPADPAPLAPKVSPLLSEGELPVFSQL

SEQ ID NO: 6070 - protein, 137 aa, Homo sapiens
MDDLRYGVYPVKGASGYPGAERNLLEYSYFEKGPLTFRDVVIEFSQEEWQCLDTAQQDLYRKVMLENFRNLVFLGIDVSKPDLITCLEQGKDPWNMKRHSMVATPPESGVLKFPTIIILLSRCFFQSVNICFIYLEP

SEQ ID NO: 6071 - protein, 662 aa, Homo sapiens
MNLTEDYMVFEDVAIHFSQEEWGILNDVQRHLHSDVMLENFALLSSVGCWHGAKDEEAPSKQCVSVGVSQVTTLKPALSTQKAQPCETCSSLLKDILHLAEHDGTHPKRTAKLYLHQKEHLREKLTRSDEGRPSFVNDSVHLAKRNLTCMQGGKDFTGDSDLQQQALHSGWKPHRDTHGVEAFQSGQNNYSCTQCGKDFCHQHTLFEHQKIHTEERPYECSECGKLFRYNSDLIKHQRNHTGERPYKCSECGKAFSLKYNVVQHQKIHTGERPYECSECGKAFLRKSHLLQHQRIHTRPRPYVCSECGKAFLTQAHLVGHQKIHTGERPYGCNECGKYFMYSSALIRHQKVHTGERPFYCCECGKFFMDSCTLIIHQRVHTGEKPYECNECGKFFRYRSTLIRHQKVHTGEKPYECSECGKFFMDTSTLIIHQRVHTGEKPYECNKCGKFFRYCFTLNRHQRVHSGERPYECSECGKFFVDSCTLKSHQRVHTGERPFECSICGKSFRCRSTLDTHQRIHTGERPYECSECGKFFRHNSNHIRHRRNHFGERSFECTECGRVFSQNSHLIRHQKVHTRERTYKCSKCGKFFMDSSTLISHERVHTGEKPYECSECGKVFRYNSSLIKHRRIHTGERPYQCSECGRVFNQNSHLIQHQKVHTR

SEQ ID NO: 6072 - protein, 664 aa, Homo sapiens
MLMDAGQDYMVFEDVAIHFSQEEWGILNDVQRHLHSDVMLENFALLSSVGCWHGAKDEEAPSKQCVSVGVSQVTTLKPALSTQKAQPCETCSSLLKDILHLAEHDGTHPKRTAKLYLHQKEHLREKLTRSDEGRPSFVNDSVHLAKRNLTCMQGGKDFTGDSDLQQQALHSGWKPHRDTHGVEAFQSGQNNYSCTQCGKDFCHQHTLFEHQKIHTEERPYECSECGKLFRYNSDLIKHQRNHTGERPYKCSECGKAFSLKYNVVQHQKIHTGERPYECSECGKAFLRKSHLLQHQRIHTRPRPYVCSECGKAFLTQAHLVGHQKIHTGERPYGCNECGKYFMYSSALIRHQKVHTGERPFYCCECGKFFMDSCTLIIHQRVHTGEKPYECNECGKFFRYRSTLIRHQKVHTGEKPYECSECGKFFMDTSTLIIHQRVHTGEKPYECNKCGKFFRYCFTLNRHQRVHSGERPYECSECGKFFVDSCTLKSHQRVHTGERPFECSICGKSFRCRSTLDTHQRIHTGERPYECSECGKFFRHNSNHIRHRRNHFGERSFECTECGRVFSQNSHLIRHQKVHTRERTYKCSKCGKFFMDSSTLISHERVHTGEKPYECSECGKVFRYNSSLIKHRRIHTGERPYQCSECGRVFNQNSHLIQHQKVHTR

SEQ ID NO: 6073 - protein, 634 aa, Homo sapiens
MGLPLPSKVIMHFMSISVLGCWHGAKDEEAPSKQCVSVGVSQVTTLKPALSTQKAQPCETCSSLLKDILHLAEHDGTHPKRTAKLYLHQKEHLREKLTRSDEGRPSFVNDSVHLAKRNLTCMQGGKDFTGDSDLQQQALHSGWKPHRDTHGVEAFQSGQNNYSCTQCGKDFCHQHTLFEHQKIHTEERPYECSECGKLFRYNSDLIKHQRNHTGERPYKCSECGKAFSLKYNVVQHQKIHTGERPYECSECGKAFLRKSHLLQHQRIHTRPRPYVCSECGKAFLTQAHLVGHQKIHTGERPYGCNECGKYFMYSSALIRHQKVHTGERPFYCCECGKFFMDSCTLIIHQRVHTGEKPYECNECGKFFRYRSTLIRHQKVHTGEKPYECSECGKFFMDTSTLIIHQRVHTGEKPYECNKCGKFFRYCFTLNRHQRVHSGERPYECSECGKFFVDSCTLKSHQRVHTGERPFECSICGKSFRCRSTLDTHQRIHTGERPYECSECGKFFRHNSNHIRHRRNHFGERSFECTECGRVFSQNSHLIRHQKVHTRERTYKCSKCGKFFMDSSTLISHERVHTGEKPYECSECGKVFRYNSSLIKHRRIHTGERPYQCSECGRVFNQNSHLIQHQKVHTR

SEQ ID NO: 6074 - protein, 540 aa, Homo sapiens
MDSVAFEDVDVNFTQEEWALLDPSQKNLYRDVMWETMRNLASIGKKWKDQNIKDHYKHRGRNLRSHMLERLYQTKDGSQRGGIFSQFANQNLSKKIPGVKLCESIVYGEVSMGQSSLNRHIKDHSGHEPKEYQEYGEKPDTRNQCWKPFSSHHSFRTHEIIHTGEKLYDCKECGKTFFSLKRIRRHIITHSGYTPYKCKVCGKAFDYPSRFRTHERSHTGEKPYECQECGKAFTCITSVRRHMIKHTGDGPYKCKVCGKPFHSLSSFQVHERIHTGEKPFKCKQCGKAFSCSPTLRIHERTHTGEKPYECKQCGKAFSYLPSLRLHERIHTGEKPFVCKQCGKAFRSASTFQIHERTHTGEKPYECKECGEAFSCIPSMRRHMIKHTGEGPYKCKVCGKPFHSLSPFRIHERTHTGEKPYVCKHCGKAFVSSTSIRIHERTHTGEKPYECKQCGKAFSYLNSFRTHEMIHTGEKPFECKRCGKAFRSSSSFRLHERTHTGQKPYHCKECGKAYSCRASFQRHMLTHAEDGPPYKCMWESL

SEQ ID NO: 6075 - protein, 696 aa, Homo sapiens
MSYGSITFGDVAIDFSHQEWEYLSLVQKTLYQEVMMENYDNLVSLAGHSVSKPDLITLLEQGKEPWMIVREETRGECTDLDSRCEIISDGKMQLYRKHSCVTLHQRIHNGQKPYECKQCQKSFSHLTELMVHQTIHTSEEPDQCEKFRKAFSHLTDLRKHQKINAREKPYECEECGKVFSYPANLAQHGKVHVEKPYECKECGEAFRTSRQLTVHHRFHYGEKPYECKECGKAFSVYGRLSRHQSIHTGEKPFECNKCGKSFRLKAGLKVHQSIHTGEKPHECKECGKAFRQFSHLVGHKRIHTGEKPYECKECGKGFTCRYQLTMHQRIYSGEKHYECKENGEAFSSGHQLTAPHTFESVEKPYKCEECGKAFSVHGRLTRHQGIHSGKKPYECNKCGKSFRLNSSLKIHQNIHTGEKPYKCKECGKAFSQRAHLAHHNRIHTGYKPFECKECGKSFRCASYLVIHERIHTGEKPYVCQECGKGFSYSHKLTIHRRVHTGEKPYECKECGKAFSVSGQLTQHLSIHSGKKPFECNKCGKSFRFISVLKAHQNIHSAEKPYECKECGKAFRHATSLIYHDRTHAGEKSYECKECGETFSHASHLIIHERIHTSDKPYECKRCGKAFHCASYLVRHESVHADGNPYMCEECGKAFNSSHELSIHHRVHTGEKPFKCNKCRRSFRLRSILEVHQRIHI

SEQ ID NO: 6076 - protein, 371 aa, Homo sapiens
MHQRIYSGEKHYECKENGEAFSSGHQLTAPHTFESVEKPYKCEECGKAFSVHGRLTRHQGIHSGKKPYECNKCGKSFRLNSSLKIHQNIHTGEKPYKCKECGKAFSQRAHLAHHNRIHTGYKPFECKECGKSFRCASYLVIHERIHTGEKPYVCQECGKGFSYSHKLTIHRRVHTGEKPYECKECGKAFSVSGQLTQHLSIHSGKKPFECNKCGKSFRFISVLKAHQNIHSAEKPYECKECGKAFRHATSLIYHDRTHAGEKSYECKECGETFSHASHLIIHERIHTSDKPYECKRCGKAFHCASYLVRHESVHADGNPYMCEECGKAFNSSHELSIHHRVHTGEKPFKCNKCRRSFRLRSILEVHQRIHI

SEQ ID NO: 6077 - protein, 695 aa, Homo sapiens
MSYGSITFGDVAIDFSHQEWEYLSLVQKTLYQEVMMENYDNLVSLGHSVSKPDLITLLEQGKEPWMIVREETRGECTDLDSRCEIISDGKMQLYRKHSCVTLHQRIHNGQKPYECKQCQKSFSHLTELMVHQTIHTSEEPDQCEKFRKAFSHLTDLRKHQKINAREKPYECEECGKVFSYPANLAQHGKVHVEKPYECKECGEAFRTSRQLTVHHRFHYGEKPYECKECGKAFSVYGRLSRHQSIHTGEKPFECNKCGKSFRLKAGLKVHQSIHTGEKPHECKECGKAFRQFSHLVGHKRIHTGEKPYECKECGKGFTCRYQLTMHQRIYSGEKHYECKENGEAFSSGHQLTAPHTFESVEKPYKCEECGKAFSVHGRLTRHQGIHSGKKPYECNKCGKSFRLNSSLKIHQNIHTGEKPYKCKECGKAFSQRAHLAHHNRIHTGYKPFECKECGKSFRCASYLVIHERIHTGEKPYVCQECGKGFSYSHKLTIHRRVHTGEKPYECKECGKAFSVSGQLTQHLSIHSGKKPFECNKCGKSFRFISVLKAHQNIHSAEKPYECKECGKAFRHATSLIYHDRTHAGEKSYECKECGETFSHASHLIIHERIHTSDKPYECKRCGKAFHCASYLVRHESVHADGNPYMCEECGKAFNSSHELSIHHRVHTGEKPFKCNKCRRSFRLRSILEVHQRIHI

SEQ ID NO: 6078 - protein, 1128 aa, Homo sapiens
MAEEESDQEAERLGEELVAIVESPLGPVGLRAAGDGRGGAGSGNCGGGVGISSRDYCRRFCQVVEDYAGRWQVPLPQLQVLQTALCCFTTASASFPDECEHVQYVLSSLAVSFFELLLFFGRDEFYEEPLKDILGSFQECQNHLRRYGNVNLELVTRIIRDGGPWEDPVLQAVLKAQPASQEIVNKYLSSENPLFFELRARYLIACERIPEAMALIKSCINHPEISKDLYFHQALFTCLFMSPVEDQLFREHLLKTDCKSGIDIICNAEKEGKTMLALQLCESFLIPQLQNGDMYCIWELIFIWSKLQLKSNPSKQVFVDQCYQLLRTATNVRVIFPFMKIIKDEVEEEGLQICVEICGCALQLDLHDDPKTKCLIYKTIAHFLPNDLEILRICALSIFFLERSLEAYRTVEELYKRPDEEYNEGTSSVQNRVRFELLPILKKGLFFDPEFWNFVMIKKNCVALLSDKSAVRFLNESTLENNAGNLKRTEEQQGLDEGFDSLTDQSTGETDPDDVSGVQPKGHINTKKNLTALSTSKVDHNVPRHRCMLCNKEFLGGHIVRHAQAHQKKGSFACVICGRKFRNRGLMQKHLKNHVKKIQRQQIAAAQQDDQEVTALEEINCSSSSISFENGNSDSKDLEVETLTASSEGNKEVIPEHVAEFIEIPISVPEDVIENVIENGSPNNSLNNVFKPLTECGDDYEEEEDEEGDYEEDDYDLNQETSVIHKINGTVCHPKDIYATDQEGNFKCPALGCVRIFKRIGFLNKHAMTVHPTDLNVRQTVMKWSKGKCKFCQRQFEDSQHFIDHLNRHSYPNVYFCLHFNCNESFKLPFQLAQHTKSHRIFQAQCSFPECHELFEDLPLLYEHEAQHYLSKTPESSAQPSETILWDVQTDSNPNQEKDSSSNEKQTISLPVSTSKSRKESTEPKTCIESMEKKTDSLVQNGNERSDDTVSNISLIDQKMPDIEPNSENNCSSSDIVNGHSEIEQTPLVSSDPALKIDTNRIRTENGSILPSVVPQEHNTLPVSQAPSKPNLTSEHTSYGLILTKPYVRPLPPSYLDERYLSMPKRRKFLTDRVDACSDQDNVYKKSVKRLRCGKCLTTYCNAEALEAHLAQKKCQTLFGFDSDDESA

SEQ ID NO: 6079 - protein, 1115 aa, Homo sapiens
MAGAGGGLGVWGNLVLLGLCSWTGARAPAPNPGRNLTVETQTTSSISLSWEVPDGLDSQNSNYWVQCTGDGGTTETRNTTATNVTVDGLGPGSLYTCSVWVEKDGVNSSVGTVTTATAPNPVRNLRVEAQTNSSIALTWEVPDGPDPQNSTYGVEYTGDGGRAGTRSTAHTNITVDGLEPGCLYAFSMWVGKNGINSSRETRNATTAHNPVRNLRVEAQTTSSISLSWEVPDGTDPQNSTYCVQCTGDGGRTETRNTTDTRVTVDGLGPGSLYTCSVWVEKDGVNSSVEIVTSATAPNPVRNLTVEAQTNSSIALTWEVPDGPDPQNSTYGVEYTGDGGRAGTRSTAHTNITVDRLEPGCLYVFSVWVGKNGINSSRETRNATTAPNPVRNLHMETQTNSSIALCWEVPDGPYPQDYTYWVEYTGDGGGTETRNTTNTSVTAERLEPGTLYTFSVWAEKNGARGSRQNVSISTVPNAVTSLSKQDWTNSTIALRWTAPQGPGQSSYSYWVSWVREGMTDPRTQSTSGTDITLKELEAGSLYHLTVWAERNEVRGYNSTLTAATAPNEVTDLQNETQTKNSVMLWWKAPGDPHSQLYVYWVQWASKGHPRRGQDPQANWVNQTSRTNETWYKVEALEPGTLYNFTVWAERNDVASSTQSLCASTYPDTVTITSCVSTSAGYGVNLIWSCPQGGYEAFELEVGGQRGSQDRSSCGEAVSVLGLGPARSYPATITTIWDGMKVVSHSVVCHTESAGVIAGAFVGILLFLILVGLLIFFLKRRNKKKQQKPELRDLVFSSPGDIPAEDFADHVRKNERDSNCGFADEYQQLSLVGHSQSQMVASASENNAKNRYRNVLPYDWSRVPLKPIHEEPGSDYINASFMPGLWSPQEFIATQGPLPQTVGDFWRLVWEQQSHTLVMLTNCMEAGRVKCEHYWPLDSQPCTHGHLRVTLVGEEVMENWTVRELLLLQVEEQKTLSVRQFHYQAWPDHGVPSSPDTLLAFWRMLRQWLDQTMEGGPPIVHCSAGVGRTGTLIALDVLLRQLQSEGLLGPFSFVRKMRESRPLMVQTEAQYVFLHQCILRFLQQSAQAPAEKEVPYEDVENLIYENVAAIQAHKLEV

SEQ ID NO: 6080 - protein, 937 aa, Homo sapiens
MAGAGGGLGVWGNLVLLGLCSWTGARAPAPNPGRNLTVETQTTSSISLSWEVPDGLDSQNSNYWVQCTGDGGTTETRNTTATNVTVDGLGPGSLYTCSVWVEKDGVNSSVEIVTSATAPNPVRNLTVEAQTNSSIALTWEVPDGPDPQNSTYGVEYTGDGGRAGTRSTAHTNITVDRLEPGCLYVFSVWVGKNGINSSRETRNATTAPNPVRNLHMETQTNSSIALCWEVPDGPYPQDYTYWVEYTGDGGGTETRNTTNTSVTAERLEPGTLYTFSVWAEKNGARGSRQNVSISTVPNAVTSLSKQDWTNSTIALRWTAPQGPGQSSYSYWVSWVREGMTDPRTQSTSGTDITLKELEAGSLYHLTVWAERNEVRGYNSTLTAATAPNEVTDLQNETQTKNSVMLWWKAPGDPHSQLYVYWVQWASKGHPRRGQDPQANWVNQTSRTNETWYKVEALEPGTLYNFTVWAERNDVASSTQSLCASTYPDTVTITSCVSTSAGYGVNLIWSCPQGGYEAFELEVGGQRGSQDRSSCGEAVSVLGLGPARSYPATITTIWDGMKVVSHSVVCHTESAGVIAGAFVGILLFLILVGLLIFFLKRRNKKKQQKPELRDLVFSSPGDIPAEDFADHVRKNERDSNCGFADEYQQLSLVGHSQSQMVASASENNAKNRYRNVLPYDWSRVPLKPIHEEPGSDYINASFMPGLWSPQEFIATQGPLPQTVGDFWRLVWEQQSHTLVMLTNCMEAGRVKCEHYWPLDSQPCTHGHLRVTLVGEEVMENWTVRELLLLQVEEQKTLSVRQFHYQAWPDHGVPSSPDTLLAFWRMLRQWLDQTMEGGPPIVHCSAGVGRTGTLIALDVLLRQLQSEGLLGPFSFVRKMRESRPLMVQTEAQYVFLHQCILRFLQQSAQAPAEKEVPYEDVENLIYENVAAIQAHKLEV

SEQ ID NO: 6081 - protein, 937 aa, Homo sapiens
MAGAGGGLGVWGNLVLLGLCSWTGARAPAPNPGRNLTVETQTTSSISLSWEVPDGLDSQNSNYWVQCTGDGGTTETRNTTATNVTVDGLGPGSLYTCSVWVEKDGVNSSVGTVTTATAPNPVRNLTVEAQTNSSIALTWEVPDGPDPQNSTYGVEYTGDGGRAGTRSTAHTNITVDRLEPGCLYVFSVWVGKNGINSSRETRNATTAPNPVRNLHMETQTNSSIALCWEVPDGPYPQDYTYWVEYTGDGGGTETRNTTNTSVTAERLEPGTLYTFSVWAEKNGARGSRQNVSISTVPNAVTSLSKQDWTNSTIALRWTAPQGPGQSSYSYWVSWVREGMTDPRTQSTSGTDITLKELEAGSLYHLTVWAERNEVRGYNSTLTAATAPNEVTDLQNETQTKNSVMLWWKAPGDPHSQLYVYWVQWASKGHPRRGQDPQANWVNQTSRTNETWYKVEALEPGTLYNFTVWAERNDVASSTQSLCASTYPDTVTITSCVSTSAGYGVNLIWSCPQGGYEAFELEVGGQRGSQDRSSCGEAVSVLGLGPARSYPATITTIWDGMKVVSHSVVCHTESAGVIAGAFVGILLFLILVGLLIFFLKRRNKKKQQKPELRDLVFSSPGDIPAEDFADHVRKNERDSNCGFADEYQQLSLVGHSQSQMVASASENNAKNRYRNVLPYDWSRVPLKPIHEEPGSDYINASFMPGLWSPQEFIATQGPLPQTVGDFWRLVWEQQSHTLVMLTNCMEAGRVKCEHYWPLDSQPCTHGHLRVTLVGEEVMENWTVRELLLLQVEEQKTLSVRQFHYQAWPDHGVPSSPDTLLAFWRMLRQWLDQTMEGGPPIVHCSAGVGRTGTLIALDVLLRQLQSEGLLGPFSFVRKMRESRPLMVQTEAQYVFLHQCILRFLQQSAQAPAEKEVPYEDVENLIYENVAAIQAHKLEV

SEQ ID NO: 6082 - protein, 842 aa, Homo sapiens
MSRPLSDQEKRKQISVRGLAGVENVTELKKNFNRHLHFTLVKDRNVATPRDYYFALAHTVRDHLVGRWIRTQQHYYEKDPKRIYYLSLEFYMGRTLQNTMVNLALENACDEATYQLGLDMEELEEIEEDAGLGNGGLGRLAACFLDSMATLGLAAYGYGIRYEFGIFNQKISGGWQMEEADDWLRYGNPWEKARPEFTLPVHFYGHVEHTSQGAKWVDTQVVLAMPYDTPVPGYRNNVVNTMRLWSAKAPNDFNLKDFNVGGYIQAVLDRNLAENISRVLYPNDNFFEGKELRLKQEYFVVAATLQDIIRRFKSSKFGCRDPVRTNFDAFPDKVAIQLNDTHPSLAIPELMRILVDLERMDWDKAWDVTVRTCAYTNHTVLPEALERWPVHLLETLLPRHLQIIYEINQRFLNRVAAAFPGDVDRLRRMSLVEEGAVKRINMAHLCIAGSHAVNGVARIHSEILKKTIFKDFYELEPHKFQNKTNGITPRRWLVLCNPGLAEVIAERIGEDFISDLDQLRKLLSFVDDEAFIRDVAKVKQENKLKFAAYLEREYKVHINPNSLFDIQVKRIHEYKRQLLNCLHVITLYNRIKREPNKFFVPRTVMIGGKAAPGYHMAKMIIRLVTAIGDVVNHDPAVGDRLRVIFLENYRVSLAEKVIPAADLSEQISTAGTEASGTGNMKFMLNGALTIGTMDGANVEMAEEAGEENFFIFGMRVEDVDKLDQRGYNAQEYYDRIPELRQVIEQLSSGFFSPKQPDLFKDIVNMLMHHDRFKVFADYEDYIKCQEKVSALYKNPREWTRMVIRNIATSGKFSSDRTIAQYAREIWGVEPSRQRLPAPDEAI

SEQ ID NO: 6083 - protein, 754 aa, Homo sapiens
MSRPLSDQEKRKQISVRGLAGVENVTELKKNFNRHLHFTLVKDRNVATPRDYYFALAHTVRDHLVGRWIRTQQHYYEKDPKKISGGWQMEEADDWLRYGNPWEKARPEFTLPVHFYGHVEHTSQGAKWVDTQVVLAMPYDTPVPGYRNNVVNTMRLWSAKAPNDFNLKDFNVGGYIQAVLDRNLAENISRVLYPNDNFFEGKELRLKQEYFVVAATLQDIIRRFKSSKFGCRDPVRTNFDAFPDKVAIQLNDTHPSLAIPELMRILVDLERMDWDKAWDVTVRTCAYTNHTVLPEALERWPVHLLETLLPRHLQIIYEINQRFLNRVAAAFPGDVDRLRRMSLVEEGAVKRINMAHLCIAGSHAVNGVARIHSEILKKTIFKDFYELEPHKFQNKTNGITPRRWLVLCNPGLAEVIAERIGEDFISDLDQLRKLLSFVDDEAFIRDVAKVKQENKLKFAAYLEREYKVHINPNSLFDIQVKRIHEYKRQLLNCLHVITLYNRIKREPNKFFVPRTVMIGGKAAPGYHMAKMIIRLVTAIGDVVNHDPAVGDRLRVIFLENYRVSLAEKVIPAADLSEQISTAGTEASGTGNMKFMLNGALTIGTMDGANVEMAEEAGEENFFIFGMRVEDVDKLDQRGYNAQEYYDRIPELRQVIEQLSSGFFSPKQPDLFKDIVNMLMHHDRFKVFADYEDYIKCQEKVSALYKNPREWTRMVIRNIATSGKFSSDRTIAQYAREIWGVEPSRQRLPAPDEAI

SEQ ID NO: 6084 - protein, 241 aa, Homo sapiens
MASLSGLASALESYRGRDRLIRVLGYCCQLVGGVLVEQCPARSEVGTRLLVVSTQLSHCRTILRLFDDLAMFVYTKQYGLGAQEEDAFVRCVSVLGNLADQLYYPCEHVAWAADARVLHVDSSRWWTLSTTLWALSLLLGVARSLWMLLKLRQRLRSPTAPFTSPLPRGKRRAMEAQMQSEALSLLSNLADLANAVHWLPRGVLWAGRFPPWLVGLMGTISSILSMYQAARAGGQAEATTP

SEQ ID NO: 6085 - protein, 171 aa, Homo sapiens
MFVYTKQYGLGAQEEDAFVRCVSVLGNLADQLYYPCEHVAWAADARVLHVDSSRWWTLSTTLWALSLLLGVARSLWMLLKLRQRLRSPTAPFTSPLPRGKRRAMEAQMQSEALSLLSNLADLANAVHWLPRGVLWAGRFPPWLVGLMGTISSILSMYQAARAGGQAEATTP

SEQ ID NO: 6086 - protein, 415 aa, Homo sapiens
MKLSLTKVVNGCRLGKIKNLGKTGDHTMDIPGCLLYTKTGSAPHLTHHTLHNIHGVPAMAQLTLSSLAEHHEVLTEYKEGVGKFIGMPESLLYCSLHDPVSPCPAGYVTNKSVSVWSVAGRVEMTVSKFMAIQKALQPDWFQCLSDGEVSCKEATSIKRVRKSVDRSLLFLDNCLRLQEESEVLQKSVIIGVIEGGDVMEERLRSARETAKRPVGGFLLDGFQGNPTTLEARLRLLSSVTAELPEDKPRLISGVSRPDEVLECIERGVDLFESFFPYQVTERGCALTFSFDYQPNPEETLLQQNGTQEEIKCMDQIKKIETTGCNQEITSFEINLKEKKYQEDFNPLVRGCSCYCCKNHTRAYIHHLLVTNELLAGVLLMMHNFEHYFGFFHYIREALKSDKLAQLKELIHRQAS

SEQ ID NO: 6087 - protein, 292 aa, Homo sapiens
MTVSKFMAIQKALQPDWFQCLSDGEVSCKEATSIKRVRKSVDRSLLFLDNCLRLQEESEVLQKSVIIGVIEGGDVMEERLRSARETAKRPVGGFLLDGFQGNPTTLEARLRLLSSVTAELPEDKPRLISGVSRPDEVLECIERGVDLFESFFPYQVTERGCALTFSFDYQPNPEETLLQQNGTQEEIKCMDQIKKIETTGCNQEITSFEINLKEKKYQEDFNPLVRGCSCYCCKNHTRAYIHHLLVTNELLAGVLLMMHNFEHYFGFFHYIREALKSDKLAQLKELIHRQAS

SEQ ID NO: 6088 - protein, 309 aa, Homo sapiens
MVCWQSVSVWSVAGRVEMTVSKFMAIQKALQPDWFQCLSDGEVSCKEATSIKRVRKSVDRSLLFLDNCLRLQEESEVLQKSVIIGVIEGGDVMEERLRSARETAKRPVGGFLLDGFQGNPTTLEARLRLLSSVTAELPEDKPRLISGVSRPDEVLECIERGVDLFESFFPYQVTERGCALTFSFDYQPNPEETLLQQNGTQEEIKCMDQIKKIETTGCNQEITSFEINLKEKKYQEDFNPLVRGCSCYCCKNHTRAYIHHLLVTNELLAGVLLMMHNFEHYFGFFHYIREALKSDKLAQLKELIHRQAS

SEQ ID NO: 6089 - protein, 427 aa, Homo sapiens
MVCWQDLEESLRMKLSLTKVVNGCRLGKIKNLGKTGDHTMDIPGCLLYTKTGSAPHLTHHTLHNIHGVPAMAQLTLSSLAEHHEVLTEYKEGVGKFIGMPESLLYCSLHDPVSPCPAGYVTNKSVSVWSVAGRVEMTVSKFMAIQKALQPDWFQCLSDGEVSCKEATSIKRVRKSVDRSLLFLDNCLRLQEESEVLQKSVIIGVIEGGDVMEERLRSARETAKRPVGGFLLDGFQGNPTTLEARLRLLSSVTAELPEDKPRLISGVSRPDEVLECIERGVDLFESFFPYQVTERGCALTFSFDYQPNPEETLLQQNGTQEEIKCMDQIKKIETTGCNQEITSFEINLKEKKYQEDFNPLVRGCSCYCCKNHTRAYIHHLLVTNELLAGVLLMMHNFEHYFGFFHYIREALKSDKLAQLKELIHRQAS

SEQ ID NO: 6090 - protein, 430 aa, Homo sapiens
MALEGMSKRKRKRSVQEGENPDDGVRGSPPEDYRLGQVASSLFRGEHHSRGGTGRLASLFSSLEPQIQPVYVPVPKQTIKKTKRNEEEESTSQIERPLSQEPAKKVKAKKKHTNAEKKLADRESALASADLEEEIHQKQGQKRKNSQPGVKVADRKILDDTEDTVVSQRKKIQINQEEERLKNERTVFVGNLPVTCNKKKLKSFFKEYGQIESVRFRSLIPAEGTLSKKLAAIKRKIHPDQKNINAYVVFKEESAATQALKRNGAQIADGFRIRVDLASETSSRDKRSVFVGNLPYKVEESAIEKHFLDCGSIMAVRIVRDKMTGIGKGFGYVLFENTDSVHLALKLNNSELMGRKLRVMRSVNKEKFKQQNSNPRLKNVSKPKQGLNFTSKTAEGHPKSLFIGEKAVLLKTKKKGQKKSGRPKKQRKQK

SEQ ID NO: 6091 - protein, 225 aa, Homo sapiens
MALEGMSKRKRKRSVQEGENPDDGVRGSPPEDYRLGQVASSLFRGEHHSRGGTGRLASLFSSLEPQIQPVYVPVPKQTIKKTKRNEEEESTSQIERPLSQEPAKKVKAKKKHTNAEKKLADRESALASADLEEEIHQKQGQKRKNSQPGVKVADRKILDDTEDTVVSQRKKIQINQEEERLKNERTVFVGNLPVTCNKKKLKSFFKEYGQIESVRFRSLVCFIPP

SEQ ID NO: 6092 - protein, 237 aa, Homo sapiens
MLEEDMEVAIKMVVVGNGAVGKSSMIQRYCKGIFTKDYKKTIGVDFLERQIQVNDEDVRLMLWDTAGQEEFDAITKAYYRGAQACVLVFSTTDRESFEAVSSWREKVVAEVGDIPTVLVQNKIDLLDDSCIKNEEAEALAKRLKLRFYRTSVKEDLNVNEVFKYLAEKYLQKLKQQIAEDPELTHSSSNKIGVFNTSGGSHSGQNSGTLNGGDVINLRPNKQRTKKNRNPFSSCSIP

SEQ ID NO: 6093 - protein, 259 aa, Homo sapiens
MNILAPVRRDRVLAELPQCLRKEAALHGHKDFHPRVTCACQEHRTGTVGFKISKVIVVGDLSVGKTCLINRFCKDTFDKNYKATIGVDFEMERFEVLGIPFSLQLWDTAGQERFKCIASTYYRGAQAIIIVFNLNDVASLEHTKQWLADALKENDPSSVLLFLVGSKKDLSTPAQYALMEKDALQVAQEMKAEYWAVSSLTGENVREFFFRVAALTFEANVLAELEKSGARRIGDVVRINSDDSNLYLTASKKKPTCCP

SEQ ID NO: 6094 - protein, 251 aa, Homo sapiens
MNILAPVRRDRVLAELPQCLRKEAALHGHKDFHPRVTCACQEHRTGTVGFKISKVIVVGDLSVGKTCLINRFCKDTFDKNYKATIGVDFEMERFEVLGIPFSLQLWDTAGQERFKCIASTYYRGAQAIIIVFNLNDVASLEHTKQWLADALKENDPSSVLLFLTPAQYALMEKDALQVAQEMKAEYWAVSSLTGENVREFFFRVAALTFEANVLAELEKSGARRIGDVVRINSDDSNLYLTASKKKPTCCP

SEQ ID NO: 6095 - protein, 237 aa, Homo sapiens
MNILAPVRRDRVLAELPQCLRKEAALHGHKDFHPRVTCACQEHRTGTVGFCKDTFDKNYKATIGVDFEMERFEVLGIPFSLQLWDTAGQERFKCIASTYYRGAQAIIIVFNLNDVASLEHTKQWLADALKENDPSSVLLFLVGSKKDLSTPAQYALMEKDALQVAQEMKAEYWAVSSLTGENVREFFFRVAALTFEANVLAELEKSGARRIGDVVRINSDDSNLYLTASKKKPTCCP

SEQ ID NO: 6096 - protein, 201 aa, Homo sapiens
MSGKSLLLKVILLGDGGVGKSSLMNRYVTNKFDSQAFHTIGVEFLNRDLEVDGRFVTLQIWDTAGQERFKSLRTPFYRGADCCLLTFSVDDRQSFENLGNWQKEFIYYADVKDPEHFPFVVLGNKVDKEDRQVTTEEAQTWCMENGDYPYLETSAKDDTNVTVAFEEAVRQVLAVEEQLEHCMLGHTIDLNSGSKAGSSCC

SEQ ID NO: 6097 - protein, 189 aa, Homo sapiens
MSAAMRERFDRFLHEKNCMTDLLAKLEAKTGVNRSFIALGVIGLVALYLVFGYGASLLCNLIGFGYPAYISIKAIESPNKEDDTQWLTYWVVYGVFSIAEFFSDIFLSWFPFYYMLKCGFLLWCMAPSPSNGAELLYKRIIRPFFLKHESQMDSVVKDLKDKAKETADAITKEAKKATVNLLGEEKKST

SEQ ID NO: 6098 - protein, 131 aa, Homo sapiens
MSAAMRERFDRFLHEKNCMTDLLAKLEAKTGVNRSFIALGVIGLVALYLVFGYGASLLCNLIGFGYPAYISIKAIESPNKEDDTQWLTYWVVYGVFSIAEFFSDIFLSWFPFYYMLKVWSGLGFLLPRCLL

SEQ ID NO: 6099 - protein, 739 aa, Homo sapiens
MASVLGSGRGSGGLSSQLKCKSKRRRRRRSKRKDKVSILSTFLAPFKHLSPGITNTEDDDTLSTSSAEVKENRNVGNLAARPPPSGDRARGGAPGAKRKRPLEEGNGGHLCKLQLVWKKLSWSVAPKNALVQLHELRPGLQYRTVSQTGPVHAPVFAVAVEVNGLTFEGTGPTKKKAKMRAAELALRSFVQFPNACQAHLAMGGGPGPGTDFTSDQADFPDTLFQEFEPPAPRPGLAGGRPGDAALLSAAYGRRRLLCRALDLVGPTPATPAAPGERNPVVLLNRLRAGLRYVCLAEPAERRARSFVMAVSVDGRTFEGSGRSKKLARGQAAQAALQELFDIQMPGHAPGRARRTPMPQEFADSISQLVTQKFREVTTDLTPMHARHKALAGIVMTKGLDARQAQVVALSSGTKCISGEHLSDQGLVVNDCHAEVVARRAFLHFLYTQLELHLSKRREDSERSIFVRLKEGGYRLRENILFHLYVSTSPCGDARLHSPYEITTDLHSSKHLVRKFRGHLRTKIESGEGTVPVRGPSAVQTWDGVLLGEQLITMSCTDKIARWNVLGLQGALLSHFVEPVYLQSIVVGSLHHTGHLARVMSHRMEGVGQLPASYRHNRPLLSGVSDAEARQPGKSPPFSMNWVVGSADLEIINATTGRRSCGGPSRLCKHVLSARWARLYGRLSTRTPSPGDTPSMYCEAKLGAHTYQSVKQQLFKAFQKAGLGTWVRKPPEQQQFLLTL

SEQ ID NO: 6100 - protein, 248 aa, Homo sapiens
MGLWSPVPGNSVPRAPVMAGLGLGHSQGAPQGPHDGKTDRSSGPGRRRTERTRLPGLLGGAPLTAGSPHRWNVLGLQGALLSHFVEPVYLQSIVVGSLHHTGHLARVMSHRMEGVGQLPASYRHNRPLLSGVSDAEARQPGKSPPFSMNWVVGSADLEIINATTGRRSCGGPSRLCKHVLSARWARLYGRLSTRTPSPGDTPSMYCEAKLGAHTYQSVKQQLFKAFQKAGLGTWVRKPPEQQQFLLTL

SEQ ID NO: 6101 - protein, 438 aa, Homo sapiens
MGRVEDGGTTEELEDWDPGTSALPAPGIKQGPREQTGTGPLSQKCWEPEPDAPSQPGPALWSRGRARTQALAGGSSLQQLDPENTGFIGADTFTGLVHSHELPLDPAKLDMLVALAQSNEQGQVCYQELVDLISSKRSSSFKRAIANGQRALPRDGPLDEPGLGVYKRFVRYVAYEILPCEVDRRWYFYRHRSCPPPVFMASVTLAQIIVFLCYGARLNKWVLQTYHPEYMKSPLVYHPGHRARAWRFLTYMFMHVGLEQLGFNALLQLMIGVPLEMVHGLLRISLLYLAGVLAGSLTVSITDMRAPVVGGSGGVYALCSAHLANVVMNWAGMRCPYKLLRMVLALVCMSSEVGRAVWLRFSPPLPASGPQPSFMAHLAGAVVGVSMGLTILRSYEERLRDQCGWWVVLLAYGTFLLFAVFWNVFAYDLLGAHIPPPP

SEQ ID NO: 6102 - protein, 373 aa, Homo sapiens
MDRSSLLQLIQEQQLDPENTGFIGADTFTGLVHSHELPLDPAKLDMLVALAQSNEQGQVCYQELVDLISSKRSSSFKRAIANGQRALPRDGPLDEPGLGVYKRFVRYVAYEILPCEVDRRWYFYRHRSCPPPVFMASVTLAQIIVFLCYGARLNKWVLQTYHPEYMKSPLVYHPGHRARAWRFLTYMFMHVGLEQLGFNALLQLMIGVPLEMVHGLLRISLLYLAGVLAGSLTVSITDMRAPVVGGSGGVYALCSAHLANVVMNWAGMRCPYKLLRMVLALVCMSSEVGRAVWLRFSPPLPASGPQPSFMAHLAGAVVGVSMGLTILRSYEERLRDQCGWWVVLLAYGTFLLFAVFWNVFAYDLLGAHIPPPP

SEQ ID NO: 6103 - protein, 315 aa, Homo sapiens
MQRRSRGINTGLILLLSQIFHVGINNIPPVTLATLALNIWFFLNPQKPLYSSCLSVEKCYQQKDWQRLLLSPLHHADDWHLYFNMASMLWKGINLERRLGSRWFAYVITAFSVLTGVVYLLLQFAVAEFMDEPDFKRSCAVGFSGVLFALKVLNNHYCPGGFVNILGFPVPNRFACWVELVAIHLFSPGTSFAGHLAGILVGLMYTQGPLKKIMEACAGGFSSSVGYPGRQYYFNSSGSSGYQDYYPHGRPDHYEEAPRNYDTYTAGLSEEEQLERALQASLWDRGNTRNSPPPYGFHLSPEEMRRQRLHRFDSQ

SEQ ID NO: 6104 - protein, 106 aa, Homo sapiens
MPVFLFKPKGGFSSSVGYPGRQYYFNSSGSSGYQDYYPHGRPDHYEEAPRNYDTYTAGLSEEEQLERALQASLWDRGNTRNSPPPYGFHLSPEEMRRQRLHRFDSQ

SEQ ID NO: 6105 - protein, 163 aa, Homo sapiens
MEHYRKAGSVELPAPSPMPQLPPDTLEMRVRDGSKIRNLLGLALGRLEGGSARHVVFSGSGRAAGKAVSCAEIVKRRVPGLHQLTKLRFLQTEDSWVPASPDTGLDPLTVRRHVPAVWVLLSRDPLDPNECGYQPPGAPPGLGSMPSSSCGPRSRRRARDTRS

SEQ ID NO: 6106 - protein, 727 aa, Homo sapiens
MDSDMDYERPNVETIKCVVVGDNAVGKTRLICARACNATLTQYQLLATHVPTVWAIDQYRVCQEVLERSRDVVDDVSVSLRLWDTFGDHHKDRRFAYGRSDVVVLCFSIANPNSLHHVKTMWYPEIKHFCPRAPVILVGCQLDLRYADLEAVNRARRPLARPIKPNEILPPEKGREVAKELGIPYYETSVVAQFGIKDVFDNAIRAALISRRHLQFWKSHLRNVQRPLLQAPFLPPKPPPPIIVVPDPPSSSEECPAHLLEDPLCADVILVLQERVRIFAHKIYLSTSSSKFYDLFLMDLSEGELGGPSEPGGTHPEDHQGHSDQHHHHHHHHHGRDFLLRAASFDVCESVDEAGGSGPAGLRASTSDGILRGNGTGYLPGRGRVLSSWSRAFVSIQEEMAEDPLTYKSRLMVVVKMDSSIQPGPFRAVLKYLYTGELDENERDLMHIAHIAELLEVFDLRMMVANILNNEAFMNQEITKAFHVRRTNRVKECLAKGTFSDVTFILDDGTISAHKPLLISSCDWMAAMFGGPFVESSTREVVFPYTSKSCMRAVLEYLYTGMFTSSPDLDDMKLIILANRLCLPHLVALTEQYTVTGLMEATQMMVDIDGDVLVFLELAQFHCAYQLADWCLHHICTNYNNVCRKFPRDMKAMSPENQEYFEKHRWPPVWYLKEEDHYQRARKEREKEDYLHLKRQPKRRWLFWNSPSSPSSSAASSSSPSSSSAVV

SEQ ID NO: 6107 - protein, 749 aa, Homo sapiens
MQAWRKGPDGPQKTSSDSMSRLMDSDMDYERPNVETIKCVVVGDNAVGKTRLICARACNATLTQYQLLATHVPTVWAIDQYRVCQEVLERSRDVVDDVSVSLRLWDTFGDHHKDRRFAYGRSDVVVLCFSIANPNSLHHVKTMWYPEIKHFCPRAPVILVGCQLDLRYADLEAVNRARRPLARPIKPNEILPPEKGREVAKELGIPYYETSVVAQFGIKDVFDNAIRAALISRRHLQFWKSHLRNVQRPLLQAPFLPPKPPPPIIVVPDPPSSSEECPAHLLEDPLCADVILVLQERVRIFAHKIYLSTSSSKFYDLFLMDLSEGELGGPSEPGGTHPEDHQGHSDQHHHHHHHHHGRDFLLRAASFDVCESVDEAGGSGPAGLRASTSDGILRGNGTGYLPGRGRVLSSWSRAFVSIQEEMAEDPLTYKSRLMVVVKMDSSIQPGPFRAVLKYLYTGELDENERDLMHIAHIAELLEVFDLRMMVANILNNEAFMNQEITKAFHVRRTNRVKECLAKGTFSDVTFILDDGTISAHKPLLISSCDWMAAMFGGPFVESSTREVVFPYTSKSCMRAVLEYLYTGMFTSSPDLDDMKLIILANRLCLPHLVALTEQYTVTGLMEATQMMVDIDGDVLVFLELAQFHCAYQLADWCLHHICTNYNNVCRKFPRDMKAMSPENQEYFEKHRWPPVWYLKEEDHYQRARKEREKEDYLHLKRQPKRRWLFWNSPSSPSSSAASSSSPSSSSAVV

SEQ ID NO: 6108 - protein, 734 aa, Homo sapiens
MKARSRLMDSDMDYERPNVETIKCVVVGDNAVGKTRLICARACNATLTQYQLLATHVPTVWAIDQYRVCQEVLERSRDVVDDVSVSLRLWDTFGDHHKDRRFAYGRSDVVVLCFSIANPNSLHHVKTMWYPEIKHFCPRAPVILVGCQLDLRYADLEAVNRARRPLARPIKPNEILPPEKGREVAKELGIPYYETSVVAQFGIKDVFDNAIRAALISRRHLQFWKSHLRNVQRPLLQAPFLPPKPPPPIIVVPDPPSSSEECPAHLLEDPLCADVILVLQERVRIFAHKIYLSTSSSKFYDLFLMDLSEGELGGPSEPGGTHPEDHQGHSDQHHHHHHHHHGRDFLLRAASFDVCESVDEAGGSGPAGLRASTSDGILRGNGTGYLPGRGRVLSSWSRAFVSIQEEMAEDPLTYKSRLMVVVKMDSSIQPGPFRAVLKYLYTGELDENERDLMHIAHIAELLEVFDLRMMVANILNNEAFMNQEITKAFHVRRTNRVKECLAKGTFSDVTFILDDGTISAHKPLLISSCDWMAAMFGGPFVESSTREVVFPYTSKSCMRAVLEYLYTGMFTSSPDLDDMKLIILANRLCLPHLVALTEQYTVTGLMEATQMMVDIDGDVLVFLELAQFHCAYQLADWCLHHICTNYNNVCRKFPRDMKAMSPENQEYFEKHRWPPVWYLKEEDHYQRARKEREKEDYLHLKRQPKRRWLFWNSPSSPSSSAASSSSPSSSSAVV

SEQ ID NO: 6109 - protein, 611 aa, Homo sapiens
MSIHIVALGNEGDTFHQDNRPSGLIRTYLGRSPLVSGDESSLLLNAASTVARPVFTEYQASAFGNVKLVVHDCPVWDIFDSDWYTSRNLIGGADIIVIKYNVNDKFSFHEVKDNYIPVIKRALNSVPVIIAAVGTRQNEELPCTCPLCTSDRGSCVSTTEGIQLAKELGATYLELHSLDDFYIGKYFGGVLEYFMIQALNQKTSEKMKKRKMSNSFHGIRPPQLEQPEKMPVLKAEASHYNSDLNNLLFCCQCVDVVFYNPNLKKVVEAHKIVLCAVSHVFMLLFNVKSPTDIQDSSIIRTTQDLFAINRDTAFPGASHESSGNPPLRVIVKDALFCSCLSDILRFIYSGAFQWEELEEDIRKKLKDSGDVSNVIEKVKCILKTPGKINCLRNCKTYQARKPLWFYNTSLKFFLNKPMLADVVFEIQGTTVPAHRAILVARCEVMAAMFNGNYMEAKSVLIPVYGVSKETFLSFLEYLYTDSCCPAGIFQAMCLLICAEMYQVSRLQHICELFIITQLQSMPSRELASMNLDIVDLLKKAKFHHSDCLSTWLLHFIATNYLIFSQKPEFQDLSVEERSFVEKHRWPSNMYLKQLAEYRKYIHSRKCRCLVM

SEQ ID NO: 6110 - protein, 479 aa, Homo sapiens
MAWNTNLRWRLPLTCLLLQVIMVILFGVFVRYDFEADAHWWSERTHKNLSDMENEFYYRYPSFQDVHVMVFVGFGFLMTFLQRYGFSAVGFNFLLAAFGIQWALLMQGWFHFLQDRYIVVGVENLINADFCVASVCVAFGAVLGKVSPIQLLIMTFFQVTLFAVNEFILLNLLKVKDAGGSMTIHTFGAYFGLTVTRILYRRNLEQSKERQNSVYQSDLFAMIGTLFLWMYWPSFNSAISYHGDSQHRAAINTYCSLAACVLTSVAISSALHKKGKLDMVHIQNATLAGGVAVGTAAEMMLMPYGALIIGFVCGIISTLGFVYLTPFLESRLHIQDTCGINNLHGIPGIIGGIVGAVTAASASLEVYGKEGLVHSFDFQGFNGDWTARTQGKFQIYGLLVTLAMALMGGIIVGLILRLPFWGQPSDENCFEDAVYWEMPEGNSTVYIPEDPTFKPSGPSVPSVPMVSPLPMASSVPLVP

SEQ ID NO: 6111 - protein, 193 aa, Homo sapiens
MAAIRKKLVIVGDGACGKTCLLIVFSKDQFPEVYVPTVFENYVADIEVDGKQVELALWDTAGQEDYDRLRPLSYPDTDVILMCFSIDSPDSLENIPEKWTPEVKHFCPNVPIILVGNKKDLRNDEHTRRELAKMKQEPVKPEEGRDMANRIGAFGYMECSAKTKDGVREVFEMATRAALQARRGKKKSGCLVL

SEQ ID NO: 6112 - protein, 474 aa, Homo sapiens
MSSEDREAQEDELLALASIYDGDEFRKAESVQGGETRIYLDLPQNFKIFVSGNSNECLQNSGFEYTICFLPPLVLNFELPPDYPSSSPPSFTLSGKWLSPTQLSALCKHLDNLWEEHRGSVVLFAWMQFLKEETLAYLNIVSPFELKIGSQKKVQRRTAQASPNTELDFGGAAGSDVDQEEIVDERAVQDVESLSNLIQEILDFDQAQQIKCFNSKLFLCSICFCEKLGSECMYFLECRHVYCKACLKDYFEIQIRDGQVQCLNCPEPKCPSVATPGQVKELVEAELFARYDRLLLQSSLDLMADVVYCPRPCCQLPVMQEPGCTMGICSSCNFAFCTLCRLTYHGVSPCKVTAEKLMDLRNEYLQADEANKRLLDQRYGKRVIQKALEEMESKEWLEKNSKSCPCCGTPIEKLDGCNKMTCTGCMQYFCWICMGSLSRANPYKHFNDPGSPCFNRLFYAVDVDDDIWEDEVED

SEQ ID NO: 6113 - protein, 348 aa, Homo sapiens
MQFLKEETLAYLNIVSPFELKIGSQKKVQRRTAQASPNTELDFGGAAGSDVDQEEIVDERAVQDVESLSNLIQEILDFDQAQQIKCFNSKLFLCSICFCEKLGSECMYFLECRHVYCKACLKDYFEIQIRDGQVQCLNCPEPKCPSVATPGQVKELVEAELFARYDRLLLQSSLDLMADVVYCPRPCCQLPVMQEPGCTMGICSSCNFAFCTLCRLTYHGVSPCKVTAEKLMDLRNEYLQADEANKRLLDQRYGKRVIQKALEEMESKEWLEKNSKSCPCCGTPIEKLDGCNKMTCTGCMQYFCWICMGSLSRANPYKHFNDPGSPCFNRLFYAVDVDDDIWEDEVED

SEQ ID NO: 6114 - protein, 210 aa, Homo sapiens [sequence omitted]

SEQ ID NO: 6115 - protein, 193 aa, Homo sapiens
MAAIRKKLVIVGDGACGKTCLLIVFSKDQFPEVYVPTVFENYIADIEVDGKQVELALWDTAGQEDYDRLRPLSYPDTDVILMCFSIDSPDSLENIPEKWTPEVKHFCPNVPIILVGNKKDLRQDEHTRRELAKMKQEPVRSEEGRDMANRISAFGYLECSAKTKEGVREVFEMATRAGLQVRKNKRRRGCPIL

SEQ ID NO: 6116 - protein, 137 aa, Homo sapiens
MSSLIRRVISTAKAPGAIGPYSQAVLVDRTIYISGQIGMDPSSGQLVSGGVAEEAKQALKNMGEILKAAGCDFTNVVKTTVLLADINDFNTVNEIYKQYFKSNFPARAAYQVAALPKGSRIEIEAVAIQGPLTTASL

SEQ ID NO: 6117 - protein, 417 aa, Homo sapiens
MSSKYPRSVRRCLPLWALTLEAALILLFYFFTHYDASLEDQKGLVASYQVGQDLTVMAAIGLGFLTSSFRRHSWSSVAFNLFMLALGVQWAILLDGFLSQFPSGKVVITLFSIRLATMSALSVLISVDAVLGKVNLAQLVVMVLVEVTALGNLRMVISNIFNTDYHMNMMHIYVFAAYFGLSVAWCLPKPLPEGTEDKDQTATIPSLSAMLGALFLWMFWPSFNSALLRSPIERKNAVFNTYYAVAVSVVTAISGSSLAHPQGKISKTYVHSAVLAGGVAVGTSCHLIPSPWLAMVLGLVAGLISVGGAKYLPGCCNRVLGIPHSSIMGYNFSLLGLLGEIIYIVLLVLDTVGAGNGMIGFQVLLSIGELSLAIVIALMSGLLTGLLLNLKIWKAPHEAKYFDDQVFWKFPHLAVGF

SEQ ID NO: 6118 - protein, 321 aa, Homo sapiens
MSSKYPRSVRRCLPLWALTLEAALILLFYFFTHYDASLEDQKGLVASYQVGQDLTVMAAIGLGFLTSSFRRHSWSSVAFNLFMLALGVQWAILLDGFLSQFPSGKVVITLFSIRLATMSALSVLISVDAVLGKVNLAQLVVMVLVEVTALGNLRMVISNIFNTDYHMNMMHIYVFAAYFGLSVAWCLPKPLPEGTEDKDQTATIPSLSAMLGALFLWMFWPSFNSALLRSPIERKNAVFNTYYAVAVSVVTAISGSSLAHPQGKISKTYVHSAVLAGGVAVGTSCHLIPSPWLAMVLGLVAGLISVGGAKYLPFPHLAVGF

SEQ ID NO: 6119 - protein, 316 aa, Homo sapiens
MSSKYPRSVRRCLPLWALTLEAALILLFYFFTHYDASLEDQKGLVASYQVGQDLTVMAAIGLGFLTSSFRRHSWSSVAFNLFMLALGVQWAILLDGFLSQFPSGKVVITLFSIRLATMSALSVLISVDAVLGKVNLAQLVVMVLVEVTALGNLRMVISNIFNTDYHMNMMHIYVFAAYFGLSVAWCLPKPLPEGTEDKDQTATIPSLSAMLGALFLWMFWPSFNSALLRSPIERKNAVFNTYYAVAVSVVTAISGSSLAHPQGKISKTYVHSAVLAGGVAVGTSCHLIPSPWLAMVLGLVAGLISVGGAKYLPGCS

SEQ ID NO: 6120 - protein, 493 aa, Homo sapiens
MSSKYPRSVRRCLPLWALTLEAALILLFYFFTHYDASLEDQKGLVASYQVGQDLTVMAAIGLGFLTSSFRRHSWSSVAFNLFMLALGVQWAILLDGFLSQFPSGKVVITLFSIRLATMSALSVLISVDAVLGKVNLAQLVVMVLVEVTALGNLRMVISNIFNTDYHMNMMHIYVFAAYFGLSVAWCLPKPLPEGTEDKDQTATIPSLSAMLGALFLWMFWPSFNSALLRSPIERKNAVFNTYYAVAVSVVTAISGSSLAHPQGKISKTYVHSAVLAGGVAVGTSCHLIPSPWLAMVLGLVAGLISVGGAKYLPGCCNRVLGIPHSSIMGYNFSLLGLLGEIIYIVLLVLDTVGAGNGMSLGWNLAVKMAEAGDEELMRLDVSQRNHGGAAVPTGSWMPSTETTIAPNYRDHISVVSSFGCWILSKSIQEKQGLFKNKTTSSHCCLHLYVRNAHDSKVSNVRAGTGVRENGVESFLCHSLRRISPFIMHCRIQQ

SEQ ID NO: 6121 - protein, 396 aa, Homo sapiens
MSSKYPRSVRRCLPLWALTLEAALILLFYFFTHYDASLEDQKGLVASYQVGQDLTVMAAIGLGFLTSSFRRHSWSSVAFNLFMLALGVQWAILLDGFLSQFPSGKVVITLFSIRLATMSALSVLISVDAVLGKVNLAQLVVMVLVEVTALGNLRMVISNIFNTDYHMNMMHIYVFAAYFGLSVAWCLPKPLPEGTEDKDQTATIPSLSAMLGALFLWMFWPSFNSALLRSPIERKNAVFNTYYAVAVSVVTAISGSSLAHPQGKISKTYVHSAVLAGGVAVGTSCHLIPSPWLAMVLGLVAGLISVGGAKYLPGCCNRVLGIPHSSIMGYNFSLLGLLGEIIYIVLLVLDTVGAGNGIFLIWLLDFKQKHPRKTRPVQKQDNFLSLLPAFVREKRS

SEQ ID NO: 6122 - protein, 378 aa, Homo sapiens
MSSKYPRSVRRCLPLWALTLEAALILLFYFFTHYDASLEDQKGLVASYQVGQDLTVMAAIGLGFLTSSFRRHSWSSVAFNLFMLALGVQWAILLDGFLSQFPSGKVVITLFSIRLATMSALSVLISVDAVLGKVNLAQLVVMVLVEVTALGNLRMVISNIFNTDYHMNMMHIYVFAAYFGLSVAWCLPKPLPEGTEDKDQTATIPSLSAMLGALFLWMFWPSFNSALLRSPIERKNAVFNTYYAVAVSVVTAISGSSLAHPQGKISKTYVHSAVLAGGVAVGTSCHLIPSPWLAMVLGLVAGLISVGGAKYLPDWLPGPPQHWGTQLGHRDSSHVWSPDSFLIWLLDFKQKHPRKTRPVQKQDNFLSLLPAFVREKRS

SEQ ID NO: 6123 - protein, 1623 aa, Homo sapiens
MAAEASKTGPSRSSYQRMGRKSQPWGAAEIQCTRCGRRVSRSSGHHCELQCGHAFCELCLLMTEECTTIICPDCEVATAVNTRQRYYPMAGYIKEDSIMEKLQPKTIKNCSQDFKKTADQLTTGLERSASTDKTLLNSSAVMLDTNTAEEIDEALNTAHHSFEQLSIAGKALEHMQKQTIEERERVIEVVEKQFDQLLAFFDSRKKNLCEEFARTTDDYLSNLIKAKSYIEEKKNNLNAAMNIARALQLSPSLRTYCDLNQIIRTLQLTSDSELAQVSSPQLRNPPRLSVNCSEIICMFNNMGKIEFRDSTKCYPQENEIRQNVQKKYNNKKELSCYDTYPPLEKKKVDMSVLTSEAPPPPLQPETNDVHLEAKNFQPQKDVATASPKTIAVLPQMGSSPDVIIEEIIEDNVESSAELVFVSHVIDPCHFYIRKYSQIKDAKVLEKKVNEFCNRSSHLDPSDILELGARIFVSSIKNGMWCRGTITELIPIEGRNTRKPCSPTRLFVHEVALIQIFMVDFGNSEVLIVTGVVDTHVRPEHSAKQHIALNDLCLVLRKSEPYTEGLLKDIQPLAQPCSLKDIVPQNSNEGWEEEAKVEFLKMVNNKAVSMKVFREEDGVLIVDLQKPPPNKISSDMPVSLRDALVFMELAKFKSQSLRSHFEKNTTLHYHPPILPKEMTDVSVTVCHINSPGDFYLQLIEGLDILFLLKTIEEFYKSEDGENLEILCPVQDQACVAKFEDGIWYRAKVIGLPGHQEVEVKYVDFGNTAKITIKDVRKIKDEFLNAPEKAIKCKLAYIEPYKRTMQWSKEAKEKFEEKAQDKFMTCSVIKILEDNVLLVELFDSLGAPEMTTTSINDQLVKEGLASYEIGYILKDNSQKHIEVWDPSPEEIISNEVHNLNPVSAKSLPNENFQSLYNKELPVHICNVISPEKIYVQWLLTENLLNSLEEKMIAAYENSKWEPVKWENDMHCAVKIQDKNQWRRGQIIRMVTDTLVEVLLYDVGVELVVNVDCLRKLEENLKTMGRLSLECSLVDIRPAGGSDKWTATACDCLSLYLTGAVATIILQVDSEENNTTWPLPVKIFCRDEKGERVDVSKYLIKKGLALRERRINNLDNSHSLSEKSLEVPLEQEDSVVTNCIKTNFDPDKKTADIISEQKVSEFQEKILEPRTTRGYKPPAIPNMNVFEATVSCVGDDGTIFVVPKLSEFELIKMTNEIQSNLKCLGLLEPYFWKKGEACAVRGSDTLWYRGKVMEVVGGAVRVQYLDHGFTEKIPQCHLYPILLYPDIPQFCIPCQLHNTTPVGNVWQPDAIEVLQQLLSKRQVDIHIMELPKNPWEKLSIHLYFDGMSLSYFMAYYKYCTSEHTEEMLKEKPRSDHDKKYEEEQWEIRFEELLSAETDTPLLPPYLSSSLPSPGELYAVQVKHVVSPNEVYICLDSIETSNQSNQHSDTDDSGVSGESESESLDEALQRVNKKVEALPPLTDFRTEMPCLAEYDDGLWYRAKIVAIKEFNPLSILVQFVDYGSTAKLTLNRLCQIPSHLMRYPARAIKVLLAGFKPPLRDLGETRIPYCPKWSMEALWAMIDCLQGKQLYAVSMAPAPEQIVTLYDDEQHPVHMPLVEMGLADKDE

SEQ ID NO: 6124 - protein, 653 aa, Homo sapiens
MAAEASKTGPSRSSYQRMGRKSQPWGAAEIQCTRCGRRVSRSSGHHCELQCGHAFCELCLLMTEECTTIICPDCEVATAVNTRQRYYPMAGYIKEDSIMEKLQPKTIKNCSQDFKKTADQLTTGLERSASTDKTLLNSSAVMLDTNTAEEIDEALNTAHHSFEQLSIAGKALEHMQKQTIEERERVIEVVEKQFDQLLAFFDSRKKNLCEEFARTTDDYLSNLIKAKSYIEEKKNNLNAAMNIARALQLSPSLRTYCDLNQIIRTLQLTSDSELAQVSSPQLRNPPRLSVNCSEIICMFNNMGKIEFRDSTKCYPQENEIRQNVQKKYNNKKELSCYDTYPPLEKKKVDMSVLTSEAPPPPLQPETNDVHLEAKNFQPQKDVATASPKTIAVLPQMGSSPDVIIEEIIEDNVESSAELVFVSHVIDPCHFYIRKYSQIKDAKVLEKKVNEFCNRSSHLDPSDILELGARIFVSSIKNGMWCRGTITELIPIEGRNTRKPCSPTRLFVHEVALIQIFMVDFGNSEVLIVTGVVDTHVRPEHSAKQHIALNDLCLVLRKSEPYTEGLLKDIQPLAQPCSLKDIVPQNSNEGWEEEAKVEFLKMVNNKAVSMKVFREEDGVLIVDLQKPPPNKISSDMPVSLRDALVFMELAKDLI

SEQ ID NO: 6125 - protein, 449 aa, Homo sapiens
MAAEASKTGPSRSSYQRMGRKSQPWGAAEIQCTRCGRRVSRSSGHHCELQCGHAFCELCLLMTEECTTIICPDCEVATAVNTRQRYYPMAGYIKEDSIMEKLQPKTIKNCSQDFKKTADQLTTGLERSASTDKTLLNSSAVMLDTNTAEEIDEALNTAHHSFEQLSIAGKALEHMQKQTIEERERVIEVVEKQFDQLLAFFDSRKKNLCEEFARTTDDYLSNLIKAKSYIEEKKNNLNAAMNIARALQLSPSLRTYCDLNQIIRTLQLTSDSELAQVSSPQLRNPPRLSVNCSEIICMFNNMGKIEFRDSTKCYPQENEIRQNVQKKYNNKKELSCYDTYPPLEKKKVDMSVLTSEAPPPPLQPETNDVHLEAKNFQPQKDVATASPKTIAVLPQMGSSPDVIIEEIIEDNVETCGTDDLGETPRYPKKPLQKNSSVPFGSKADTVTTV

SEQ ID NO: 6126 - protein, 1581 aa, Homo sapiens
MAAEASKTGPSRSSYQRMGRKSQPWGAAEIQCTRCGRRVSRSSGHHCELQCGHAFCELCLLMTEECTTIICPDCEVATAVNTRQRYYPMAGYIKEDSIMEKLQPKTIKNCSQDFKKTADQLTTGLERSASTDKTLLNSSAVMLDTNTAEEIDEALNTAHHSFEQLSIAGKALEHMQKQTIEERERVIEVVEKQFDQLLAFFDSRKKNLCEEFARTTDDYLSNLIKAKSYIEEKKNNLNAAMNIARALQLSPSLRTYCDLNQIIRTLQLTSDSELAQVSSPQLRNPPRLSVNCSEIICMFNNMGKIEFRDSTKCYPQENEIRQNVQKKYNNKKELSCYDTYPPLEKKKVDMSVLTSEAPPPPLQPETNDVHLEAKNFQPQKDVATASPKTIAVLPQMGSSPDVIIEEIIEDNVESSAELVFVSHVIDPCHFYIRKYSQIKDAKVLEKKVNEFCNRSSHLDPSDILELGARIFVSSIKNGMWCRGTITELIPIEGRNTRKPCSPTRLFVHEVALIQIFMVDFGNSEVLIVTGVVDTHVRPEHSAKQHIALNDLCLVLRKSEPYTEGLLKDIQPLAQPCSLKDIVPQNSNEGWEEEAKVEFLKMVNNKAVSMKVFREEDGVLIVDLQKPPPNKISSDMPVSLRDALVFMELAKFKSQSLRSHFEKNTTLHYHPPILPKEMTDVSVTVCHINSPGDFYLQLIEGLDILFLLKTIEEFYKSEDGENLEILCPVQDQACVAKFEDGIWYRAKVIGLPGHQEVEVKYVDFGNTAKITIKDVRKIKDEFLNAPEKAIKCKLAYIEPYKRTMQWSKEAKEKFEEKAQDKFMTCSVIKILEDNVLLVELFDSLGAPEMTTTSINDQLVKEGLASYEIGYILKDNSQKHIEVWDPSPEEIISNEVHNLNPVSAKSLPNENFQSLYNKELPVHICNVISPEKIYVQWLLTENLLNSLEEKMIAAYENSKWEPVKWENDMHCAVKIQDKNQWRRGQIIRMVTDTLVEVLLYDVGVELVVNVDCLRKLEENLKTMGRLSLECSLVDIRPAGGSDKWTATACDCLSLYLTGAVATIILQVDSEENNTTWPLPVKIFCRDEKGERVDVSKYLIKKGLALRERRINNLDNSHSLSEKSLEVPLEQEDSVVTNCIKTNFDPDKKTADIISEQKVSEFQEKILEPRTTRGYKPPAIPNMNVFEATVSCVGDDGTIFVVPKLSEFELIKMTNEIQSNLKCLGLLEPYFWKKGEACAVRGSDTLWYRGKVMEVVGGAVRVQYLDHGFTEKIPQCHLYPILLYPDIPQFCIPCQLHNTTPVGNVWQPDAIEVLQQLLSKRQVDIHIMKPRSDHDKKYEEEQWEIRFEELLSAETDTPLLPPYLSSSLPSPGELYAVQVKHVVSPNEVYICLDSIETSNQSNQHSDTDDSGVSGESESESLDEALQRVNKKVEALPPLTDFRTEMPCLAEYDDGLWYRAKIVAIKEFNPLSILVQFVDYGSTAKLTLNRLCQIPSHLMRYPARAIKVLLAGFKPPLRDLGETRIPYCPKWSMEALWAMIDCLQGKQLYAVSMAPAPEQIVTLYDDEQHPVHMPLVEMGLADKDE

SEQ ID NO: 6127 - protein, 1617 aa, Homo sapiens
MAAEASKTGPSRSSYQRMGRKSQPWGAAEIQCTRCGRRVSRSSGHHCELQCGHAFCELCLLMTEECTTIICPDCEVATAVNTRQRYYPMAGYIKEDSIMEKLQPKTIKNCSQDFKKTADQLTTGLERSASTDKTLLNSSAVMLDTNTAEEIDEALNTAHHSFEQLSIAGKALEHMQKQTIEERERVIEVVEKQFDQLLAFFDSRKKNLCEEFARTTDDYLSNLIKAKSYIEEKKNNLNAAMNIARALQLSPSLRTYCDLNQIIRTLQLTSDSELAQVSSPQLRNPPRLSVNCSEIICMFNNMGKIEFRDSTKCYPQENEIRQNVQKKYNNKKELSCYDTYPPLEKKKVDMSVLTSEAPPPPLQPETNDVHLEAKNFQPQKDVATASPKTIAVLPQMGSSPDVIIEEIIEDNVESSAELVFVSHVIDPCHFYIRKYSQIKDAKVLEKKVNEFCNRSSHLDPSDILELGARIFVSSIKNGMWCRGTITELIPIEGRNTRKPCSPTRLFVHEVALIQIFMVDFGNSEVLIVTGVVDTHVRPEHSAKQHIALNDLCLVLRKSEPYTEGLLKDIQPLAQPCSLKDIVPQNSNEGWEEEAKVEFLKMVNNKAVSMKVFREEDGVLIVDLQKPPPNKISSDMPVSLRDALVFMELAKFKSQSLRSHFEKNTTLHYHPPILPKEMTDVSVTVCHINSPGDFYLQLIEGLDILFLLKTIEEFYKSEDGENLEILCPVQDQACVAKFEDGIWYRAKVIGLPGHQEVEVKYVDFGNTAKITIKDVRKIKDEFLNAPEKAIKCKLAYIEPYKRTMQWSKEAKEKFEEKAQDKFMTCSVIKILEDNVLLVELFDSLGAPEMTTTSINDQLVKEGLASYEIGYILKDNSQKHIEVWDPSPEEIISNEVHNLNPVSAKSLPNENFQSLYNKELPVHICNVISPEKIYVQWLLTENLLNSLEEKMIAAYENSKWEPVKWENDMHCAVKIQDKNQWRRGQIIRMVTDTLVEVLLYDVGVELVVNVDCLRKLEENLKTMGRLSLECSLVDIRPAGGSDKWTATACDCLSLYLTGAVATIILQVDSEENNTTWPLPVKIFCRDEKGERVDVSKYLIKKGLALRERRINNLDNSHSLSEKSLEVPLEQEDSVVTNCIKTNFDPDKKTADIISEQKVSEFQEKILEPRTTRGYKPPAIPNMNVFEATVSCVGDDGTIFVVPKLSEFELIKMTNEIQSNLKCLGLLEPYFWKKGEACAVRGSDTLWYRGKVMEVVGGAVRVQYLDHGFTEKIPQCHLYPILLYPDIPQFCIPCQLHNTTPVGNVWQPDAIEVLQQLLSKRQELPKNPWEKLSIHLYFDGMSLSYFMAYYKYCTSEHTEEMLKEKPRSDHDKKYEEEQWEIRFEELLSAETDTPLLPPYLSSSLPSPGELYAVQVKHVVSPNEVYICLDSIETSNQSNQHSDTDDSGVSGESESESLDEALQRVNKKVEALPPLTDFRTEMPCLAEYDDGLWYRAKIVAIKEFNPLSILVQFVDYGSTAKLTLNRLCQIPSHLMRYPARAIKVLLAGFKPPLRDLGETRIPYCPKWSMEALWAMIDCLQGKQLYAVSMAPAPEQIVTLYDDEQHPVHMPLVEMGLADKDE

SEQ ID NO: 6128 - protein, 694 aa, Homo sapiens
MTDTVFSNSSNRWMYPSDRPLQSNDKEQLQAGWSVHPGGQPDRQRKQEELTDEEKEIINRVIARAEKMEEMEQERIGRLVDRLENMRKNVAGDGVNRCILCGEQLGMLGSACVVCEDCKKNVCTKCGVETNNRLHSVWLCKICIEQREVWKRSGAWFFKGFPKQVLPQPMPIKKTKPQQPVSEPAAPEQPAPEPKHPARAPARGDSEDRRGPGQKTGPDPASAPGRGNYGPPVRRASEARMSSSSRDSESWDHSGGAGDSSRSPAGLRRANSVQASRPAPGSVQSPAPPQPGQPGTPGGSRPGPGPAGRFPDQKPEVAPSDPGTTAPPREERTGGVGGYPAVGAREDRMSHPSGPYSQASAAAPQPAAARQPPPPEEEEEEANSYDSDEATTLGALEFSLLYDQDNSSLQCTIIKAKGLKPMDSNGLADPYVKLHLLPGASKSNKLRTKTLRNTRNPIWNETLVYHGITDEDMQRKTLRISVCDEDKFGHNEFIGETRFSLKKLKPNQRKNFNICLERVIPMKRAGTTGSARGMALYEEEQVERVGDIEERGKILVSLMYSTQQGGLIVGIIRCVHLAAMDANGYSDPFVKLWLKPDMGKKAKHKTQIKKKTLNPEFNEEFFYDIKHSDLAKKSLDISVWDYDIGKSNDYIGGCQLGISAKGERLKHWYECLKNKDKKIERWHQLQNENHVSSD

SEQ ID NO: 6129 - protein, 690 aa, Homo sapiens
MTDTVFSNSSNRWMYPSDRPLQSKLQAGWSVHPGGQPDRQRKQEELTDEEKEIINRVIARAEKMEEMEQERIGRLVDRLENMRKNVAGDGVNRCILCGEQLGMLGSACVVCEDCKKNVCTKCGVETNNRLHSVWLCKICIEQREVWKRSGAWFFKGFPKQVLPQPMPIKKTKPQQPVSEPAAPEQPAPEPKHPARAPARGDSEDRRGPGQKTGPDPASAPGRGNYGPPVRRASEARMSSSSRDSESWDHSGGAGDSSRSPAGLRRANSVQASRPAPGSVQSPAPPQPGQPGTPGGSRPGPGPAGRFPDQKPEVAPSDPGTTAPPREERTGGVGGYPAVGAREDRMSHPSGPYSQASAAAPQPAAARQPPPPEEEEEEANSYDSDEATTLGALEFSLLYDQDNSSLQCTIIKAKGLKPMDSNGLADPYVKLHLLPGASKSNKLRTKTLRNTRNPIWNETLVYHGITDEDMQRKTLRISVCDEDKFGHNEFIGETRFSLKKLKPNQRKNFNICLERVIPMKRAGTTGSARGMALYEEEQVERVGDIEERGKILVSLMYSTQQGGLIVGIIRCVHLAAMDANGYSDPFVKLWLKPDMGKKAKHKTQIKKKTLNPEFNEEFFYDIKHSDLAKKSLDISVWDYDIGKSNDYIGGCQLGISAKGERLKHWYECLKNKDKKIERWHQLQNENHVSSD

SEQ ID NO: 6130 - protein, 305 aa, Homo sapiens
MDLSGVKKKSLLGVKENNKKSSTRAPSPTKRKDRSDEKSKDRSKDKGATKESSEKDRGRDKTRKRRSASSGSSSTRSRSSSTSSSGSSTSTGSSSGSSSSSASSRSGSSSTSRSSSSSSSSGSPSPSRRRHDNRRRSRSKSKPPKRDEKERKRRSPSPKPTKVHIGRLTRNVTKDHIMEIFSTYGKIKMIDMPVERMHPHLSKGYAYVEFENPDEAEKALKHMDGGQIDGQEITATAVLAPWPRPPPRRFSPPRRMLPPPPMWRRSPPRMRRRSRSPRRRSPVRRRSRSPGRRRHRSRSSSNSSR

SEQ ID NO: 6131 - protein, 282 aa, Homo sapiens
MAPSPTKRKDRSDEKSKDRSKDKGATKESSEKDRGRDKTRKRRSASSGSSSTRSRSSSTSSSGSSTSTGSSSGSSSSSASSRSGSSSTSRSSSSSSSSGSPSPSRRRHDNRRRSRSKSKPPKRDEKERKRRSPSPKPTKVHIGRLTRNVTKDHIMEIFSTYGKIKMIDMPVERMHPHLSKGYAYVEFENPDEAEKALKHMDGGQIDGQEITATAVLAPWPRPPPRRFSPPRRMLPPPPMWRRSPPRMRRRSRSPRRRSPVRRRSRSPGRRRHRSRSSSNSSR

SEQ ID NO: 6132 - protein, 268 aa, Homo sapiens
MAPSPTKRKDRSDEKSKDRSKDKGATKESSEKDRGRDKTRKRRSASSSGSSTSTGSSSGSSSSSASSRSGSSSTSRSSSSSSSSGSPSPSRRRHDNRRRSRSKSKPPKRDEKERKRRSPSPKPTKVHIGRLTRNVTKDHIMEIFSTYGKIKMIDMPVERMHPHLSKGYAYVEFENPDEAEKALKHMDGGQIDGQEITATAVLAPWPRPPPRRFSPPRRMLPPPPMWRRSPPRMRRRSRSPRRRSPVRRRSRSPGRRRHRSRSSSNSSR

SEQ ID NO: 6133 - protein, 1873 aa, Homo sapiens
MFSRRSHGDVKKSTQKVLDPKKDVLTRLKHLRALLDNVDANDLKQFFETNYSQIYFIFYENFIALENSLKLKGNNKSQREELDSILFLFEKILQFLPERIFFRWHYQSIGSTLKKLLHTGNSIKIRCEGIRLFLLWLQALQTNCAEEQVLIFACLVPGFPAVMSSRGPCTLETLINPSPSVADVKIYPEEITPLLPAISGEKIAEDQTCFFLQILLKYMVIQAASLEWKNKENQDTGFKFLFTLFRKYYLPHLFPSFTKLTNIYKPVLDIPHLRPKPVYITTTRDNENIYSTKIPYMAARVVFIKWIVTFFLEKKYLTATQNTKNGVDVLPKIIQTVGGGAVQERAPELDGGGPTEQDKSHSNSSTLSDRRLSNSSLCSIEEEHRMVYEMVQRILLSTRGYVNFVNEVFHQAFLLPSCEIAVTRKVVQVYRKWILQDKPVFMEEPDRKDVAQEDAEKLGFSETDSKEASSESSGHKRSSSWGRTYSFTSAMSRGCVTEEENTNVKAGVQALLQVFLTNSANIFLLEPCAEVPVLLKEQVDACKAVLIIFRRMIMELTMNKKTWEQMLQILLRITEAVMQKPKDKQIKDLFAQSLAGLLFRTLMVAWIRANLCVYISRELWDDFLGVLSSLTEWEELINEWANIMDSLTAVLARTVYGVEMTNLPLDKLSEQKEKKQRGKGCVLDPQKGTTVGRSFSLSWRSHPDVTEPMRFRSATTSGAPGVEKARNIVRQKATEVEECQQSENAPAAGSGHLTVGQQQQVLRSSSTSDIPEPLCSDSSQGQKAENTQNSSSSEPQPIQENKGHVKREHEGITILVRRSSSPAELDLKDDLQQTQGKCRERQKSESTNSDTTLGCTNEAELSMGPWQTCEEDPELNTPTDVVADADARHWLQLSPTDASNLTDSSECLTDDCSIIAGGSLTGWHPDSAAVLWRRVLGILGDVNNIQSPKIHARVFCYLYELWYKLAKIRDNLAISLDNQSSPSPPVLIPPLRMFASWLFKAATLPNEYKEGKLQAYRLICAMMTRRQDVLPNSDFLVHFYLVMHLGLTSEDQDILNTIIRHCPPRFFSLGFPGFSMLVGDFITAAARVLSTDILTAPRSEAVTVLGSLVCFPNTYQEIPLLQSVPEVNEAITGTEDVKHYLINILLKNATEEPNEYARCIAVCSLGVWICEELAQCTSHPQVKEAINVIGVTLKFPNKIVAQVACDVLQLLVSYWEKLQMFETSLPRKMAEILVATVAFLLPSAEYSSVETDKKFIVSLLLCLLDWCMALPVSVLLHPVSTAVLEEQHSARAPLLDYIYRVLHCCVCGSSTYTQQSHYILTLADLSSTDYDPFLPLANVKSSEPVQYHSSAELGNLLTVEEEKKRRSLELIPLTARMVMAHLVNHLGHYPLSGGPAILHSLVSENHDNAHVEGSELSFEVFRSPNLQLFVFNDSTLISYLQTPTEGPVGGSPVGSLSDVRVIVRDISGKYSWDGKVLYGPLEGCLAPNGRNPSFLISSWHRDTFGPQKDSSQVEEGDDVLDKLLENIGHTSPECLLPSQLNLNEPSLTPCGMNYDQEKEIIEVILRQNAQEDEYIQSHNFDSAMKVTSQGQPSPVEPRGPFYFCRLLLDDLGMNSWDRRKNFHLLKKNSKLLRELKNLDSRQCRETHKIAVFYIAEGQEDKCSILSNERGSQAYEDFVAGLGWEVDLSTHCGFMGGLQRNGSTGQTAPYYATSTVEVIFHVSTRMPSDSDDSLTKKLRHLGNDEVHIVWSEHSRDYRRGIIPTAFGDVSIIIYPMKNHMFFIAITKKPEVPFFGPLFDGAIVSGKLLPSLVCATCINASRAVKCLIPLYQSFYEERALYLEAIIQNHREVMTFEDFAAQVFSPSPSYSLSGTD

SEQ ID NO: 6134 - protein, 1839 aa, Homo sapiens
MFSRRSHGDVKKSTQKVLDPKKDVLTRLKHLRALLDNVDANDLKQFFETNYSQIYFIFYENFIALENSLKLKGNNKSQREELDSILFLFEKILQFLPERIFFRWHYQSIGSTLKKLLHTGNSIKIRCEGIRLFLLWLQALQTNCAEEQVLIFACLVPGFPAVMSSRGPCTLETLINPSPSVADVKIYPEEITPLLPAISGEKIAEDQTCFFLQILLKYMVIQAASLEWKNKENQDTGFKFLFTLFRKYYLPHLFPSFTKLTNIYKPVLDIPHLRPKPVYITTTRDNENIYSTKIPYMAARVVFIKWIVTFFLEKKYLTATQNTKNGVDVLPKIIQTVGGGAVQERAPELDGGGPTEQDKSHSNSSTLSDRRLSNSSLCSIEEEHRMVYEMVQRILLSTRGYVNFVNEVFHQAFLLPSCEIAVTRKVVQVYRKWILQDKPVFMEEPDRKDVAQEDAEKLGFSETDSKEASSESSGHKRSSSWGRTYSFTSAMSRGCVTEEENTNVKAGVQALLQVFLTNSANIFLLEPCAEVPVLLKEQVDACKAVLIIFRRMIMELTMNKKTWEQMLQILLRITEAVMQKPKDKQIKDLFAQSLAGLLFRTLMVAWIRANLCVYISRELWDDFLGVLSSLTEWEELINEWANIMDSLTAVLARTVYGVEMTNLPLDKLSEQKEKKQRGKGCVLDPQKGTTVGRSFSLSWRSHPDVTEPMRFRSATTSGAPGVEKARNIVRQKATEVEECQQSENAPAAGSGHLTVGQQQQVLRSSSTSDIPEPLCSDSSQGQKAENTQNSSSSEPQPIQENKGHVKREHEGITILVRRSSSPAELDLKDDLQQTQGKCRERQKSESTNSDTTLGCTNEAELSMGPWQTCEEDPELNTPTDVVADADARHWLQLSPTDASNLTDSSECLTDDCSIIAGGSLTGWHPDSAAVLWRRVLGILGDVNNIQSPKIHARVFCYLYELWYKLAKIRDNLAISLDNQSSPSPPVLIPPLRMFASWLFKAATLPNEYKEGKLQAYRLICAMMTRRQDVLPNSDFLVHFYLVMHLGLTSEDQDILNTIIRHCPPRFFSLGFPGFSMLVGDFITAAARVLSTDILTAPRSEAVTVLGSLVCFPNTYQEIPLLQSVPEVNEAITGTEDVKHYLINILLKNATEEPNEYARCIAVCSLGVWICEELAQCTSHPQVKEAINVIGVTLKFPNKIVAQVACDVLQLLVSYWEKLQMFETSLPRKMAEILVATVAFLLPSAEYSSVETDKKFIVSLLLCLLDWCMALPVSVLLHPVSTAVLEEQHSARAPLLDYIYRVLHCCVCGSSTYTQQSHYILTLADLSSTDYDPFLPLANVKSSEPVQYHSSAELGNLLTVEEEKKRRSLELIPLTARMVMAHLVNHLGHYPLSGGPAILHSLVSENHDNAHVEGSELSFEVFRSPNLQLFVFNDSTLISYLQTPTEGPVGGSPVGSLSDVRVIVRDISGKYSWDGKVLYGPLEGCLAPNGRNPSFLISSWHRDTFGPQKDSSQVEEGDDVLDKLLENIGHTSPECLLPSQLNLNEPSLTPCGMNYDQEKEIIEVILRQNAQEDEYIQSHNFDSAMKVTSQGQPSPVEPRGPFYFCRLLLDDLGMNSWDRRKNFHLLKKNSKLLRELKNLDSRQCRETHKIAVFYIAEGQEDKCSILSNERGSQAYEDFVAGLGWEVDLSTHCGFMGGLQRNGSTGQTAPYYATSTVEVIFHVSTRMPSDSDDSLTKKLRHLGNDEVHIVWSEHSRDYRRGIIPTAFGDVSIIIYPMKNHMFFIAITKKPEVPFFGPLFDGAIVSGKLLPSLVCATCINASRAVKCLIPLYQSLYLFALNV

SEQ ID NO: 6135 - protein, 1835 aa, Homo sapiens
MFSRRSHGDVKKSTQKVLDPKKDVLTRLKHLRALLDNVDANDLKQFFETNYSQIYFIFYENFIALENSLKLKGNNKSQREELDSILFLFEKILQFLPERIFFRWHYQSIGSTLKKLLHTGNSIKIRCEGIRLFLLWLQALQTNCAEEQVLIFACLVPGFPAVMSSRGPCTLETLINPSPSVADVKIYPEEITPLLPAISGEKIAEDQTCFFLQILLKYMVIQAASLEWKNKENQDTGFKFLFTLFRKYYLPHLFPSFTKLTNIYKPVLDIPHLRPKPVYITTTRDNENIYSTKIPYMAARVVFIKWIVTFFLEKKYLTATQNTKNGVDVLPKIIQTVGGGAVQERAPELDGGGPTEQDKSHSNSSTLSDRRLSNSSLCSIEEEHRMVYEMVQRILLSTRGYVNFVNEVFHQAFLLPSCEIAVTRKVVQVYRKWILQDKPVFMEEPDRKDVAQEDAEKLGFSETDSKEASSESSGHKRSSSWGRTYSFTSAMSRGCVTEEENTNVKAGVQALLQVFLTNSANIFLLEPCAEVPVLLKEQVDACKAVLIIFRRMIMELTMNKKTWEQMLQILLRITEAVMQKPKDKQIKDLFAQSLAGLLFRTLMVAWIRANLCVYISRELWDDFLGVLSSLTEWEELINEWANIMDSLTAVLARTVYGVEMTNLPLDKLSEQKEKKQRGKGCVLDPQKGTTVGRSFSLSWRSHPDVTEPMRFRSATTSGAPGVEKARNIVRQKATEVEECQQSENAPAAGSGHLTVGQQQQVLRSSSTSDIPEPLCSDSSQGQKAENTQNSSSSEPQPIQENKGHVKREHEGITILVRRSSSPAELDLKDDLQQTQGKCRERQKSESTNSDTTLGCTNEAELSMGPWQTCEEDPELNTPTDVVADADARHWLQLSPTDASNLTDSSECLTDDCSIIAGGSLTGWHPDSAAVLWRRVLGILGDVNNIQSPKIHARVFCYLYELWYKLAKIRDNLAISLDNQSSPSPPVLIPPLRMFASWLFKAATLPNEYKEGKLQAYRLICAMMTRRQDVLPNSDFLVHFYLVMHLGLTSEDQDILNTIIRHCPPRFFSLGFPGFSMLVGDFITAAARVLSTDILTAPRSEAVTVLGSLVCFPNTYQEIPLLQSVPEVNEAITGTEDVKHYLINILLKNATEEPNEYARCIAVCSLGVWICEELAQCTSHPQVKEAINVIGVTLKFPNKIVAQVACDVLQLLVSYWEKLQMFETSLPRKMAEILVATVAFLLPSAEYSSVETDKKFIVSLLLCLLDWCMALPVSVLLHPVSTAVLEEQHSARAPLLDYIYRVLHCCVCGSSTYTQQSHYILTLADLSSTDYDPFLPLANVKSSEPVQYHSSAELGNLLTVEEEKKRRSLELIPLTARMVMAHLVNHLGHYPLSGGPAILHSLVSENHDNAHVEGSELSFEVFRSPNLQLFVFNDSTLISYLQTPTEGPVGGSPVGSLSDVRVIVRDISGKYSWDGKVLYGPLEGCLAPNGRNPSFLISSWHRDTFGPQKDSSQVEEGDDVLDKLLENIGHTSPECLLPSQLNLNEPSLTPCGMNYDQEKEIIEVILRQNAQEDEYIQSHNFDSAMKVTSQGQPSPVEPRGPFYFCRLLLDDLGMNSWDRRKNFHLLKKNSKLLRELKNLDSRQCRETHKIAVFYIAEGQEDKCSILSNERGSQAYEDFVAGLGWEVDLSTHCGFMGGLQRNGSTGQTAPYYATSTVEVIFHVSTRMPSDSDDSLTKKLRHLGNDEVHIVWSEHSRDYRRGIIPTAFGDVSIIIYPMKNHMFFIAITKKPEVPFFGPLFDGAIVSGKLLPSLVCATCINASRAVKCLIPLYQSPRVR

SEQ ID NO: 6136 - protein, 288 aa, Homo sapiens
MEPPDQCSQYMTSLLSPAVDDEKELQDMNAMVLSLTEEVKEEEEDAQPEPEQGTAAGEKLKSAGAQGGEEKDGGGEEKDGGGAGVPGHLWEGNLEGTSGSDGNVEDSDQSEKEPGQQYSRPQGAVGGLEPGNAQQPNVHAFTPLQLQELECIFQREQFPSEFLRRRLARSMNVTELAVQIWFENRRAKWRRHQRALMARNMLPFMAVGQPVMVTAAEAITAPLFISGMRDDYFWDHSHSSSLCFPMPPFPPPSLPLPLMLLPPMPPAGQAEFGPFPFVIVPSFTFPNV

SEQ ID NO: 6137 - protein, 155 aa, Homo sapiens
MRHLPYFCRGQVVRGFGRGSKQLGIPTANFPEQVVDNLPADISTGIYYGWASVGSGDVHKMVVSIGWNPYYKNTKKSMETHIMHTFKEDFYGEILNVAIVGYLRPEKNFDSLESLISAIQGDIEEAKKRLELPEHLKIKEDNFFQVSKSKIMNGH

SEQ ID NO: 6138 - protein, 1756 aa, Homo sapiens
MRRSKAYGERYLASVQGSAPSPGKKLRGFYFAKLYYEAKEYDLAKKYVCTYLSVQERDPRAHRFLGLLYELEENTEKAVECYRRSLELNPPQKDLVLKIAELLCKNDVTDGRAKYWVERAAKLFPGSPAIYKLKEHLLDCEGEDGWNKLFDWIQSELYVRPDDVHMNIRLVELYRSNKRLKDAVARCHEAERNIALRSSLEWNSCVVQTLKEYLESLQCLESDKSDWRATNTDLLLAYANLMLLTLSTRDVQESRELLESFDSALQSAKSSLGGNDELSATFLEMKGHFYMHAGSLLLKMGQHGNNVQWQALSELAALCYVIAFQVPRPKIKLIKGEAGQNLLEMMACDRLSQSGHMLLNLSRGKQDFLKEVVETFANKSGQSVLYNALFSSQSSKDTSFLGSDDIGNIDVQEPELEDLARYDVGAIQAHNGSLQHLTWLGLQWNSLPALPGIRKWLKQLFHHLPQETSRLETNAPESICILDLEVFLLGVVYTSHLQLKEKCNSHHSSYQPLCLPLPVCKRLCTERQKSWWDAVCTLIHRKAVPGNSAELRLVVQHEINTLRAQEKHGLQPALLVHWAKCLQKMGRGLNSSYDQQEYIGRSVHYWKKVLPLLKIIKKNSIPEPIDPLFKHFHSVDIQASEIVEYEEDAHITFAILDAVHGNIEDAVTAFESIKSVVSYWNLALIFHRKAEDIENDAVFPEEQEECKNYLRKTRDYLIKIIDDSDSNLSVVKKLPVPLESVKEMLKSVMQELEDYSEGGPLYKNGSLRNADSEIKHSTPSPTKYSLSPSKSYKYSPKTPPRWAEDQNSLRKMICQEVKAITKLNSSKSASRHRWPTENYGPDSVPDGYQGSQTFHGAPLTVATTGPSVYYSQSPAYNSQYLLRPAANVTPTKGSSNTEFKSTKEGFSIAVSADGFKFGISEPGNQEKKSEKPLENDTGFQAQDISGQKNGRGVIFGQTSSTFTFADVAKSTSGEGFQFGKKDPNFKGFSGAGEKLFSSQCGKMANKANTSGDFEKDDDACKTEDSDDIHFEPVVQMPEKVELVTGEEGEKVLYSQGVKLFRFDAEISQWKERGLGNLKILKNEVNGKPRMLMRRDQVLKVCANHWITTTMNLKPLSGSDRAWMWLASDFSDGDAKLERLAAQFKTPELAEEFKQKFEECQRLLLDIPLQTPHKLVDTGRAAKLIQRAEEMKSGLKDFKTFLTNDQTKVTEEENKGSGTGAAGASDTTIKPNPENTGPTLEWDNYDLREDALDDNVSSSSVHDSPLASSPVRKNIFRFDESTTGFNFSFKSALSLSKSPAKLNQSGTSVGTDEESDVTQEEERDGQYFEPVVPLPDLVEVSSGEENEQVVFSHMAELYRYDKDVGQWKERGIGDIKILQNYDNKQVRIVMRRDQVLKLCANHRITPDMSLQNMKGTERVWVWTACDFADGERKVEHLAVRFKLQDVADSFKKIFDEAKTAQEKDSLITPHVSRSSTPRESPCGKIAVAVLEETTRERTDVIQGDDVADAASEVEVSSTSETTTKAVVSPPKFVFGSESVKRIFSSEKSNPFAFGNSSATGSLFGFSFNAPLKSNDSETSSVAQSGSESKVEPKKCELSKNSDIEQSSDSKVKNLSASFPMEESSINYTFKTPEKEPPLWHAEFTKEELVQKLSSTTKSADQLNGLLRETEATSAVLMEQIKLLKSEIRRLERNQEESAANVEHLKNVLLQFIFLKPGSERESLLPVINTMLQLSPEEKGKLAAVAQGLQETSIPKKK

SEQ ID NO: 6139 - protein, 1758 aa, Homo sapiens
MSCSKAYGERYVASVQGSAPSPRKKSTRGFYFAKLYYEAKEYDLAKKYICTYINVREMDPRAHRFLGLLYELEENTEKAVECYRRSVELNPTQKDLVLKIAELLCKNDVTDGRAEYWVERAAKLFPGSPAIYKLKEQLLDCEGEDGWNKLFDLIQSELYVRPDDVHVNIRLVELYRSTKRLKDAVARCHEAERNIALRSSLEWNSCVVQTLKEYLESLQCLESDKSDWRATNTDLLLAYANLMLLTLSTRDVQESRELLESFDSALQSAKSSLGGNDELSATFLEMKGHFYMHAGSLLLKMGQHGNNVQWRALSELAALCYLIAFQVPRPKIKLIKGEAGQNLLEMMACDRLSQSGHMLLNLSRGKQDFLKVVVETFANKSGQSALYDALFSSQSPKDTSFLGSDDIGNIDVQEPELEDLARYDVGAIRAHNGSLQHLTWLGLQWNSLPALPGIRKWLKQLFHHLPQETSRLETNAPESICILDLEVFLLGVVYTSHLQLKEKCNSHHSSYQPLCLPLPVCKQLCTERQKSWWDAVCTLIHRKAVPGNSAKLRLLVQHEINTLRAQEKHGLQPALLVHWAKCLQKMGSGLNSFYDQREYIGRSVHYWKKVLPLLKIIKKKNSIPEPIDPLFKHFHSVDIQASEIVEYEEDAHVTFAILDAVNGNIEDAMTAFESIKSVVSYWNLALIFHRKAEDIANDALSPEEQEECKNYLRKTRGYLIKILDDSDSNLSVVKKLPVPLESVKEMLKSVMQELENYSEGGPLYKNGSLRNADSEIKHSTPSPTKYSLSPSKSYKYSPKTPPRWAEDQNSLLKMIRQEVKAIKEEMQELKLNSSKSASHHRWPTENYGPDSVPDGYQGSQTFHGAPLTVATTGPSVYYSQSPAYNSQYLLRPAANVTPTKGSSNTEFKSTKEGFSIPVSADGFKFGISEPGNQEKKSEKPLENDTGLQAQDISGRKKGRGVIFGQTSSTFTFADVAKSTSGEGFQFGKKDLNFKGFSGAGEKLFSSQYGKMANKANTSGDFEKDDDAYKTEDSDDIHFEPVVQMPEKVELVTGEEGEKVLYSQGVKLFRFDAEVSQWKERGLGNLKILKNEVNGKVRMLMQREQVLKVCANHWITTTMNLKPLSGSDRAWMWSASDFSDGDAKLERLAAKFKTPELAEEFKQKFEECQRLLLDIPLQTPHKLVDTGRAAKLIQRAEEMKSGLKDFKTFLTNDQTKVAEEENKGSGTGAAGASDTTIKPNAENTGPTLEWDNYDLREDALDDSVSSSSVHASPLASSPVRKNLFHFDESTTGSNFSFKSALSLSKSPAKLNQSGTSVGTDEESDVTQEEERDGQYFEPVVPLPDLVEVSSGEENEQVVFSHRAEFYRYDKDVGQWKERGIGDIKILQNYDNKHVRILMRRDQVLKLCANHRITPDMSLQNMKGTERVWVWTACDFADGERKVEHLAVRFKLQDVADSFKKIFDEAKTAQEKDSLITPHVSRSSTPRESPCGKIAVAVLEETTRERTDVIQGDDVADAASEVEVSSTSETTTKAVVSPPKFVFGSESVKRIFSSEKSKPFAFGNSSATGSLFGFSFNAPLKSNNSETSSVAQSGSESKVEPKKCELSKNSDIEQSSDSKVKNLSASFPTEESSINYTFKTPEKEPPLWYAEFTKEELVQKLSSTTKSADHLNGLLREIEATNAVLMEQIKLLKSEIRRLERNQEQEVSAANVEHLKNVLLQFIFLKPGSERERLLPVINTMLQLSLEEKGKLAAVAQGEE

SEQ ID NO: 6140 - protein, 783 aa, Homo sapiens
MSGGHQLQLAALWPWLLMATLQAGFGRTGLVLAAAVESERSAEQKAIIRVIPLKMDPTGKLNLTLEGVFAGVAEITPAEGKLMQSHPLYLCNASDDDNLEPGFISIVKLESPRRAPRPCLSLASKARMAGERGASAVLFDITEDRAAAEQLQQPLGLTWPVVLIWGNDAEKLMEFVYKNQKAHVRIELKEPPAWPDYDVWILMTVVGTIFVIILASVLRIRCRPRHSRPDPLQQRTAWAISQLATRRYQASCRQARGEWPDSGSSCSSAPVCAICLEEFSEGQELRVISCLHEFHRNCVDPWLHQHRTCPLCMFNITEGDSFSQSLGPSRSYQEPGRRLHLIRQHPGHAHYHLPAAYLLGPSRSAVARPPRPGPFLPSQEPGMGPRHHRFPRAAHPRAPGEQQRLAGAQHPYAQGWGLSHLQSTSQHPAACPVPLRRARPPDSSGSGESYCTERSGYLADGPASDSSSGPCHGSSSDSVVNCTDISLQGVHGSSSTFCSSLSSDFDPLVYCSPKGDPQRVDMQPSVTSRPRSLDSVVPTGETQVSSHVHYHRHRHHHYKKRFQWHGRKPGPETGVPQSRPPIPRTQPQPEPPSPDQQVTRSNSAAPSGRLSNPQCPRALPEPAPGPVDASSICPSTSSLFNLQKSSLSARHPQRKRRGGPSEPTPGSRPQDATVHPACQIFPHYTPSVAYPWSPEAHPLICGPPGLDKRLLPETPGPCYSNSQPVWLCLTPRQPLEPHPPGEGPSEWSSDTAEGRPCPYPHCQVLSAQPGSEEELEELCEQAV

SEQ ID NO: 6141 - protein, 742 aa, Homo sapiens
MSGGHQLQLAALWPWLLMATLQAGFGRTGLVLAAAVESERSAEQKAIIRVIPLKMDPTGKLNLTLEGVFAGVAEITPAEGKLMQARMAGERGASAVLFDITEDRAAAEQLQQPLGLTWPVVLIWGNDAEKLMEFVYKNQKAHVRIELKEPPAWPDYDVWILMTVVGTIFVIILASVLRIRCRPRHSRPDPLQQRTAWAISQLATRRYQASCRQARGEWPDSGSSCSSAPVCAICLEEFSEGQELRVISCLHEFHRNCVDPWLHQHRTCPLCMFNITEGDSFSQSLGPSRSYQEPGRRLHLIRQHPGHAHYHLPAAYLLGPSRSAVARPPRPGPFLPSQEPGMGPRHHRFPRAAHPRAPGEQQRLAGAQHPYAQGWGLSHLQSTSQHPAACPVPLRRARPPDSSGSGESYCTERSGYLADGPASDSSSGPCHGSSSDSVVNCTDISLQGVHGSSSTFCSSLSSDFDPLVYCSPKGDPQRVDMQPSVTSRPRSLDSVVPTGETQVSSHVHYHRHRHHHYKKRFQWHGRKPGPETGVPQSRPPIPRTQPQPEPPSPDQQVTRSNSAAPSGRLSNPQCPRALPEPAPGPVDASSICPSTSSLFNLQKSSLSARHPQRKRRGGPSEPTPGSRPQDATVHPACQIFPHYTPSVAYPWSPEAHPLICGPPGLDKRLLPETPGPCYSNSQPVWLCLTPRQPLEPHPPGEGPSEWSSDTAEGRPCPYPHCQVLSAQPGSEEELEELCEQAV

SEQ ID NO: 6142 - protein, 656 aa, Homo sapiens
MAGERGASAVLFDITEDRAAAEQLQQPLGLTWPVVLIWGNDAEKLMEFVYKNQKAHVRIELKEPPAWPDYDVWILMTVVGTIFVIILASVLRIRCRPRHSRPDPLQQRTAWAISQLATRRYQASCRQARGEWPDSGSSCSSAPVCAICLEEFSEGQELRVISCLHEFHRNCVDPWLHQHRTCPLCMFNITEGDSFSQSLGPSRSYQEPGRRLHLIRQHPGHAHYHLPAAYLLGPSRSAVARPPRPGPFLPSQEPGMGPRHHRFPRAAHPRAPGEQQRLAGAQHPYAQGWGLSHLQSTSQHPAACPVPLRRARPPDSSGSGESYCTERSGYLADGPASDSSSGPCHGSSSDSVVNCTDISLQGVHGSSSTFCSSLSSDFDPLVYCSPKGDPQRVDMQPSVTSRPRSLDSVVPTGETQVSSHVHYHRHRHHHYKKRFQWHGRKPGPETGVPQSRPPIPRTQPQPEPPSPDQQVTRSNSAAPSGRLSNPQCPRALPEPAPGPVDASSICPSTSSLFNLQKSSLSARHPQRKRRGGPSEPTPGSRPQDATVHPACQIFPHYTPSVAYPWSPEAHPLICGPPGLDKRLLPETPGPCYSNSQPVWLCLTPRQPLEPHPPGEGPSEWSSDTAEGRPCPYPHCQVLSAQPGSEEELEELCEQAV

SEQ ID NO: 6143 - protein, 869 aa, Homo sapiens
MSGGHQLQLAALWPWLLMATLQAGFGRTGLVLAAAVESERSAEQKAIIRVIPLKMDPTGKLNLTLEGVFAGVAEITPAEGKLMQSHPLYLCNASDDDNLEPGFISIVKLESPRRAPRPCLSLASKARMAGERGASAVLFDITEDRAAAEQLQQPLGLTWPVVLIWGNDAEKLMEFVYKNQKAHVRIELKEPPAWPDYDVWILMTVVGTIFVIILASVLRIRCRPRHSRPDPLQQRTAWAISQLATRRYQASCRQARGEWPDSGSSCSSAPVCAICLEEFSEGQELRVISCLHEFHRNCVDPWLHQHRTCPLCMFNITEGDSFSQSLGPSRSYQEPGRRLHLIRQHPGHAHYHLPAAYLLGPSRSAVARPPRPGPFLPSQEPGMGPRHHRFPRAAHPRAPGEQQRLAGAQHPYAQGWGLSHLQSTSQHPAACPVPLRRARPPDSSGSGESYCTERSGYLADGPASDSSSGPCHGSSSDSVVNCTDISLQGVHGSSSTFCSSLSSDFDPLVYCSPKGDPQRVDMQPSVTSRPRSLDSVVPTGETQVSSHVHYHRHRHHHYKKRFQWHGRKPGPETGVPQSRPPIPRTQPQPEPPSPDQQVTRSNSAAPSGRLSNPQCPRALPEPAPGPVDASSICPSTSSLFNLQKSSLSARHPQRKRRGGPSEPTPGSRPQDATVHPACQIFPHYTPSVAYPWSPEAHPLICGPPGLDKRLLPETPGPCYSNSQPVWLCLTPRQPLEPHPPGEGPSEWSSDTAEGRPCPYPHCQVLSAQPGEFSEGSGCGRERRLQLNISGQVKSANKGLMEAEKDTAEMTTKILNHRDSVSCWLECRNTPPLPGATPLVGRSQGGPREVLVWLRHQKGTWKAGCDGSCL

SEQ ID NO: 6144 - protein, 1237 aa, Homo sapiens
MQKSVRYNEGHALYLAFLARKEGTKRGFLSKKTAEASRWHEKWFALYQNVLFYFEGEQSCRPAGMYLLEGCSCERTPAPPRAGAGQGGVRDALDKQYYFTVLFGHEGQKPLELRCEEEQDGKEWMEAIHQASYADILIEREVLMQKYIHLVQIVETEKIAANQLRHQLEDQDTEIERLKSEIIALNKTKERMRPYQSNQEDEDPDIKKIKKVQSFMRGWLCRRKWKTIVQDYICSPHAESMRKRNQIVFTMVEAESEYVHQLYILVNGFLRPLRMAASSKKPPISHDDVSSIFLNSETIMFLHEIFHQGLKARIANWPTLILADLFDILLPMLNIYQEFVRNHQYSLQVLANCKQNRDFDKLLKQYEANPACEGRMLETFLTYPMFQIPRYIITLHELLAHTPHEHVERKSLEFAKSKLEELSRVMHDEVSDTENIRKNLAIERMIVEGCDILLDTSQTFIRQGSLIQVPSVERGKLSKVRLGSLSLKKEGERQCFLFTKHFLICTRSSGGKLHLLKTGGVLSLIDCTLIEEPDASDDDSKGSGQVFGHLDFKIVVEPPDAAAFTVVLLAPSRQEKAAWMSDISQCVDNIRCNGLMTIVFEENSKVTVPHMIKSDARLHKDDTDICFSKTLNSCKVPQIRYASVERLLERLTDLRFLSIDFLNTFLHTYRIFTTAAVVLGKLSDIYKRPFTSIPVRSLELFFATSQNNRGEHLVDGKSPRLCRKFSSPPPLAVSRTSSPVRARKLSLTSPLNSKIGALDLTTSSSPTTTTQSPAASPPPHTGQIPLDLSRGLSSPEQSPGTVEENVDNPRVDLCNKLKRSIQKAVLESAPADRAGVESSPAADTTELSPCRSPSTPRHLRYRQPGGQTADNAHCSVSPASAFAIATAAAGHGSPPGFNNTERTCDKEFIIRRTATNRVLNVLRHWVSKHAQDFELNNELKMNVLNLLEEVLRDPDLLPQERKAAANILRALSQDDQDDIHLKLEDIIQMTDCMKAECFESLSAMELAEQITLLDHVIFRSIPYEEFLGQGWMKLDKNERTPYIMKTSQHFNDMSNLVASQIMNYADVSSRANAIEKWVAVADICRCLHNYNGVLEITSALNRSAIYRLKKTWAKVSKQTKALMDKLQKTVSSEGRFKNLRETLKNCNPPAVPYLGMYLTDLAFIEEGTPNFTEEGLVNFSKMRMISHIIREIRQFQQTSYRIDHQPKVAQYLLDKDLIIDEDTLYELSLKIEPRLPA

SEQ ID NO: 6145 - protein, 464 aa, Homo sapiens
MAGQDPALSTSHPFYDVARHGILQVAGDDRFGRRVVTFSCCRMPPSHELDHQRLLEYLKYTLDQYVENDYTIVYFHYGLNSRNKPSLGWLQSAYKEFDRKDGDLTMWPRLVSNSKLKRSSHLSLPKYWDYRYKKNLKALYVVHPTSFIKVLWNILKPLISHKFGKKVIYFNYLSELHEHLKYDQLVIPPEVLRYDEKLQSLHEGRTPPPTKTPPPRPPLPTQQFGVSLQYLKDKNQGELIPPVLRFTVTYLREKGLRTEGLFRRSASVQTVREIQRLYNQGKPVNFDDYGDIHIPAVILKTFLRELPQPLLTFQAYEQILGITCVESSLRVTGCRQILRSLPEHNYVVLRYLMGFLHAVSRESIFNKMNSSNLACVFGLNLIWPSQGVSSLSALVPLNMFTELLIEYYEKIFSTPEAPGEHGLAPWEQGSRAAPLQEAVPRTQATGLTKPTLPPSPLMAARRRL

SEQ ID NO: 6146 - protein, 294 aa, Homo sapiens
MAGQDPALSTSHPFYDVARHGILQVAGDDRFGRRVVTFSCCRMPPSHELDHQRLLEYLKYTLDQYVENDYTIVYFHYGLNSRNKPSLGWLQSAYKEFDRKYKKNLKALYVVHPTSFIKVLWNILKPLISHKFGKKVIYFNYLSELHEHLKYDQLVIPPEVLRYDEKLQSLHEGRTPPPTKTPPPRPPLPTQQFGVSLQYLKDKNQGELIPPVLRFTVTYLREKGLRTEGLFRRSASVQTVREIQRLYNQGKPVNFDDYGDIHIPAVILKTFLRELPQPLLTFQAYEQILGITCA

SEQ ID NO: 6147 - protein, 459 aa, Homo sapiens
MAGQDPALSTSHPFYDVARHGILQVAGDDRFGRRVVTFSCCRMPPSHELDHQRLLEYLKYTLDQYVENDYTIVYFHYGLNSRNKPSLGWLQSAYKEFDRKDGDLTMWPRLVSNSKLKRSSHLSLPKYKKNLKALYVVHPTSFIKVLWNILKPLISHKFGKKVIYFNYLSELHEHLKYDQLVIPPEVLRYDEKLQSLHEGRTPPPTKTPPPRPPLPTQQFGVSLQYLKDKNQGELIPPVLRFTVTYLREKGLRTEGLFRRSASVQTVREIQRLYNQGKPVNFDDYGDIHIPAVILKTFLRELPQPLLTFQAYEQILGITCVESSLRVTGCRQILRSLPEHNYVVLRYLMGFLHAVSRESIFNKMNSSNLACVFGLNLIWPSQGVSSLSALVPLNMFTELLIEYYEKIFSTPEAPGEHGLAPWEQGSRAAPLQEAVPRTQATGLTKPTLPPSPLMAARRRL

SEQ ID NO: 6148 - protein, 433 aa, Homo sapiens
MAGQDPALSTSHPFYDVARHGILQVAGDDRFGRRVVTFSCCRMPPSHELDHQRLLEYLKYTLDQYVENDYTIVYFHYGLNSRNKPSLGWLQSAYKEFDRKYKKNLKALYVVHPTSFIKVLWNILKPLISHKFGKKVIYFNYLSELHEHLKYDQLVIPPEVLRYDEKLQSLHEGRTPPPTKTPPPRPPLPTQQFGVSLQYLKDKNQGELIPPVLRFTVTYLREKGLRTEGLFRRSASVQTVREIQRLYNQGKPVNFDDYGDIHIPAVILKTFLRELPQPLLTFQAYEQILGITCVESSLRVTGCRQILRSLPEHNYVVLRYLMGFLHAVSRESIFNKMNSSNLACVFGLNLIWPSQGVSSLSALVPLNMFTELLIEYYEKIFSTPEAPGEHGLAPWEQGSRAAPLQEAVPRTQATGLTKPTLPPSPLMAARRRL

SEQ ID NO: 6149 - protein, 305 aa, Homo sapiens
MAGQDPALSTSHPFYDVARHGILQVAGDDRFGRRVVTFSCCRMPPSHELDHQRLLEYLKYTLDQYVENDYTIVYFHYGLNSRNKPSLGWLQSAYKEFDRKYKKNLKALYVVHPTSFIKVLWNILKPLISHKFGKKVIYFNYLSELHEHLKYDQLVIPPEVLRYDEKLQSLHEGRTPPPTKTPPPRPPLPTQQFGVSLQYLKDKNQGELIPPVLRFTVTYLREKGLRTEGLFRRSASVQTVREIQRLYNQGKPVNFDDYGDIHIPAVILKTFLRELPQPLLTFQAYEQILGITCVPGEHLQQNEQL

SEQ ID NO: 6150 - protein, 786 aa, Homo sapiens
MGLQPLEFSDCYLDSPWFRERIRAHEAELERTNKFIKELIKDGKNLIAATKSLSVAQRKFAHSLRDFKFEFIGDAVTDDERCIDASLREFSNFLKNLEEQREIMALSVTETLIKPLEKFRKEQLGAVKEEKKKFDKETEKNYSLIDKHLNLSAKKKDSHLQEADIQVEQNRQHFYELSLEYVCKLQEIQERKKFEFVEPMLSFFQGMFTFYHQGHELAKDFNHYKMELQINIQNTRNRFEGTRSEVEELMNKIRQNPKDHKRASQFTAEGYLYVQEKRPAPFGSSWVKHYCMYRKAAKKFNMIPFEHRSGGKLGDGEVFFLKECTKRHTDSIDRRFCFDIEAADRPGVSLTMQAFSEEERKQWLEALGGKEALSHSFNTAIIPRPEGNAQLDKMGFTIIRKCISAVETRGINDQGLYRVVGVSSKVQRLLSMLMDVKTCNEVDLENSADWEVKTITSALKQYLRSLPEPLMTYELHGDFIVPAKSGSPESRVNAIHFLVHKLPEKNKEMLDILVKHLTNVSNHSKQNLMTVANLGVVFGPTLMRPQEETVAALMDLKFQNIVVEILIENHEKIFRTPPDTTFPEPTCLSASPPNAPPRQSKRQGQRTKRPVAVYNLCLELEDGDNPYPSKEDTPTSSLDSLSSPSPVTTAVPGPPGPDKNHLLADGGSFGDWASTIPGQTRSSMVQWLNPQSPTTTSSNSAVTPLSPGSSPFPFSPPATVADKPPESIRSRKARAVYPCEAEHSSELSFEIGAIFEDVQTSREPGWLEGTLNGKRGLIPQNYVKLL

SEQ ID NO: 6151 - protein, 190 aa, Homo sapiens
MSTRKRRGGAINSRQAQKRTREATSTPEISLEAEPIELVETAGDEIVDLTCESLEPVVVDLTHNDSVVIVDERRRPRRNARRLPQDHADSCVVSSDDEELSRDRDVYVTTHTPRNARDEGATGLRPSGTVSCPICMDGYSEIVQNGRLIVSTECGHVFCSQCLRDSLKNANTCPTCRKKINHKRYHPIYI

SEQ ID NO: 6152 - protein, 113 aa, Homo sapiens
MSTRKRRGGAINSRQAQKRTREATSTPEISLEAEPIELVETAGDEIVDLTCESLEPVVVDLTHNDSVVIVDGPQVLSVVPSAWTDTQRSCRMDVSSFPQNAAMSSVASASVIP

SEQ ID NO: 6153 - protein, 708 aa, Homo sapiens
MANEEDDPVVQEIDVYLAKSLAEKLYLFQYPVRPASMTYDDIPHLSAKIKPKQQKVELEMAIDTLNPNYCRSKGEQIALNVDGACADETSTYSSKLMDKQTFCSSQTTSNTSRYAAALYRQGELHLTPLHGILQLRPSFSYLDKADAKHREREAANEAGDSSQDEAEDDVKQITVRFSRPESEQARQRRVQSYEFLQKKHAEEPWVHLHYYGLRDSRSEHERQYLLCPGSSGVENTELVKSPSEYLMMLMPPSQEEEKDKPVAPSNVLSMAQLRTLPLADQIKILMKNVKVMPFANLMSLLGPSIDSVAVLRGIQKVAMLVQGNWVVKSDILYPKDSSSPHSGVPAEVLCRGRDFVMWKFTQSRWVVRKEVATVTKLCAEDVKDFLEHMAVVRINKGWEFILPYDGEFIKKHPDVVQRQHMLWTGIQAKLEKVYNLVKETMPKKPDAQSGPAGLVCGDQRIQVAKTKAQQNHALLERELQRRKEQLRVPAVPPGVRIKEEPVSEEGEEDEEQEAEEEPMDTSPSGLHSKLANGLPLGRAAGTDSFNGHPPQGCASTPVARELKAFVEATFQRQFVLTLSELKRLFNLHLASLPPGHTLFSGISDRMLQDTVLAAGCKQILVPFPPQTAASPDEQKVFALWESGDMSDQHRQVLLEIFSKNYRVRRNMIQSRLTQECGEDLSKQEVDKVLKDCCVSYGGMWYLKGTVQS

SEQ ID NO: 6154 - protein, 666 aa, Homo sapiens
MANEEDDPVVQEIDVYLAKSLAEKLYLFQYPVRPASMTYDDIPHLSAKIKPKQQKVELEMAIDTLNPNYCRSKGEQIALNVDGACADETSTYSSKLMDKQTFCSSQTTSNTSRYAAALYRQGELHLTPLHGILQLRPSFSYLDKADAKHREREAANEAGDSSQDEAEDDVKQITVRFSRPESEQARQRRVQSYEFLQKKHAEEPWVHLHYYGLRDSRSEHERQYLLCPGSSGVENTELVKSPSEYLMMLMPPSQEEEKDKPVAPSNVLSMAQLRTLPLADQIKILMKNVKVMPFANLMSLLGPSIDSVAVLRGIQKVAMLVQGNWVVKSDILYPKDSSSPHSGVPAEVLCRGRDFVMWKFTQSRWVVRKEVATVTKLCAEDVKDFLEHMAVVRINKGWEFILPYDGEFIKKHPDVVQRQHMLWTGIQAKLEKVYNLVKETMPKKPDAQSGPAGLVCGDQRIQVAKTKAQQNHALLERELQRRKEQLRVPAVPPGVRIKEEPVSEEGEEDEEQEAEEEPMDTSPSGLHSKLANGLPLGRAAGTDSFNGHPPQGCASTPVARELKAFVEATFQRQFVLTLSELKRLFNLHLASLPPGHTLFSGISDRMLQDTVLAAGCKQILVPFPPQTAASPDEQKVFALWESGDMSDQDCCVSYGGMWYLKGTVQS

SEQ ID NO: 6155 - protein, 654 aa, Homo sapiens
MANEEDDPVVQEIDVYLAKSLAEKLYLFQYPVRPASMTYDDIPHLSAKIKPKQQKVELEMAIDTLNPNYCRSKGEQIALNVDGACADETSTYSSKLMDKQTFCSSQTTSNTSRYAAALYRQGELHLTPLHGILQLRPSFSYLDKADAKHREREAANEAGDSSQDEAEDDVKQITVRFSRPESEQARQRRVQSYEFLQKKHAEEPWVHLHYYGLRDSRSEHERQYLLCPGSSGVENTELVKSPSEYLMMLMPPSQEEEKDKPVAPSNVLSMAQLRTLPLADQIKILMKNVKVMPFANLMSLLGPSIDSVAVLRGIQKVAMLVQGNWVVKSDILYPKDSSSPHSGVPAEVLCRGRDFVMWKFTQSRWVVRKEVATVTKLCAEDVKDFLEHMAVVRINKGWEFILPYDGEFIKKHPDVVQRQHMLWTGIQAKLEKVYNLVKETMPKKPDAQSGPAGLVCGDQRIQVAKTKAQQNHALLERELQRRKEQLRVPAVPPGVRIKEEPVSEEGEEDEEQEAEEEPMDTSPSGLHSKLANGLPLGRAAGTDSFNGHPPQGCASTPVARELKAFVEATFQRQFVLTLSELKRLFNLHLASLPPGHTLFSGISDRMLQDTVLAAGCKQILVPVSRALPARGMGGGGWGEPAVGRPRGDTGGHAW

SEQ ID NO: 6156 - protein, 687 aa, Homo sapiens
MANEEDDPVVQEIDVYLAKSLAEKLYLFQYPVRPASMTYDDIPHLSAKIKPKQQKVELEMAIDTLNPNYCRSKGEQIALNVDGACADETSTYSSKLMDKQTFCSSQTTSNTSRYAAALYRQGELHLTPLHGILQLRPSFSYLDKADAKHREREAANEAGDSSQDEAEDDVKQITVRFSRPESEQARQRRVQSYEFLQKKHAEEPWVHLHYYGLRDSRSEHERQYLLCPGSSGVENTELVKSPSEYLMMLMPPSQEEEKDKPVAPSNVLSMAQLRTLPLADQIKILMKNVKVMPFANLMSLLGPSIDSVAVLRGIQKVAMLVQGNWVVKSDILYPKDSSSPHSGVPAEVLCRGRDFVMWKFTQSRWVVRKEVATVTKLCAEDVKDFLEHMAVVRINKGWEFILPYDGEFIKKHPDVVQRQHMLWTGIQAKLEKVYNLVKETMPKKPDAQSGPAGLVCGDQRIQVAKTKAQQNHALLERELQRRKEQLRVPAVPPGVRIKEEPVSEEGEEDEEQEAEEEPMDTSPSGLHSKLANGLPLGRAAGTDSFNGHPPQGCASTPVARELKAFVEATFQRQFVLTLSELKRLFNLHLASLPPGHTLFSGISDRMLQDTVLAAGCKQILVPFPPQTAASPDEQKVFALWESGDMSDQSRLTQECGEDLSKQEVDKVLKDCCVSYGGMWYLKGTVQS

SEQ ID NO: 6157 - protein, 672 aa, Homo sapiens
MANEEDDPVVQEIKPKQQKVELEMAIDTLNPNYCRSKGEQIALNVDGACADETSTYSSKLMDKQTFCSSQTTSNTSRYAAALYRQGELHLTPLHGILQLRPSFSYLDKADAKHREREAANEAGDSSQDEAEDDVKQITVRFSRPESEQARQRRVQSYEFLQKKHAEEPWVHLHYYGLRDSRSEHERQYLLCPGSSGVENTELVKSPSEYLMMLMPPSQEEEKDKPVAPSNVLSMAQLRTLPLADQIKILMKNVKVMPFANLMSLLGPSIDSVAVLRGIQKVAMLVQGNWVVKSDILYPKDSSSPHSGVPAEVLCRGRDFVMWKFTQSRWVVRKEVATVTKLCAEDVKDFLEHMAVVRINKGWEFILPYDGEFIKKHPDVVQRQHMLWTGIQAKLEKVYNLVKETMPKKPDAQSGPAGLVCGDQRIQVAKTKAQQNHALLERELQRRKEQLRVPAVPPGVRIKEEPVSEEGEEDEEQEAEEEPMDTSPSGLHSKLANGLPLGRAAGTDSFNGHPPQGCASTPVARELKAFVEATFQRQFVLTLSELKRLFNLHLASLPPGHTLFSGISDRMLQDTVLAAGCKQILVPFPPQTAASPDEQKVFALWESGDMSDQHRQVLLEIFSKNYRVRRNMIQSRLTQECGEDLSKQEVDKVLKDCCVSYGGMWYLKGTVQS

SEQ ID NO: 6158 - protein, 180 aa, Homo sapiens
MAAAEEEDGGPEGPNRERGGAGATFECNICLETAREAVVSVCGHLYCWPCLHQWLETRPERQECPVCKAGISREKVVPLYGRGSQKPQDPRLKTPPRPQGQRPAPESRGGFQPFGDTGGFHFSFGVGAFPFGFFTTVFNAHEPFRRGTGVDLGQGHPASSWQDSLFLFLAIFFFFWLLSI

SEQ ID NO: 6159 - protein, 1720 aa, Homo sapiens
MLISKNMPWRRLQGISFGMYSAEELKKLSVKSITNPRYLDSLGNPSANGLYDLALGPADSKEVCSTCVQDFSNCSGHLGHIELPLTVYNPLLFDKLYLLLRGSCLNCHMLTCPRAVIHLLLCQLRVLEVGALQAVYELERILNRFLEENPDPSASEIREELEQYTTEIVQNNLLGSQGAHVKNVCESKSKLIALFWKAHMNAKRCPHCKTGRSVVRKEHNSKLTITFPAMVHRTAGQKDSEPLGIEEAQIGKRGYLTPTSAREHLSALWKNEGFFLNYLFSGMDDDGMESRFNPSVFFLDFLVVPPSRYRPVSRLGDQMFTNGQTVNLQAVMKDVVLIRKLLALMAQEQKLPEEVATPTTDEEKDSLIAIDRSFLSTLPGQSLIDKLYNIWIRLQSHVNIVFDSEMDKLMMDKYPGIRQILEKKEGLFRKHMMGKRVDYAARSVICPDMYINTNEIGIPMVFATKLTYPQPVTPWNVQELRQAVINGPNVHPGASMVINEDGSRTALSAVDMTQREAVAKQLLTPATGAPKPQGTKIVCRHVKNGDILLLNRQPTLHRPSIQAHRARILPEEKVLRLHYANCKAYNADFDGDEMNAHFPQSELGRAEAYVLACTDQQYLVPKDGQPLAGLIQDHMVSGASMTTRGCFFTREHYMELVYRGLTDKVGRVKLLSPSILKPFPLWTGKQVVSTLLINIIPEDHIPLNLSGKAKITGKAWVKETPRSVPGFNPDSMCESQVIIREGELLCGVLDKAHYGSSAYGLVHCCYEIYGGETSGKVLTCLARLFTAYLQLYRGFTLGVEDILVKPKADVKRQRIIEESTHCGPQAVRAALNLPEAASYDEVRGKWQDAHLGKDQRDFNMIDLKFKEEVNHYSNEINKACMPFGLHRQFPENSLQMMVQSGAKGSTVNTMQISCLLGQIELEGRRPPLMASGKSLPCFEPYEFTPRAGGFVTGRFLTGIKPPEFFFHCMAGREGLVDTAVKTSRSGYLQRCIIKHLEGLVVQYDLTVRDSDGSVVQFLYGEDGLDIPKTQFLQPKQFPFLASNYEVIMKSQHLHEVLSRADPKKALHHFRAIKKWQSKHPNTLLRRGAFLSYSQKIQEAVKALKLESENRNGRSPGTQEMLRMWYELDEESRRKYQKKAAACPDPSLSVWRPDIYFASVSETFETKVDDYSQEWAAQTEKSYEKSELSLDRLRTLLQLKWQRSLCEPGEAVGLLAAQSIGEPSTQMTLNTFHFAGRGEMNVTLGIPRLREILMVASANIKTPMMSVPVLNTKKALKRVKSLKKQLTRVCLGEVLQKIDVQESFCMEEKQNKFQVYQLRFQFLPHAYYQQEKCLRPEDILRFMETRFFKLLMESIKKKNNKASAFRNVNTRRATQRDLDNAGELGRSRGEQEGDEEEEGHIVDAEAEEGDADASDAKRKEKQEEEVDYESEEEEEREGEENDDEDMQEERNPHREGARKTQEQDEEVGLGTEEDPSLPALLTQPRKPTHSQEPQGPEAMERRVQAVREIHPFIDDYQYDTEESLWCQVTVKLPLMKINFDMSSLVVSLAHGAVIYATKGITRCLLNETTNNKNEKELVLNTEGINLPELFKYAEVLDLRRLYSNDIHAIANTYGIEAALRVIEKEIKDVFAVYGIAVDPRHLSLVADYMCFEGVYKPLNRFGIRSNSSPLQQMTFETSFQFLKQATMLGSHDELRSPSACLVVGKVVRGGTGLFELKQPLR

SEQ ID NO: 6160 - protein, 685 aa, Homo sapiens [sequence omitted]

SEQ ID NO: 6161 - protein, 329 aa, Homo sapiens
MQLEVDKMGTKLGELLVSRITVEEGEESSRSSTAVRRHPTITLDLQVRRIRPGENRDRDSIANRTRSRVGLAENTVTIESNSGGFRRTISRLERSGIRTYVSTITVPLRRISENELVEPSSVALRSILRQIMTGFGELSSLMEADSESELQRNGQHLPDMHSELSNLGTDNNRSQHREGSSQDRQAQGDSTEMHGENETTQPHTRNSDSRGGRQLRNPNNLVETGTLPILRLAHFFLLNESDDDDRIRGLTKEQIDNLSTRHYEHNSIDSELGKICSVCISDYVTGNKLRQLPCMHEFHIHCIDRWLSENCTCPICRQPVLGSNIANNG

SEQ ID NO: 6162 - protein, 142 aa, Homo sapiens
MNQSRSRSDGGSEETLPQDHNHHENERRWQQERLHREEAYYQFINELNDEDYRLMRDHNLLGTPGEITSEELQQRLDGVKEQLASQPDLRDGTNYRDSEVPRESSHEDSLLEWLNTFRRTGNATRSGQNGNQTWRAALPDTS

SEQ ID NO: 6163 - protein, 158 aa, Homo sapiens
MAARSVSGITRRVFMWTVSGTPCREFWSRFRKEKEPVVVETVEEKKEPILVCPPLRSRAYTPPEDLQSRLESYVKEVFGSSLPSNWQDISLEDSRLKFNLLAHLADDLGHVVPNSRLHQMCRVRDVLDFYNVPIQDRSKFDELSASNLPPNLKITWSY

SEQ ID NO: 6164 - protein, 135 aa, Homo sapiens
MAARSVSGITRRVFMWTVSGTPCREFWSRFRKEKEPVVVETVEEKKEPILVCPPLRSRAYTPPEDLQSRLESYVKEVFGSSLPSNWQDISLEDSRLKFNLLAHLADDLGHVVPNSRLHQMCRGYSFEEGKIQLGI

SEQ ID NO: 6165 - protein, 316 aa, Homo sapiens
MAEVKVKVQPPDADPVEIENRIIELCHQFPHGITDQVIQNEMPHIEAQQRAVAINRLLSMGQLDLLRSNTGLLYRIKDSQNAGKMKGSDNQEKLVYQIIEDAGNKGIWSRDIRYKSNLPLTEINKILKNLESKKLIKAVKSVAASKKKVYMLYNLQPDRSVTGGAWYSDQDFESEFVEVLNQQCFKFLQSKAETARESKQNPMIQRNSSFASSHEVWKYICELGISKVELSMEDIETILNTLIYDGKVEMTIIAAKEGTVGSVDGHMKLYRAVNPIIPPTGLVRAPCGLCPVFDDCHEGGEISPSNCIYMTEWLEF

SEQ ID NO: 6166 - protein, 218 aa, Homo sapiens
MASRGGGRGRGRGQLTFNVEAVGIGKGDALPPPTLQPSPLFPPLEFRPVPLPSGEEGEYVLALKQELRGAMRQLPYFIRPAVPKRDVERYSDKYQMSGPIDNAIDWNPDWRRLPRELKIRVRKLQKERITILLPKRPPKTTEDKEETIQKLETLEKKEEEVTSEEDEEKEEEEEKEEEEEEEYDEEEHEEETDYIMSYFDNGEDFGGDSDDNMDEAIY

SEQ ID NO: 6167 - protein, 128 aa, Homo sapiens
MAGNLLSGAGRRLWDWVPLACRSFSLGVPRLIGIRLTLPPPKVVDRWNEKRAMFGVYDNIGILGNFEKHPKELIRGPIWLRGWKGNELQRCIRKRKMVGSRMFADDLHNLNKRIRYLYKHFNRHGKFR

SEQ ID NO: 6168 - protein, 485 aa, Homo sapiens
MGEPGFFVTGDRAGGRSWCLRRVGMSAGWLLLEDGCEVTVGRGFGVTYQLVSKICPLMISRNHCVLKQNPEGQWTIMDNKSLNGVWLNRARLEPLRVYSIHQGDYIQLGVPLENKENAEYEYEVTEEDWETIYPCLSPKNDQMIEKNKELRTKRKFSLDELAGPGAEGPSNLKSKINKVSCESGQPVKSQGKGEVASTPSDNLDPKLTALEPSKTTGAPIYPGFPKVTEVHHEQKASNSSASQRSLQMFKVTMSRILRLKIQMQEKHEAVMNVKKQTQKGNSKKVVQMEQELQDLQSQLCAEQAQQQARVEQLEKTFQEEEQHLQGLEIAQGEKDLKQQLAQALQEHWALMEELNRSKKDFEAIIQAKNKELEQTKEEKEKMQAQKEEVLSHMNDVLENELQCIICSEYFIEAVTLNCAHSFCSYCINEWMKRKIECPICRKDIKSKTYSLVLDNCINKMVNNLSSEVKERRIVLIRERKAKRLF

SEQ ID NO: 6169 - protein, 98 aa, Homo sapiens
MGEPGFFVTGDRAGGRSWCLRRVGMSAGWLLLEDGCEVTVGRGFGVTYQLVSKICPLMISRNHCVLKQNPEGQWTIMDNKSFPSEKAEDFTAAGERFL

SEQ ID NO: 6170 - protein, 448 aa, Homo sapiens
MGEPGFFVTGDRAGGRSWCLRRVGMSAGWLLLEDGCEVTVGRGFGVTYQLVSKICPLMISRNHCVLKQNPEGQWTIMDNKSLNGVWLNRARLEPLRVYSIHQGDYIQLGVPLENKENAEYEYEVTEEDWETIYPCLSPKNDQMIEKNKELRTKRKFSLDELAGPGAEGPSNLKSKINKVSCESGQPVKSQGKGEVASTPSDNLDPKLTALEPSKTTGAPIYPGFPKVTEVHHEQKASNSSASQRSLQMFKVTMSRILRLKIQMQEKHEAVMNVKKQTQKGNSKKVVQMEQELQDLQSQLCAEQAQQQARVEQLEKTFQEEEQHLQGLEIAQGEKDLKQQLAQALQEHWALMEELNRSKKDFEAIIQAKNKELEQTKEEKEKMQAQKEEVLSHMNDVLENELQCIICSEYFIEQRDCSEDRALRAFERLPGSASLRWSGGFSLAVTPLL

SEQ ID NO: 6171 - protein, 223 aa, Homo sapiens
MAGNKGRGRAAYTFNIEAVGFSKGEKLPDVVLKPPPLFPDTDYKPVPLKTGEGEEYMLALKQELRETMKRMPYFIETPEERQDIERYSKRYMKVYKEEWIPDWRRLPREMMPRNKCKKAGPKPKKAKDAGKGTPLTNTEDVLKKMEELEKRGDGEKSDEENEEKEGSKEKSKEGDDDDDDDAAEQEEYDEEEQEEENDYINSYFEDGDDFGADSDDNMDEATY

SEQ ID NO: 6172 - protein, 1135 aa, Homo sapiens
MDPGSRWRNLPSGPSLKHLTDPSYGIPREQQKAALQELTRAHVESFNYAVHEGLGLAVQAIPPFEFAFKDERISFTILDAVISPPTVPKGTICKEANVYPAECRGRRSTYRGKLTADINWAVNGISKGIIKQFLGYVPIMVKSKLCNLRNLPPQALIEHHEEAEEMGGYFIINGIEKVIRMLIMPRRNFPIAMIRPKWKTRGPGYTQYGVSMHCVREEHSAVNMNLHYLENGTVMLNFIYRKELFFLPLGFALKALVSFSDYQIFQELIKGKEDDSFLRNSVSQMLRIVMEEGCSTQKQVLNYLGECFRVKLNVPDWYPNEQAAEFLFNQCICIHLKSNTEKFYMLCLMTRKLFALAKGECMEDNPDSLVNQEVLTPGQLFLMFLKEKLEGWLVSIKIAFDKKAQKTSVSMNTDNLMRIFTMGIDLTKPFEYLFATGNLRSKTGLGLLQDSGLCVVADKLNFIRYLSHFRCVHRGADFAKMRTTTVRRLLPESWGFLCPVHTPDGEPCGLMNHLTAVCEVVTQFVYTASIPALLCNLGVTPIDGAPHRSYSECYPVLLDGVMVGWVDKDLAPGIADSLRHFKVLREKRIPPWMEVVLIPMTGKPSLYPGLFLFTTPCRLVRPVQNLALGKEELIGTMEQIFMNVAIFEDEVFAGVTTHQELFPHSLLSVIANFIPFSDHNQSPRNMYQCQMGKQTMGFPLLTYQDRSDNKLYRLQTPQSPLVRPSMYDYYDMDNYPIGTNAIVAVISYTGYDMEDAMIVNKASWERGFAHGSVYKSEFIDLSEKIKQGDSSLVFGIKPGDPRVLQKLDDDGLPFIGAKLQYGDPYYSYLNLNTGESFVMYYKSKENCVVDNIKVCSNDTGSGKFKCVCITMRVPRNPTIGDKFASRHGQKGILSRLWPAEDMPFTESGMVPDILFNPHGFPSRMTIGMLIESMAGKSAALHGLCHDATPFIFSEENSALEYFGEMLKAAGYNFYGTERLYSGISGLELEADIFIGVVYYQRLRHMVSDKFQVRTTGARDRVTNQPIGGRNVQGGIRFGEMERDALLAHGTSFLLHDRLFNCSDRSVAHVCVKCGSLLSPLLEKPPPSWSAMRNRKYNCTLCSRSDTIDTVSVPYVFRYFVAELAAMNIKVKLDVV

SEQ ID NO: 6173 - protein, 1079 aa, Homo sapiens
MDPGSRWRNLPSGPSLKHLTDPSYGIPREQQKAALQELTRAHVESFNYAVHEGLGLAVQADINWAVNGISKGIIKQFLGYVPIMVKSKLCNLRNLPPQALIEHHEEAEEMGGYFIINGIEKVIRMLIMPRRNFPIAMIRPKWKTRGPGYTQYGVSMHCVREEHSAVNMNLHYLENGTVMLNFIYRKELFFLPLGFALKALVSFSDYQIFQELIKGKEDDSFLRNSVSQMLRIVMEEGCSTQKQVLNYLGECFRVKLNVPDWYPNEQAAEFLFNQCICIHLKSNTEKFYMLCLMTRKLFALAKGECMEDNPDSLVNQEVLTPGQLFLMFLKEKLEGWLVSIKIAFDKKAQKTSVSMNTDNLMRIFTMGIDLTKPFEYLFATGNLRSKTGLGLLQDSGLCVVADKLNFIRYLSHFRCVHRGADFAKMRTTTVRRLLPESWGFLCPVHTPDGEPCGLMNHLTAVCEVVTQFVYTASIPALLCNLGVTPIDGAPHRSYSECYPVLLDGVMVGWVDKDLAPGIADSLRHFKVLREKRIPPWMEVVLIPMTGKPSLYPGLFLFTTPCRLVRPVQNLALGKEELIGTMEQIFMNVAIFEDEVFAGVTTHQELFPHSLLSVIANFIPFSDHNQSPRNMYQCQMGKQTMGFPLLTYQDRSDNKLYRLQTPQSPLVRPSMYDYYDMDNYPIGTNAIVAVISYTGYDMEDAMIVNKASWERGFAHGSVYKSEFIDLSEKIKQGDSSLVFGIKPGDPRVLQKLDDDGLPFIGAKLQYGDPYYSYLNLNTGESFVMYYKSKENCVVDNIKVCSNDTGSGKFKCVCITMRVPRNPTIGDKFASRHGQKGILSRLWPAEDMPFTESGMVPDILFNPHGFPSRMTIGMLIESMAGKSAALHGLCHDATPFIFSEENSALEYFGEMLKAAGYNFYGTERLYSGISGLELEADIFIGVVYYQRLRHMVSDKFQVRTTGARDRVTNQPIGGRNVQGGIRFGEMERDALLAHGTSFLLHDRLFNCSDRSVAHVCVKCGSLLSPLLEKPPPSWSAMRNRKYNCTLCSRSDTIDTVSVPYVFRYFVAELAAMNIKVKLDVV

SEQ ID NO: 6174 - protein, 1173 aa, Homo sapiens
MRAKEAAETGLRPLLPACTERLASGVYRETGVRCAGGHMDPGSRWRNLPSGPSLKHLTDPSYGIPREQQKAALQELTRAHVESFNYAVHEGLGLAVQAIPPFEFAFKDERISFTILDAVISPPTVPKGTICKEANVYPAECRGRRSTYRGKLTADINWAVNGISKGIIKQFLGYVPIMVKSKLCNLRNLPPQALIEHHEEAEEMGGYFIINGIEKVIRMLIMPRRNFPIAMIRPKWKTRGPGYTQYGVSMHCVREEHSAVNMNLHYLENGTVMLNFIYRKELFFLPLGFALKALVSFSDYQIFQELIKGKEDDSFLRNSVSQMLRIVMEEGCSTQKQVLNYLGECFRVKLNVPDWYPNEQAAEFLFNQCICIHLKSNTEKFYMLCLMTRKLFALAKGECMEDNPDSLVNQEVLTPGQLFLMFLKEKLEGWLVSIKIAFDKKAQKTSVSMNTDNLMRIFTMGIDLTKPFEYLFATGNLRSKTGLGLLQDSGLCVVADKLNFIRYLSHFRCVHRGADFAKMRTTTVRRLLPESWGFLCPVHTPDGEPCGLMNHLTAVCEVVTQFVYTASIPALLCNLGVTPIDGAPHRSYSECYPVLLDGVMVGWVDKDLAPGIADSLRHFKVLREKRIPPWMEVVLIPMTGKPSLYPGLFLFTTPCRLVRPVQNLALGKEELIGTMEQIFMNVAIFEDEVFAGVTTHQELFPHSLLSVIANFIPFSDHNQSPRNMYQCQMGKQTMGFPLLTYQDRSDNKLYRLQTPQSPLVRPSMYDYYDMDNYPIGTNAIVAVISYTGYDMEDAMIVNKASWERGFAHGSVYKSEFIDLSEKIKQGDSSLVFGIKPGDPRVLQKLDDDGLPFIGAKLQYGDPYYSYLNLNTGESFVMYYKSKENCVVDNIKVCSNDTGSGKFKCVCITMRVPRNPTIGDKFASRHGQKGILSRLWPAEDMPFTESGMVPDILFNPHGFPSRMTIGMLIESMAGKSAALHGLCHDATPFIFSEENSALEYFGEMLKAAGYNFYGTERLYSGISGLELEADIFIGVVYYQRLRHMVSDKFQVRTTGARDRVTNQPIGGRNVQGGIRFGEMERDALLAHGTSFLLHDRLFNCSDRSVAHVCVKCGSLLSPLLEKPPPSWSAMRNRKYNCTLCSRSDTIDTVSVPYVFRYFVAELAAMNIKVKLDVV

SEQ ID NO: 6175 - protein, 924 aa, Homo sapiens
MHCVREEHSAVNMNLHYLENGTVMLNFIYRKELFFLPLGFALKALVSFSDYQIFQELIKGKEDDSFLRNSVSQMLRIVMEEGCSTQKQVLNYLGECFRVKLNVPDWYPNEQAAEFLFNQCICIHLKSNTEKFYMLCLMTRKLFALAKGECMEDNPDSLVNQEVLTPGQLFLMFLKEKLEGWLVSIKIAFDKKAQKTSVSMNTDNLMRIFTMGIDLTKPFEYLFATGNLRSKTGLGLLQDSGLCVVADKLNFIRYLSHFRCVHRGADFAKMRTTTVRRLLPESWGFLCPVHTPDGEPCGLMNHLTAVCEVVTQFVYTASIPALLCNLGVTPIDGAPHRSYSECYPVLLDGVMVGWVDKDLAPGIADSLRHFKVLREKRIPPWMEVVLIPMTGKPSLYPGLFLFTTPCRLVRPVQNLALGKEELIGTMEQIFMNVAIFEDEVFAGVTTHQELFPHSLLSVIANFIPFSDHNQSPRNMYQCQMGKQTMGFPLLTYQDRSDNKLYRLQTPQSPLVRPSMYDYYDMDNYPIGTNAIVAVISYTGYDMEDAMIVNKASWERGFAHGSVYKSEFIDLSEKIKQGDSSLVFGIKPGDPRVLQKLDDDGLPFIGAKLQYGDPYYSYLNLNTGESFVMYYKSKENCVVDNIKVCSNDTGSGKFKCVCITMRVPRNPTIGDKFASRHGQKGILSRLWPAEDMPFTESGMVPDILFNPHGFPSRMTIGMLIESMAGKSAALHGLCHDATPFIFSEENSALEYFGEMLKAAGYNFYGTERLYSGISGLELEADIFIGVVYYQRLRHMVSDKFQVRTTGARDRVTNQPIGGRNVQGGIRFGEMERDALLAHGTSFLLHDRLFNCSDRSVAHVCVKCGSLLSPLLEKPPPSWSAMRNRKYNCTLCSRSDTIDTVSVPYVFRYFVAELAAMNIKVKLDVV

SEQ ID NO: 6176 - protein, 952 aa, Homo sapiens
MDPGSRWRNLPSGPSLKHLTDPSYGIPREQQKAALQELTRAHVESFNYAVHEGLGLAVQAIPPFEFAFKDERISFTILDAVISPPTVPKGTICKEANVYPAECRGRRSTYRGKLTADINWAVNGISKGIIKQFLGYVPIMVKSKLCNLRNLPPQALIEHHEEAEEMGGYFIINGIEKVIRMLIMPRRNFPIAMIRPKWKTRGPGYTQYGVSMHCVREEHSAVNMNLHYLENGTVMLNFIYRKELFFLPLGFALKALVSFSDYQIFQELIKGKEDDSFLRNSVSQMLRIVMEEGCSTQKQVLNYLGECFRVKLNVPDWYPNEQAAEFLFNQCICIHLKSNTEKFYMLCLMTRKLFALAKGECMEDNPDSLVNQEVLTPGQLFLMFLKGSLPLMELPTDHTVLREKRIPPWMEVVLIPMTGKPSLYPGLFLFTTPCRLVRPVQNLALGKEELIGTMEQIFMNVAIFEDEVFAGVTTHQELFPHSLLSVIANFIPFSDHNQSPRNMYQCQMGKQTMGFPLLTYQDRSDNKLYRLQTPQSPLVRPSMYDYYDMDNYPIGTNAIVAVISYTGYDMEDAMIVNKASWERGFAHGSVYKSEFIDLSEKIKQGDSSLVFGIKPGDPRVLQKLDDDGLPFIGAKLQYGDPYYSYLNLNTGESFVMYYKSKENCVVDNIKVCSNDTGSGKFKCVCITMRVPRNPTIGDKFASRHGQKGILSRLWPAEDMPFTESGMVPDILFNPHGFPSRMTIGMLIESMAGKSAALHGLCHDATPFIFSEENSALEYFGEMLKAAGYNFYGTERLYSGISGLELEADIFIGVVYYQRLRHMVSDKFQVRTTGARDRVTNQPIGGRNVQGGIRFGEMERDALLAHGTSFLLHDRLFNCSDRSVAHVCVKCGSLLSPLLEKPPPSWSAMRNRKYNCTLCSRSDTIDTVSVPYVFRYFVAELAAMNIKVKLDVV

SEQ ID NO: 6177 - protein, 123 aa, Homo sapiens
MAALGTVLFTGVRRLHCSVAAWAGGQWRLQQGLAANPSGYGPLTELPDWSYADGRPAPPMKGQLRRKAERETFARRVVLLSQEMDAGLQAWQLRQQKLQEEQRKQENALKPKGASLKSPLPSQ

SEQ ID NO: 6178 - protein, 64 aa, Homo sapiens
MKGQLRRKAERETFARRVVLLSQEMDAGLQAWQLRQQKLQEEQRKQENALKPKGASLKSPLPSQ

SEQ ID NO: 6179 - protein, 122 aa, Homo sapiens
MAALGTVLFSVRRLHCSVAAWAGGQWRLQQGLAANPSGYGPLTELPDWSYADGRPAPPMKGQLRRKAERETFARRVVLLSQEMDAGLQAWQLRQQKLQEEQRKQENALKPKGASLKSPLPSQ

SEQ ID NO: 6180 - protein, 87 aa, Homo sapiens
MAALGTVLFTGVRRLHCSVAAWAGGQWRLQQGLAANPSGYGPLTELPDWSYAETSCTAVTGNGRWITSMAAQAAEVAGRTKEAGKCS

SEQ ID NO: 6181 - protein, 204 aa, Homo sapiens
MFVLVEMVDTVRIPPWQFERKLNDSIAEELNKKLANKVVYNVGLCICLFDITKLEDAYVFPGDGASHTKVHFRCVVFHPFLDEILIGKIKGCSPEGVHVSLGFFDDILIPPESLQQPAKFDEAEQVWVWEYETEEGAHDLYMDTGEEIRFRVVDESFVDTSPTGPSSADATTSSEELPKKEAPYTLVGSISEPGLGLLSWWTSN

SEQ ID NO: 6182 - protein, 175 aa, Homo sapiens
MFVLVEMVDTVRIPPWQFERKLNDSIAEELNKKLANKVVYNVGLCICLFDITKLEDAYVFPGDGASHTKVSLGFFDDILIPPESLQQPAKFDEAEQVWVWEYETEEGAHDLYMDTGEEIRFRVVDESFVDTSPTGPSSADATTSSEELPKKEAPYTLVGSISEPGLGLLSWWTSN

SEQ ID NO: 6183 - protein, 112 aa, Homo sapiens
MAAALARLGLRPVKQVRVQFCPFEKNVESTRTFLQTVSSEKVRSTNLNCSVIADVRHDGSEPCVDVLFGDGHRLIMRGAHLTALEMLTAFASHIRARDAAGSGDKPGADTGR

SEQ ID NO: 6184 - protein, 138 aa, Homo sapiens
MATKRLFGATRTWAGWGAWELLNPATSGRLLARDYAKKPVMKGAKSGKGAVTSEALKDPDVCTDPVQLTTYAMGVNIYKEGQDVPLKPDAEYPEWLFEMNLGPPKTLEELDPESREYWRRLRKQNIWRHNRLSKNKRL

SEQ ID NO: 6185 - protein, 510 aa, Homo sapiens
MEEPQAGDAARFSCPPNFTAKPPASESPRFSLEALTGPDTELWLIQAPADFAPECFNGRHVPLSGSQIVKGKLAGKRHRYRVLSSCPQAGEATLLAPSTEAGGGLTCASAPQGTLRILEGPQQSLSGSPLQPIPASPPPQIPPGLRPRFCAFGGNPPVTGPRSALAPNLLTSGKKKKEMQVTEAPVTQEAVNGHGALEVDMALGSPEMDVRKKKKKKNQQLKEPEAAGPVGTEPTVETLEPLGVLFPSTTKKRKKPKGKETFEPEDKTVKQEQINTEPLEDTVLSPTKKRKRQKGTEGMEPEEGVTVESQPQVKVEPLEEAIPLPPTKKRKKEKGQMAMMEPGTEAMEPVEPEMKPLESPGGTMAPQQPEGAKPQAQAALAAPKKKTKKEKQQDATVEPETEVVGPELPDDLEPQAAPTSTKKKKKKKERGHTVTEPIQPLEPELPGEGQPEARATPGSTKKRKKQSQESRMPETVPQEEMPGPPLNSESGEEAPTGRDKKRKQQQQQPV

SEQ ID NO: 6186 - protein, 512 aa, Homo sapiens
MEEPQAGGEDAARFSCPPNFTAKPPASESPRFSLEALTGPDTELWLIQAPADFAPECFNGRHVPLSGSQIVKGKLAGKRHRYRVLSSCPQAGEATLLAPSTEAGGGLTCASAPQGTLRILEGPQQSLSGSPLQPIPASPPPQIPPGLRPRFCAFGGNPPVTGPRSALAPNLLTSGKKKKEMQVTEAPVTQEAVNGHGALEVDMALGSPEMDVRKKKKKKNQQLKEPEAAGPVGTEPTVETLEPLGVLFPSTTKKRKKPKGKETFEPEDKTVKQEQINTEPLEDTVLSPTKKRKRQKGTEGMEPEEGVTVESQPQVKVEPLEEAIPLPPTKKRKKEKGQMAMMEPGTEAMEPVEPEMKPLESPGGTMAPQQPEGAKPQAQAALAAPKKKTKKEKQQDATVEPETEVVGPELPDDLEPQAAPTSTKKKKKKKERGHTVTEPIQPLEPELPGEGQPEARATPGSTKKRKKQSQESRMPETVPQEEMPGPPLNSESGEEAPTGRDKKRKQQQQQPV

SEQ ID NO: 6187 - protein, 128 aa, Homo sapiens
MAAVGSLLGRLRQSTVKATGPALRRLHTSSWRADSSRASLTRVHRQAYARLYPVLLVKQDGSTIHIRYREPRRMLAMPIDLDTLSPEERRARLRKREAQLQSRKEYEQELSDDLHVERYRQFWTRTKK

SEQ ID NO: 6188 - protein, 164 aa, Homo sapiens
MAAVGSLLGLAASSWLGGQNASDHSLWLLRKPRGSSCPGTGHQLCRLRQSTVKATGPALRRLHTSSWRADSSRASLTRVHRQAYARLYPVLLVKQDGSTIHIRYREPRRMLAMPIDLDTLSPEERRARLRKREAQLQSRKEYEQELSDDLHVERYRQFWTRTKK

SEQ ID NO: 6189 - protein, 1264 aa, Homo sapiens
MPEKRLTAEPPTITEEEFEDSLATDDFLVDYFNEFLSLPTFSEAIRFNADYGVFEVANDAPQFLEKQLKKILQNQQPRNPIYDVVRKGKNEVKPVQMNAPDEDETINVNYNIMCLSREEGIKWIKKERLPAFLESDCYFEYRLAKLVSQVRWSKSGMNFTVGSNFSPWIVKKPPSLPPPATEEDNLVIMKKFYVSLGEASYTQTKDWFALAKQSQQTVSTFSLPCCVPYNKLKSPAISSVSENFIFDDGVHPRTKKDPSKTNKLISEFEEEEGEEEEVSVSLQDTPSQALLRVYLEKKQDVDESLTMHFSTCEEFLSSYIYFILRGAIQQIVGKPVGETPDYINFNNITKVSFDDCFESIHGKNFLSELVQTTKERSEEIEQTSLSSKNESAGPESRADWCISHRTYDIGNRKEFERFKKFIKGTLGERYWWLWMDIERLKVLKDPGRHQRHLEKMKKCYLVSNGDYYLSAEILSKFKLLDGSQWNEEHLRNIQSEVLKPLLLYWAPRFCVTHSASTKYASAELKFWHLRQAKPRKDIDPFPQMATLLPLRPKSCIPQIPEIQKEEFSLSQPPKSPNKSPEVKTATQKPWKRELLYPGSSKDDVIEKGSKYMSESSKVIHLTSFTDISECLKPQLDRRYAYTEEPRVKTVSDVGALGGSDMENLLQSLYVENRAGFFFTKFCEHSGNKLWKNSVYFWFDLQAYHQLFYQETLQPFKVCKQAQYLFATYVAPSATLDIGLQQEKKKEIYMKIQPPFEDLFDTAEEYILLLLLEPWTKMVKSDQIAYKKVELVEETRQLDSTYFRKLQALHKETFSKKAEDTTCEIGTGILSLSNVSKRTEYWDNVPAEYKHFKFSDLLNNKLEFEHFRQFLETHSSSMDLMCWTDIEQFRRITYRDRNQRKAKSIYIKNKYLNKKYFFGPNSPASLYQQNQVMHLSGGWGKILHEQLDAPVLVEIQKHVQNRLENVWLPLFLASEQFAARQKIKVQMKDIAEELLLQKAEKKIGVWKPVESKWISSSCKIIAFRKALLNPVTSRQFQRFVALKGDLLENGLLFWQEVQKYKDLCHSHCDESVIQKKITTIINCFINSSIPPALQIDIPVEQAQKIIEHRKELGPYVFREAQMTIFGVLFKFWPQFCEFRKNLTDENIMSVLERRQEYNKQKKKLAVLEDEKSGKDGIKQYANTSVPAIKTALLSDSFLGLQPYGRQPTWCYSKYIEALEQERILLKIQEELEKKLFAGLQPLTNFKASSSTMSLKKNMSAHSSQK

SEQ ID NO: 6190 - protein, 504 aa, Homo sapiens
MPEKRLTAEPPTITEEEFEDSLATDDFLVDYFNEFLSLPTFSEAIRFNADYGVFEVANDAPQFLEKQLKKILQNQQPRNPIYDVVRKGKNEVKPVQMNAPDEDETINVNYNIMCLSREEGIKWIKKERLPAFLESDCYFEYRLAKLVSQVRWSKSGMNFTVGSNFSPWIVKKPPSLPPPATEEDNLVIMKKFYVSLGEASYTQTKDWFALAKQSQQTVSTFSLPCCVPYNKLKSPAISSVSENFIFDDGVHPRTKKDPSKTNKLISEFEEEEGEEEEVSVSLQDTPSQALLRVYLEKKQDVDESLTMHFSTCEEFLSSYIYFILRGAIQQIVGKPVGETPDYINFNNITKVSFDDCFESIHGKNFLSELVQTTKERSEEIEQTSLSSKNESAGPESRADWCISHRTYDIGNRKEFERFKKFIKGTLGERYWWLWMDIERLKVLKDPGRHQRHLEKMKKCYLVSNGDYYLSAEILSKFKLLDGSQWNEEHLRNIQSEVLKPLLLY

SEQ ID NO: 6191 - protein, 1252 aa, Homo sapiens
MPEKRLTAEPPTITEEEFEDSLATDDFLVDYFNEFLSLPTFSEAIRFNADYGVFEVANDAPQFLEKQLKKILQNQQPRNPIYDVVRKGKNEVKPVQMNAPDEDETINVNYNIMCLSREEGIKWIKKERLPAFLESDCYFEYRLAKLVSQVRWSKSGMNFTVGSNFSPWIVKKPPSLPPPATEEDNLASYTQTKDWFALAKQSQQTVSTFSLPCCVPYNKLKSPAISSVSENFIFDDGVHPRTKKDPSKTNKLISEFEEEEGEEEEVSVSLQDTPSQALLRVYLEKKQDVDESLTMHFSTCEEFLSSYIYFILRGAIQQIVGKPVGETPDYINFNNITKVSFDDCFESIHGKNFLSELVQTTKERSEEIEQTSLSSKNESAGPESRADWCISHRTYDIGNRKEFERFKKFIKGTLGERYWWLWMDIERLKVLKDPGRHQRHLEKMKKCYLVSNGDYYLSAEILSKFKLLDGSQWNEEHLRNIQSEVLKPLLLYWAPRFCVTHSASTKYASAELKFWHLRQAKPRKDIDPFPQMATLLPLRPKSCIPQIPEIQKEEFSLSQPPKSPNKSPEVKTATQKPWKRELLYPGSSKDDVIEKGSKYMSESSKVIHLTSFTDISECLKPQLDRRYAYTEEPRVKTVSDVGALGGSDMENLLQSLYVENRAGFFFTKFCEHSGNKLWKNSVYFWFDLQAYHQLFYQETLQPFKVCKQAQYLFATYVAPSATLDIGLQQEKKKEIYMKIQPPFEDLFDTAEEYILLLLLEPWTKMVKSDQIAYKKVELVEETRQLDSTYFRKLQALHKETFSKKAEDTTCEIGTGILSLSNVSKRTEYWDNVPAEYKHFKFSDLLNNKLEFEHFRQFLETHSSSMDLMCWTDIEQFRRITYRDRNQRKAKSIYIKNKYLNKKYFFGPNSPASLYQQNQVMHLSGGWGKILHEQLDAPVLVEIQKHVQNRLENVWLPLFLASEQFAARQKIKVQMKDIAEELLLQKAEKKIGVWKPVESKWISSSCKIIAFRKALLNPVTSRQFQRFVALKGDLLENGLLFWQEVQKYKDLCHSHCDESVIQKKITTIINCFINSSIPPALQIDIPVEQAQKIIEHRKELGPYVFREAQMTIFGVLFKFWPQFCEFRKNLTDENIMSVLERRQEYNKQKKKLAVLEDEKSGKDGIKQYANTSVPAIKTALLSDSFLGLQPYGRQPTWCYSKYIEALEQERILLKIQEELEKKLFAGLQPLTNFKASSSTMSLKKNMSAHSSQK

SEQ ID NO: 6192 - protein, 729 aa, Homo sapiens
MEVEDSGGVVLTAYHSYARAQPPNAESRCAPRAAASHPLSRKSIPRCRRINRMLSNESLHPPAFSRSNSEASVDSASMEDFWREIESIKDSSMGGQEEPPPAEVTPVDEGELEAEWLQDVGLSTLISGDEEEDGKALLSTLTRTQAAAVQKRYHTYTQTMRKKDKQSIRDVRDIFGVSESPPRDTCGNHTNQLDGTKEERELPRVIKTSGSMPDDASLNSTTLSDASQDKEGSFAVPRSDSVAILETIPVLPVHSNGSPEPGQPVQNAISDDDFLEKNIPPEAEELSFEVSYSEMVTEALKRNKLKKSEIKKEDYVLTKFNVQKTRFGLTEAGDLSAEDMKKIRHLSLIELTAFFDAFGIQLKRNKTEKVKGRDNGIFGVPLTVLLDGDRKKDPGVKVPLVLQKFFEKVEESGLESEGIFRLSGCTAKVKQYREELDAKFNADKFKWDKMCHREAAVMLKAFFRELPTSLFPVEYIPAFISLMERGPHVKVQFQALHLMVMALPDANRDAAQALMTFFNKVIANESKNRMSLWNISTVMAPNLFFSRSKHSDYEELLLANTAAHIIRLMLKYQKILWKVPSFLITQVRRMNEATMLLKKQLPSVRKLLRRKTLERETASPKTSKVLQKSPSARRMSDVPEGVIRVHAPLLSKVSMAIQLNNQTKAKDILAKFQYENSHGSSECIKIQNQRLYEIGGNIGEHCLDPDAYILDVYRINPQAEWVIKPQQSS

SEQ ID NO: 6193 - protein, 670 aa, Homo sapiens
MLSNESLHPPAFSRSNSEASVDSASMEDFWREIESIKDSSMGGQEEPPPAEVTPVDEGELEAEWLQDVGLSTLISGDEEEDGKALLSTLTRTQAAAVQKRYHTYTQTMRKKDKQSIRDVRDIFGVSESPPRDTCGNHTNQLDGTKEERELPRVIKTSGSMPDDASLNSTTLSDASQDKEGSFAVPRSDSVAILETIPVLPVHSNGSPEPGQPVQNAISDDDFLEKNIPPEAEELSFEVSYSEMVTEALKRNKLKKSEIKKEDYVLTKFNVQKTRFGLTEAGDLSAEDMKKIRHLSLIELTAFFDAFGIQLKRNKTEKVKGRDNGIFGVPLTVLLDGDRKKDPGVKVPLVLQKFFEKVEESGLESEGIFRLSGCTAKVKQYREELDAKFNADKFKWDKMCHREAAVMLKAFFRELPTSLFPVEYIPAFISLMERGPHVKVQFQALHLMVMALPDANRDAAQALMTFFNKVIANESKNRMSLWNISTVMAPNLFFSRSKHSDYEELLLANTAAHIIRLMLKYQKILWKVPSFLITQVRRMNEATMLLKKQLPSVRKLLRRKTLERETASPKTSKVLQKSPSARRMSDVPEGVIRVHAPLLSKVSMAIQLNNQTKAKDILAKFQYENRILHWQRAALSFLNGKWVKKEREESTETNRSPKHVFLFTIGLDIST

SEQ ID NO: 6194 - protein, 545 aa, Homo sapiens
MNELPRDTCGNHTNQLDGTKEERELPRVIKTSGSMPDDASLNSTTLSDASQDKEGSFAVPRSDSVAILETIPVLPVHSNGSPEPGQPVQNAISDDDFLEKNIPPEAEELSFEVSYSEMVTEALKRNKLKKSEIKKEDYVLTKFNVQKTRFGLTEAGDLSAEDMKKIRHLSLIELTAFFDAFGIQLKRNKTEKVKGRDNGIFGVPLTVLLDGDRKKDPGVKVPLVLQKFFEKVEESGLESEGIFRLSGCTAKVKQYREELDAKFNADKFKWDKMCHREAAVMLKAFFRELPTSLFPVEYIPAFISLMERGPHVKVQFQALHLMVMALPDANRDAAQALMTFFNKVIANESKNRMSLWNISTVMAPNLFFSRSKHSDYEELLLANTAAHIIRLMLKYQKILWKVPSFLITQVRRMNEATMLLKKQLPSVRKLLRRKTLERETASPKTSKVLQKSPSARRMSDVPEGVIRVHAPLLSKVSMAIQLNNQTKAKDILAKFQYENRILHWQRAALSFLNGKWVKKEREESTETNRSPKHVFLFTIGLDIST

SEQ ID NO: 6195 - protein, 570 aa, Homo sapiens
MRKKDKQSIRDVRDIFGVSESPPRDTCGNHTNQLDGTKEERELPRVIKTSGSMPDDASLNSTTLSDASQDKEGSFAVPRSDSVAILETIPVLPVHSNGSPEPGQPVQNAISDDDFLEKNIPPEAEELSFEVSYSEMVTEALKRNKLKKSEIKKEDYVLTKFNVQKTRFGLTEAGDLSAEDMKKIRHLSLIELTAFFDAFGIQLKRNKTEKVKGRDNGIFGVPLTVLLDGDRKKDPGVKVPLVLQKFFEKVEESGLESEGIFRLSGCTAKVKQYREELDAKFNADKFKWDKMCHREAAVMLKAFFRELPTSLFPVEYIPAFISLMERGPHVKVQFQALHLMVMALPDANRDAAQALMTFFNKVIANESKNRMSLWNISTVMAPNLFFSRSKHSDYEELLLANTAAHIIRLMLKYQKILWKVPSFLITQVRRMNEATMLLKKQLPSVRKLLRRKTLERETASPKTSKVLQKSPSARRMSDVPEGVIRVHAPLLSKVSMAIQLNNQTKAKDILAKFQYENSHGSSECIKIQNQRLYEIGGNIGEHCLDPDAYILDVYRINPQAEWVIKPQQSS

SEQ ID NO: 6196 - protein, 181 aa, Homo sapiens
MCKGLAALPHSCLERAKEIKIKLGILLQKPDSVGDLVIPYNEKPEKPAKTQKTSLDEALQWRDSLDKLLQNNYGLASFKSFLKSEFSEENLEFWIACEDYKKIKSPAKMAEKAKQIYEEFIQTEAPKEVNIDHFTKDITMKNLVEPSLSSFDMAQKRIHALMEKDSLPRFVRSEFYQELIK

SEQ ID NO: 6197 - protein, 73 aa, Homo sapiens
MAEKAKQIYEEFIQTEAPKEVNIDHFTKDITMKNLVEPSLSSFDMAQKRIHALMEKDSLPRFVRSEFYQELIK

SEQ ID NO: 6198 - protein, 185 aa, Homo sapiens
MCKGLAALPHSCLERAKEIKIKLGILLQKPDSVGDLVIPYNEKPEKPAKTQKTSLDEALQWRDSLDKLLQNNYGLASFKSFLKSEFSEENLEFWIACEDYKKIKSPAKMAEKAKQIYEEFIQTEAPKEVGLWVNIDHFTKDITMKNLVEPSLSSFDMAQKRIHALMEKDSLPRFVRSEFYQELIK

SEQ ID NO: 6199 - protein, 1958 aa, Homo sapiens
MMATRRTGLSEGDGDKLKACEVSKNKDGKEQSETVSLSEDETFSWPGPKTVTLKRTSQGFGFTLRHFIVYPPESAIQFSYKDEENGNRGGKQRNRLEPMDTIFVKQVKEGGPAFEAGLCTGDRIIKVNGESVIGKTYSQVIALIQNSDTTLELSVMPKDEDILQVLQFTKDVTALAYSQDAYLKGNEAYSGNARNIPEPPPICYPWLPSAPSAMAQPVEISPPDSSLSKQQTSTPVLTQPGRAYRMEIQVPPSPTDVAKSNTAVCVCNESVRTVIVPSEKVVDLLSNRNNHTGPSHRTEEVRYGVSEQTSLKTVSRTTSPPLSIPTTHLIHQPAGSRSLEPSGILLKSGNYSGHSDGISSSRSQAVEAPSVSVNHYSPNSHQHIDWKNYKTYKEYIDNRRLHIGCRTIQERLDSLRAASQSTTDYNQVVPNRTTLQGRRRSTSHDRVPQSVQIRQRSVSQERLEDSVLMKYCPRSASQGALTSPSVSFSNHRTRSWDYIEGQDETLENVNSGTPIPDSNGEKKQTYKWSGFTEQDDRRGICERPRQQEIHKSFRGSNFTVAPSVVNSDNRRMSGRGVGSVSQFKKIPPDLKTLQSNRNFQTTCGMSLPRGISQDRSPLVKVRSNSLKAPSTHVTKPSFSQKSFVSIKDQRPVNHLHQNSLLNQQTWVRTDSAPDQQVETGKSPSLSGASAKPAPQSSENAGTSDLELPVSQRNQDLSLQEAETEQSDTLDNKEAVILREKPPSGRQTPQPLRHQSYILAVNDQETGSDTTCWLPNDARREVHIKRMEERKASSTSPPGDSLASIPFIDEPTSPSIDHDIAHIPASAVISASTSQVPSIATVPPCLTTSAPLIRRQLSHDHESVGPPSLDAQPNSKTERSKSYDEGLDDYREDAKLSFKHVSSLKGIKIADSQKSSEDSGSRKDSSSEVFSDAAKEGWLHFRPLVTDKGKRVGGSIRPWKQMYVVLRGHSLYLYKDKREQTTPSEEEQPISVNACLIDISYSETKRKNVFRLTTSDCECLFQAEDRDDMLAWIKTIQESSNLNEEDTGVTNRDLISRRIKEYNNLMSKAEQLPKTPRQSLSIRQTLLGAKSEPKTQSPHSPKEESERKLLSKDDTSPPKDKGTWRKGIPSIMRKTFEKKPTATGTFGVRLDDCPPAHTNRYIPLIVDICCKLVEERGLEYTGIYRVPGNNAAISSMQEELNKGMADIDIQDDKWRDLNVISSLLKSFFRKLPEPLFTNDKYADFIEANRKEDPLDRLKTLKRLIHDLPEHHYETLKFLSAHLKTVAENSEKNKMEPRNLAIVFGPTLVRTSEDNMTHMVTHMPDQYKIVETLIQHHDWFFTEEGAEEPLTTVQEESTVDSQPVPNIDHLLTNIGRTGVSPGDVSDSATSDSTKSKGSWGSGKDQYSRELLVSSIFAAASRKRKKPKEKAQPSSSEDELDNVFFKKENVEQCHNDTKEESKKESETLGRKQKIIIAKENSTRKDPSTTKDEKISLGKESTPSEEPSPPHNSKHNKSPTLSCRFAILKESPRSLLAQKSSHLEETGSDSGTLLSTSSQASLARFSMKKSTSPETKHSEFLANVSTITSDYSTTSSATYLTSLDSSRLSPEVQSVAESKGDEADDERSELISEGRPVETDSESEFPVFPTALTSERLFRGKLQEVTKSSRRNSEGSELSCTEGSLTSSLDSRRQLFSSHKLIECDTLSRKKSARFKSDSGSLGDAKNEKEAPSLTKVFDVMKKGKSTGSLLTPTRGESEKQEPTWKTKIADRLKLRPRAPADDMFGVGNHKVNAETAKRKSIRRRHTLGGHRDATEISVLNFWKVHEQSGERESELSAVNRLKPKCSAQDLSISDWLARERLRTSTSDLSRGEIGDPQTENPSTREIATTDTPLSLHCNTGSSSSTLASTNRPLLSIPPQSPDQINGESFQNVSKNASSAANAQPHKLSETPGSKAEFHPCL

SEQ ID NO: 6200 - protein, 1165 aa, Homo sapiens
MMATRRTGLSEGDGDKLKACEVSKNKDGKEQSETVSLSEDETFSWPGPKTVTLKRTSQGFGFTLRHFIVYPPESAIQFSYKDEENGNRGGKQRNRLEPMDTIFVKQVKEGGPAFEAGLCTGDRIIKVNGESVIGKTYSQVIALIQNSDTTLELSVMPKDEDILQVAYSQDAYLKGNEAYSGNARNIPEPPPICYPWLPSAPSAMAQPVEISPPDSSLSKQQTSTPVLTQPGRAYRMEIQVPPSPTDVAKSNTAVCVCNESVRTVIVPSEKVVDLLSNRNNHTGPSHRTEEVRYGVSEQTSLKTVSRTTSPPLSIPTTHLIHQPAGSRSLEPSGILLKSGNYSGHSDGISSSRSQAVEAPSVSVNHYSPNSHQHIDWKNYKTYKEYIDNRRLHIGCRTIQERLDSLRAASQSTTDYNQVVPNRTTLQGRRRSTSHDRVPQSVQIRQRSVSQERLEDSVLMKYCPRSASQGALTSPSVSFSNHRTRSWDYIEGQDETLENVNSGTPIPDSNGEKKQTYKWSGFTEQDDRRGICERPRQQEIHKSFRGSNFTVAPSVVNSDNRRMSGRGVGSVSQFKKIPPDLKTLQSNRNFQTTCGMSLPRGISQDRSPLVKVRSNSLKAPSTHVTKPSFSQKSFVSIKDQRPVNHLHQNSLLNQQTWVRTDSAPDQQVETGKSPSLSGASAKPAPQSSENAGTSDLELPVSQRNQDLSLQEAETEQSDTLDNKEAVILREKPPSGRQTPQPLRHQSYILAVNDQETGSDTTCWLPNDARREVHIKRMEERKASSTSPPGDSLASIPFIDEPTSPSIDHDIAHIPASAVISASTSQVPSIATVPPCLTTSAPLIRRQLSHDHESVGPPSLDAQPNSKTERSKSYDEGLDDYREDAKLSFKHVSSLKGIKIADSQKSSEDSGSRKDSSSEVFSDAAKEGWLHFRPLVTDKGKRVGGSIRPWKQMYVVLRGHSLYLYKDKREQTTPSEEEQPISVNACLIDISYSETKRKNVFRLTTSDCECLFQAEDRDDMLAWIKTIQESSNLNEEDTGVTNRDLISRRIKEYNNLMSKAEQLPKTPRQSLSIRQTLLGAKSEPKTQSPHSPKEESERKLLSKDDTSPPKDKGTWRKGIPSIMRKTFEKKPTATGTFGVRLDDCPPAHTNRVGDTSPPDFLKSLIQF

SEQ ID NO: 6201 - protein, 1052 aa, Homo sapiens
MREAAERRQQLQLEHDQALAVLSAKQQEIDLLQKSKVRELEEKCRTQSEQFNLLSRDLEKFRQHAGKIDLLGGSAVAPLDISTAPSKPFPQFMNGLATSLGKGQESAIGGSSAIGEYIRPLPQPGDRPEPLSAKPTFLSRSGSARCRSESDMENERNSNTSKQRYSGKVHLCVARYSYNPFDGPNENPEAELPLTAGKYLYVYGDMDEDGFYEGELLDGQRGLVPSNFVDFVQDNESRLASTLGNEQDQNFINHSGIGLEGEHILDLHSPTHIDAGITDNSAGTLDVNIDDIGEDIVPYPRKITLIKQLAKSVIVGWEPPAVPPGWGTVSSYNVLVDKETRMNLTLGSRTKALIEKLNMAACTYRISVQCVTSRGSSDELQCTLLVGKDVVVAPSHLRVDNITQISAQLSWLPTNSNYSHVIFLNEEEFDIVKAARYKYQFFNLRPNMAYKVKVLAKPHQMPWQLPLEQREKKEAFVEFSTLPAGPPAPPQDVTVQAGVTPATIRVSWRPPVLTPTGLSNGANVTGYGVYAKGQRVAEVIFPTADSTAVELVRLRSLEAKGVTVRTLSAQGESVDSAVAAVPPELLVPPTPHPRPAPQSKPLASSGVPETKDEHLGPHARMDEAWEQSRAPGPVHGHMLEPPVGPGRRSPSPSRILPQPQGTPVSTTVAKAMAREAAQRVAESSRLEKRSVFLERSSAGQYAASDEEDAYDSPDFKRRGASVDDFLKGSELGKQPHCCHGDEYHTESSRGSDLSDIMEEDEEELYSEMQLEDGGRRRPSGTSHNALKILGNPASAGRVDHMGRRFPRGSAGPQRSRPVTVPSIDDYGRDRLSPDFYEESETDPGAEELPARIFVALFDYDPLTMSPNPDAAEEELPFKEGQIIKVYGDKDADGFYRGETCARLGLIPCNMVSEIQADDEEMMDQLLRQGFLPLNTPVEKIERSRRSGRRHSVSTRRMVALYDYDPRESSPNVDVEAELTFCTGDIITVFGEIDEDGFYYGELNGQKGLVPSNFLEEVPDDVEVYLSDAPSHYSQDTPMRSKAKRKKSVHFTP

SEQ ID NO: 6202 - protein, 645 aa, Homo sapiens
MNGLATSLGKGQESAIGGSSAIGEYIRPLPQPGDRPEPLSAKPTFLSRSGSARCRSESDMENERNSNTSKQRYSGKVHLCVARYSYNPFDGPNENPEAELPLTAGKYLYVYGDMDEDGFYEGELLDGQRGLVPSNFVDFVQDNESRLASTLGNEQDQNFINHSGIGLEGEHILDLHSPTHIDAGITDNSAGTLDVNIDDIGEDIVPYPRKITLIKQLAKSVIVGWEPPAVPPGWGTVSSYNVLVDKETRMNLTLGSRTKALIEKLNMAACTYRISVQCVTSRGSSDELQCTLLVGKDVVVAPSHLRVDNITQISAQLSWLPTNSNYSHVIFLNEEEFDIVKAARYKYQFFNLRPNMAYKVKVLAKPHQMPWQLPLEQREKKEAFVEFSTLPAGPPAPPQDVTVQAGVTPATIRVSWRPPVLTPTGLSNGANVTGYGVYAKGQRVAEVIFPTADSTAVELVRLRSLEAKGVTVRTLSAQGESVDSAVAAVPPELLVPPTPHPRPAPQSKPLASSGVPETKDEHLGPHARMDEAWEQSRAPGPVHGHMLEPPVGPGRRSPSPSRILPQPQGTPVSTTVAKAMAREAAQRVAESSRLEKRSVFLERSSAGQYAASDEEDAYDSPDFKRRGASVDDFLKGSELGKQMVS

SEQ ID NO: 6203 - protein, 186 aa, Homo sapiens
MSPNPDAAEEELPFKEGQIIKVYGDKDADGFYRGETCARLGLIPCNMVSEIQADDEEMMDQLLRQGFLPLNTPVEKIERSRRSGRRHSVSTRRMVALYDYDPRESSPNVDVEAELTFCTGDIITVFGEIDEDGFYYGELNGQKGLVPSNFLEEVPDDVEVYLSDAPSHYSQDTPMRSKAKRVSKPI

SEQ ID NO: 6204 - protein, 382 aa, Homo sapiens
MGSQTMAVALPRDLRQDANLAKRRHAELCRQKRVFNARNRIIGGDTEAWDVQVHDQKIKEATEKARHETFAAEMRQNDKIMCILENRKKRDRKNLCRAINDFQQSFQKPETRREFDLSDPLALKKDLPARQSDNDVRNTISGMQKFMGEDLNFHERKKFQEEQNREWSLQQQREWKNARAEQKCAEALYTETRLQFDETAKHLQKLESTTRKAVCASVKDFNKSQAIESVERKKQEKKQEQEDNLAEITNLLRGDLLSENPQQAASSFGPHRVVPDRWKGMTQEQLEQIRLVQKQQIQEKLRLQEEKRQRDLDWDRRRIQGARATLLFERQQWRRQRDLRRALDSSNLSLAKEQHLQKKYMNEVYTNQPTGDYFTQFNTGSR

SEQ ID NO: 6205 - protein, 267 aa, Homo sapiens
MWDQRLVKLALLQHLRAFYGIKVKGVRGQCDRRRHETAATEIGGKIFGVPFNALPHSAVPEYGHIPSFLVDACTSLEEHIHTEGLFRKSGSVIRLKALKNKVDHGEGCLSSAPPCDIAGLLKQFFRELPEPILPADLHEALLKAQQLGTEEKNKAILLLSCLLADHTVHVLRYFFNFLRNVSLRSSENKMDSSNLAVIFAPNLLQTSEGHEKMSSNAEKKGVYQTLSWKRYQPCWVLMVSVLLHHWKALKKVNMKLLVNIREREDNV

SEQ ID NO: 6206 - protein, 201 aa, Homo sapiens
MKWVWALLLLAALGSGRAERDCRVSSFRVKENFDKARFSGTWYAMAKKDPEGLFLQDNIVAEFSVDETGQMSATAKGRVRLLNNWDVCADMVGTFTDTEDPAKFKMKYWGVASFLQKGNDDHWIVDTDYDTYAVQYSCRLLNLDGTCADSYSFVFSRDPNGLPPEAQKIVRQRQEELCLARQYRLIVHNGYCDGRSERNLL

SEQ ID NO: 6207 - protein, 928 aa, Homo sapiens
MAKVPELEDTFLQAQPAPQLSPGIQEDCCVQLLGKGLLVYPEETVYLAAEGQPGGEQGGGEKGEDPELPGAVKSEMHLNNGNFSSEEEDADNHDSKTKAADQYLSQKKTITQIVKDKKKQTQLTLQWLEENYIVCEGVCLPRCILYAHYLDFCRKEKLEPACAATFGKTIRQKFPLLTTRRLGTRGHSKYHYYGIGIKESSAYYHSVYSGKGLTRFSGSKLKNEGGFTRKYSLSSKTGTLLPEFPSAQHLVYQGCISKDKVDTLIMMYKTHCQCILDNAINGNFEEIQHFLLHFWQGMPDHLLPLLENPVIIDIFCVCDSILYKVLTDVLIPATMQEMPESLLADIRNFAKNWEQWVVSSLENLPEALTDKKIPIVRRFVSSLKRQTSFLHLAQIARPALFDQHVVNSMVSDIERVDLNSIGSQALLTISGSTDTESGIYTEHDSITVFQELKDLLKKNATVEAFIEWLDTVVEQRVIKTSKQNGRSLKKRAQDFLLKWSFFGARVMHNLTLNNASSFGSFHLIRMLLDEYILLAMETQFNNDKEQELQNLLDKYMKNSDASKAAFTASPSSCFLANRNKGSMVSSDAVKNESHVETTYLPLPSSQPGGLGPALHQFPAGNTDNMPLTGQMELSQIAGHLMTPPISPAMASRGSVINQGPMAGRPPSVGPVLSAPSHCSTYPEPIYPTLPQANHDFYSTSSNYQTVFRAQPHSTSGLYPHHTEHGRCMAWTEQQLSRDFFSGSCAGSPYNSRPPSSYGPSLQAQDSHNMQFLNTGSFNFLSNTGAASCQGATLPPNSPNGYYGSNINYPESHRLGSMVNQHVSVISSIRSLPPYSDIHDPLNILDDSGRKQTSSFYTDTSSPVACRTPVLASSLQTPIPSSSSQCMYGTSNQYPAQETLDSHGTSSREMVSSLPPINTVFMGTAAGGT

SEQ ID NO: 6208 - protein, 586 aa, Homo sapiens
MAEGVPASPSSGEGSRGPHSGVIQWLVDNFCICEECSVPRCLMYEIYVETCGQNTENQVNPATFGKLVRLVFPDLGTRRLGTRGSARYHYDGICIKKSSFFYAQYCYLIGEKRYHSGDAIAFEKSTNYNSIIQQEATCEDHSPMKTDPVGSPLSEFRRCPFLEQEQAKKYSCNMMAFLADEYCNYCRDILRNVEDLLTSFWKSLQQDTVMLMSLPDVCQLFKCYDVQLYKGIEDVLLHDFLEDVSIQYLKSVQLFSKKFKLWLLNALEGVPALLQISKLKEVTLFVKRLRRKTYLSNMAKTMRMVLKSKRRVSVLKSDLQAIINQGTLATSKKALASDRSGADELENNPEMKCLRNLISLLGTSTDLRVFLSCLSSHLQAFVFQTSRSKEEFTKLAASFQLRWNLLLTAVSKAMTLCHRDSFGSWHLFHLLLLEYMIHILQSCLEEEEEEEDMGTVKEMLPDDPTLGQPDQALFHSLNSSLSQACASPSMEPLGVMPTHMGQGRYPVGVSNMVLRILGFLVDTAMGNKLIQVLLEDETTESAVKLSLPMGQEALITLKDGQQFVIQISDVPQSSEDIYFRENNANV

SEQ ID NO: 6209 - protein, 45 aa, Homo sapiens
MYEIYVETCGQNTENQVNPATFGKMAFLADEYCNYCRDILRNVRN

SEQ ID NO: 6210 - protein, 473 aa, Homo sapiens
MYEIYVETCGQNTENQVNPATFGKCEDHSPMKTDPVGSPLSEFRRCPFLEQEQAKKYSCNMMAFLADEYCNYCRDILRNVEDLLTSFWKSLQQDTVMLMSLPDVCQLFKCYDVQLYKGIEDVLLHDFLEDVSIQYLKSVQLFSKKFKLWLLNALEGVPALLQISKLKEVTLFVKRLRRKTYLSNMAKTMRMVLKSKRRVSVLKSDLQAIINQGTLATSKKALASDRSGADELENNPEMKCLRNLISLLGTSTDLRVFLSCLSSHLQAFVFQTSRSKEEFTKLAASFQLRWNLLLTAVSKAMTLCHRDSFGSWHLFHLLLLEYMIHILQSCLEEEEEEEDMGTVKEMLPDDPTLGQPDQALFHSLNSSLSQACASPSMEPLGVMPTHMGQGRYPVGVSNMVLRILGFLVDTAMGNKLIQVLLEDETTESAVKLSLPMGQEALITLKDGQQFVIQISDVPQSSEDIYFRENNANV

SEQ ID NO: 6211 - protein, 205 aa, Homo sapiens
MMRTLITTHPLPLLLLPQQLLQLVQFQEVDTDFDFPEEDKKEEFEECLEKFFSTGPARPPTKEKVKRRVLIEPGMPLNHIEYCNHEIMGKNVYYKHRWVAEHYFLLMQYDELQKICYNRFVPCKNGIRKCNRSKGLVEGVYCNLTEAFEIPACKYESLYRKGYVLITCSWQNEMQKRIPHTINDLVEPPEHRSFLSEDGVFVISP

SEQ ID NO: 6212 - protein, 210 aa, Homo sapiens
MSAGKMMRTLITTHPLPLLLLPQQLLQLVQFQEVDTDFDFPEEDKKEEFEECLEKFFSTGPARPPTKEKVKRRVLIEPGMPLNHIEYCNHEIMGKNVYYKHRWVAEHYFLLMQYDELQKICYNRFVPCKNGIRKCNRSKGLVEGVYCNLTEAFEIPACKYESLYRKGYVLITCSWQNEMQKRIPHTINDLVEPPEHRSFLSEDGVFVISP

SEQ ID NO: 6213 - protein, 215 aa, Homo sapiens [sequence omitted]

SEQ ID NO: 6214 - protein, 263 aa, Homo sapiens
MAKRLQAELSCPVCLDFFSCSISLSCTHVFCFDCIQRYILENHDFRAMCPLCRDVVKVPALEEWQVSVLTLMTKQHNSRLEQSLHVREELRHFREDVTLDAATASSLLVFSNDLRSAQCKKIHHDLTKDPRLACVLGTPCFSSGQHYWEVEVGEVKSWSLGVCKEPADRKSNDLFPEHGFWISMKAGAIHANTHLERIPASPRLRRVGIFLDADLEEIQFFDVDNNVLIYTHDGFFSLELLCPFFCLELLGEGESGNVLTICP

SEQ ID NO: 6215 - protein, 203 aa, Homo sapiens [sequence omitted]

SEQ ID NO: 6216 - protein, 230 aa, Homo sapiens
MVVFGYEAGTKPRDSGVVPVGTEEAPKVFKMAASMHGQPSPSLEDAKLRRPMVIEIIEKNFDYLRKEMTQNIYQMATFGTTAGFSGIFSNFLFRRCFKVKHDALKTYASLATLPFLSTVVTDKLFVIDALYSDNISKENCVFRSSLIGIVCGVFYPSSLAFTKNGRLATKYHTVPLPPKGRVLIHWMTLCQTQMKLMAIPLVFQIMFGILNGLYHYAVFEETLEKTIHEE

SEQ ID NO: 6217 - protein, 219 aa, Homo sapiens
MWIQVWMTVGTEEAPKVFKMAASMHGQPSPSLEDAKLRRPMVIEIIEKNFDYLRKEMTQNIYQMATFGTTAGFSGIFSNFLFRRCFKVKHDALKTYASLATLPFLSTVVTDKLFVIDALYSDNISKENCVFRSSLIGIVCGVFYPSSLAFTKNGRLATKYHTVPLPPKGRVLIHWMTLCQTQMKLMAIPLVFQIMFGILNGLYHYAVFEETLEKTIHEE

SEQ ID NO: 6218 - protein, 110 aa, Homo sapiens
MAASMHGQPSPSLEDAKLRRPMVIEIIEKNFDYLRKEMTQNIYQMATFGTTAGFSGIFSNFLFRRCFKVKHDALKTYASLATLPFLSTVVTDKLFVIDALYSGEFKFTNV

SEQ ID NO: 6219 - protein, 170 aa, Homo sapiens
MVVFGYEAGTKPRDSGVVPVGTEEAPKVFKMAASMHGQPSPSLEDAKLRRPMVIEIIEKNFDYLRKEMTQNIYQMATFGTTAGFSGIFSNFLFRRCFKVKHDALKTYASLATLPFLSTVVTDKLFVIDALYSDNISKENCVFRSSLIGIVCGVFYPSSLAFTKNGRLATK

SEQ ID NO: 6220 - protein, 200 aa, Homo sapiens
MAASMHGQPSPSLEDAKLRRPMVIEIIEKNFDYLRKEMTQNIYQMATFGTTAGFSGIFSNFLFRRCFKVKHDALKTYASLATLPFLSTVVTDKLFVIDALYSDNISKENCVFRSSLIGIVCGVFYPSSLAFTKNGRLATKYHTVPLPPKGRVLIHWMTLCQTQMKLMAIPLVFQIMFGILNGLYHYAVFEETLEKTIHEE

SEQ ID NO: 6221 - protein, 416 aa, Homo sapiens
MASSSGSSPRPAPDENEFPFGCPPTVCQDPKEPRALCCAGCLSENPRNGEDQICPKCRGEDLQSISPGSRLRTQEKAHPEVAEAGIGCPFAGVGCSFKGSPQSVQEHEVTSQTSHLNLLLGFMKQWKARLGCGLESGPMALEQNLSDLQLQAAVEVAGDLEVDCYRAPCSESQEELALQHFMKEKLLAELEGKLRVFENIVAVLNKEVEASHLALATSIHQSQLDRERILSLEQRVVELQQTLAQKDQALGKLEQSLRLMEEASFDGTFLWKITNVTRRCHESACGRTVSLFSPAFYTAKYGYKLCLRLYLNGDGTGKRTHLSLFIVIMRGEYDALLPWPFRNKVTFMLLDQNNREHAIDAFRPDLSSASFQRPQSETNVASGCPLFFPLSKLQSPKHAYVKDDTMFLKCIVETST

SEQ ID NO: 6222 - protein, 294 aa, Homo sapiens
MKQWKARLGCGLESGPMALEQNLSDLQLQAAVEVAGDLEVDCYRAPCSESQEELALQHFMKEKLLAELEGKLRVFENIVAVLNKEVEASHLALATSIHQSQLDRERILSLEQRVVELQQTLAQKDQALGKLEQSLRLMEEASFDGTFLWKITNVTRRCHESACGRTVSLFSPAFYTAKYGYKLCLRLYLNGDGTGKRTHLSLFIVIMRGEYDALLPWPFRNKVTFMLLDQNNREHAIDAFRPDLSSASFQRPQSETNVASGCPLFFPLSKLQSPKHAYVKDDTMFLKCIVETST

SEQ ID NO: 6223 - protein, 615 aa, Homo sapiens
MESMFEDDISILTQEALGPSEVWLDSPGDPSLGGDMCSASHFALITAYGDIKERLGGLERENATLRRRLKVYEIKYPLISDFGEEHGFSLYEIKDGSLLEVEKVSLQQRLNQFQHELQKNKEQEEQLGEMIQAYEKLCVEKSDLETELREMRALVETHLRQICGLEQQLRQQQGLQDAAFSNLSPPPAPAPPCTDLDLHYLALRGGSGLSHAGWPGSTPSVSDLERRRLEEALEAAQGEARGAQLREEQLQAECERLQGELKQLQETRAQDLASNQSERDMAWVKRVGDDQVNLALAYTELTEELGRLRELSSLQGRILRTLLQEQARSGGQRHSPLSQRHSPAPQCPSPSPPARAAPPCPPCQSPVPQRRSPVPPCPSPQQRRSPASPSCPSPVPQRRSPVPPSCQSPSPQRRSPVPPSCPAPQPRPPPPPPPGERTLAERAYAKPPSHHVKAGFQGRRSYSELAEGAAYAGASPPWLQAEAATLPKPRAYGSELYGPGRPLSPRRAFEGIRLRFEKQPSEEDEWAVPTSPPSPEVGTIRCASFCAGFPIPESPAATAYAHAEHAQSWPSINLLMETVGSDIRSCPLCQLGFPVGYPDDALIKHIDSHLENSKI

SEQ ID NO: 6224 - protein, 222 aa, Homo sapiens
MESMFEDDISILTQEALGPSEVWLDSPGDPSLGGDMCSASHFALITAYGDIKERLGGLERENATLRRRLKVYEIKYPLISDFGEEHGFSLYEIKDGSLLEVEKVSLQQRLNQFQHELQKNKEQEEQLGEMIQAYEKLCVEKSDLETELREMRALVETHLRQICGLEQQLRQQQGLQDAAFSNLSPRRARAVLAVHQLADGDGGLRHPQLPPLPAGFPCRVPG

SEQ ID NO: 6225 - protein, 522 aa, Homo sapiens
MSLLNCENSCGSSQSESDCCVAMASSCSAVTKDDSVGGTASTGNLSSSFMEEIQGYDVEFDPPLESKYECPICLMALREAVQTPCGHRFCKACIIKSIRDAGHKCPVDNEILLENQLFPDNFAKREILSLMVKCPNEGCLHKMELRHLEDHQAHCEFALMDCPQCQRPFQKFHINIHILKDCPRRQVSCDNCAASMAFEDKEIHDQNCPLANVICEYCNTILIREQMPNHYDLDCPTAPIPCTFSTFGCHEKMQRNHLARHLQENTQSHMRMLAQAVHSLSVIPDSGYISEVRNFQETIHQLEGRLVRQDHQIRELTAKMETQSMYVSELKRTIRTLEDKVAEIEAQQCNGIYIWKIGNFGMHLKCQEEEKPVVIHSPGFYTGKPGYKLCMRLHLQLPTAQRCANYISLFVHTMQGEYDSHLPWPFQGTIRLTILDQSEAPVRQNHEEIMDAKPELLAFQRPTIPRNPKGFGYVTFMHLEALRQRTFIKDDTLLVRCEVSTRFDMGSLRREGFQPRSTDAGV

SEQ ID NO: 6226 - protein, 914 aa, Homo sapiens
MSQSQNAIFTSPTGEENLMNSNHRDSESITDVCSNEDLPEVELVSLLEEQLPQYRLKVDTLFLYENQDWTQSPHQRQHASDALSPVLAEETFRYMILGTDRVEQMTKTYNDIDMVTHLLAERDRDLELAARIGQALLKRNHVLSEQNESLEEQLGQAFDQVNQLQHELCKKDELLRIVSIASEESETDSSCSTPLRFNESFSLSQGLLQLEMLQEKLKELEEENMALRSKACHIKTETVTYEEKEQQLVSDCVKELRETNAQMSRMTEELSGKSDELIRYQEELSSLLSQIVDLQHKLKEHVIEKEELKLHLQASKDAQRQLTMELHELQDRNMECLGMLHESQEEIKELRSRSGPTAHLYFSQSYGAFTGESLAAEIEGTMRKKLSLDEESSLFKQKAQQKRVFDTVRIANDTRGRSISFPALLPIPGSNRSSVIMTAKPFESGLQQTEDKSLLNQGSSSEEVAGSSQKMGQPGPSGDSDLATALHRLSLRRQNYLSEKQFFAEEWQRKIQVLADQKEGVSGCVTPTESLASLCTTQSEITDLSSASCLRGFMPEKLQIVKPLEGSQTLYHWQQLAQPNLGTILDPRPGVITKGFTQLPGDAIYHISDLEEDEEEGITFQVQQPLEVEEKLSTSKPVTGIFLPPITSAGGPVTVATANPGKCLSCTNSTFTFTTCRILHPSDITQVTPSSGFPSLSCGSSGSSSSNTAVNSPALSYRLSIGESITNRRDSTTTFSSTMSLAKLLQERGISAKVYHSPISENPLQPLPKSLAIPSTPPNSPSHSPCPSPLPFEPRVHLSENFLASRPAETFLQEMYGLRPSRNPPDVGQLKMNLVDRLKRLGIARVVKNPGAQENGRCQEAEIGPQKPDSAVYLNSGSSLLGGLRRNQSLPVIMGSFAAPVCTSSPKMGVLKED

SEQ ID NO: 6227 - protein, 311 aa, Homo sapiens
MSQSQNAIFTSPTGEENLMNSNHRDSESITDVCSNEDLPEVELVSLLEEQLPQYRLKVDTLFLYENQDWTQSPHQRQHASDALSPVLAEETFRYMILGTDRVEQMTKTYNDIDMVTHLLAERDRDLELAARIGQALLKRNHVLSEQNESLEEQLGQAFDQVNQLQHELCKKDELLRIVSIASEESETDSSCSTPLRFNESFSLSQGLLQLEMLQEKLKELEEENMALRSKACHIKTETVTYEEKEQQLVSDCVKELRETNAQMSRMTEELSGKSDELIRYQEELSSLLSQIVDLQHKLKEVGLFIHSTDIC

SEQ ID NO: 6228 - protein, 281 aa, Homo sapiens [sequence omitted]

SEQ ID NO: 6229 - protein, 101 aa, Homo sapiens
MAMMEVQGGPSLGQTCVLIVIFTVLLQSLCVAVTYVYFTNELKQMQDKYSKSGIACFLKEDDSYWDPNDEESMNSPCWQVKWQLRQLVRKTPRMKRLWAAK

SEQ ID NO: 6230 - protein, 477 aa, Homo sapiens
MEAVELARKLQEEATCSICLDYFTDPVMTTCGHNFCRACIQLSWEKARGKKGRRKRKGSFPCPECREMSPQRNLLPNRLLTKVAEMAQQHPGLQKQDLCQEHHEPLKLFCQKDQSPICVVCRESREHRLHRVLPAEEAVQGYKLKLEEDMEYLREQITRTGNLQAREEQSLAEWQGKVKERRERIVLEFEKMNLYLVEEEQRLLQALETEEEETASRLRESVACLDRQGHSLELLLLQLEERSTQGPLQMLQDMKEPLSRKNNVSVQCPEVAPPTRPRTVCRVPGQIEVLRGFLEDVVPDATSAYPYLLLYESRQRRYLGSSPEGSGFCSKDRFVAYPCAVGQTAFSSGRHYWEVGMNITGDALWALGVCRDNVSRKDRVPKCPENGFWVVQLSKGTKYLSTFSALTPVMLMEPPSHMGIFLDFEAGEVSFYSVSDGSHLHTYSQATFPGPLQPFFCLGAPKSGQMVISTVTMWVKG

SEQ ID NO: 6231 - protein, 343 aa, Homo sapiens
MEAVELARKLQEEATCSICLDYFTDPVMTTCGHNFCRACIQLSWEKARGKKGRRKRKGSFPCPECREMSPQRNLLPNRLLTKVAEMAQQHPGLQKQDLCQEHHEPLKLFCQKDQSPICVVCRESREHRLHRVLPAEEAVQGYKLKLEEDMEYLREQITRTGNLQAREEQSLAEWQGKVKERRERIVLEFEKMNLYLVEEEQRLLQALETEEEETASRLRESVACLDRQGHSLELLLLQLEERSTQGPLQMLQDMKEPLSRKNNVSVQCPEVAPPTRPRTVCRVPGQIEVLRGFLGKWAPRARTSDPGSLGDAPLYPLASEATNGGGSTSALPGDGHWLFTVPS

SEQ ID NO: 6232 - protein, 494 aa, Homo sapiens
MSTTLLSAFYDVDFLCKTEKSLANLNLNNMLDKKAVGTPVAAAPSSGFAPGFLRRHSASNLHALAHPAPSPGSCSPKFPGAANGSSCGSAAAGGPTSYGTLKEPSGGGGTALLNKENKFRDRSFSENGDRSQHLLHLQQQQKGGGGSQINSTRYKTELCRPFEESGTCKYGEKCQFAHGFHELRSLTRHPKYKTELCRTFHTIGFCPYGPRCHFIHNADERRPAPSGGASGDLRAFGTRDALHLGFPREPRPKLHHSLSFSGFPSGHHQPPGGLESPLLLDSPTSRTPPPPSCSSASSCSSSASSCSSASAASTPSGAPTCCASAAAAAAAALLYGTGGAEDLLAPGAPCAACSSASCANNAFAFGPELSSLITPLAIQTHNFAAVAAAAYYRSQQQQQQQGLAPPAQPPAPPSATLPAGAAAPPSPPFSFQLPRRLSDSPVFDAPPSPPDSLSDRDSYLSGSLSSGSLSGSESPSLDPGRRLPIFSRLSISDD

SEQ ID NO: 6233 - protein, 564 aa, Homo sapiens
MAELDLMAPGPLPRATAQPPAPLSPDSGSPSPDSGSASPVEEEDVGSSEKLGRETEEQDSDSAEQGDPAGEGKEVLCDFCLDDTRRVKAVKSCLTCMVNYCEEHLQPHQVNIKLQSHLLTEPVKDHNWRYCPAHHSPLSAFCCPDQQCICQDCCQEHSGHTIVSLDAARRDKEAELQCTQLDLERKLKLNENAISRLQANQKSVLVSVSEVKAVAEMQFGELLAAVRKAQANVMLFLEEKEQAALSQANGIKAHLEYRSAEMEKSKQELERMAAISNTVQFLEEYCKFKNTEDITFPSVYVGLKDKLSGIRKVITESTVHLIQLLENYKKKLQEFSKEEEYDIRTQVSAVVQRKYWTSKPEPSTREQFLQYAYDITFDPDTAHKYLRLQEENRKVTNTTPWEHPYPDLPSRFLHWRQVLSQQSLYLHRYYFEVEIFGAGTYVGLTCKGIDRKGEERNSCISGNNFSWSLQWNGKEFTAWYSDMETPLKAGPFRRLGVYIDFPGGILSFYGVEYDTMTLVHKFACKFSEPVYAAFWLSKKENAIRIVDLGEEPEKPAPSLVGTAP

SEQ ID NO: 6234 - protein, 348 aa, Homo sapiens
MQFGELLAAVRKAQANVMLFLEEKEQAALSQANGIKAHLEYRSAEMEKSKQELERMAAISNTVQFLEEYCKFKNTEDITFPSVYVGLKDKLSGIRKVITESTVHLIQLLENYKKKLQEFSKEEEYDIRTQVSAVVQRKYWTSKPEPSTREQFLQYAYDITFDPDTAHKYLRLQEENRKVTNTTPWEHPYPDLPSRFLHWRQVLSQQSLYLHRYYFEVEIFGAGTYVGLTCKGIDRKGEERNSCISGNNFSWSLQWNGKEFTAWYSDMETPLKAGPFRRLGVYIDFPGGILSFYGVEYDTMTLVHKFACKFSEPVYAAFWLSKKENAIRIVDLGEEPEKPAPSLVGTAP

SEQ ID NO: 6235 - protein, 250 aa, Homo sapiens
MAWQVSLLELEDRLQCPICLEVFKESLMLQCGHSYCKGCLVSLSYHLDTKVRCPMCWQVVDGSSSLPNVSLAWVIEALRLPGDPEPKVCVHHRNPLSLFCEKDQELICGLCGLLGSHQHHPVTPVSTVCSRMKEELAALFSELKQEQKKVDELIAKLVKNRTRIVNESDVFSWVIRREFQELRHPVDEEKARCLEGIGGHTRGLVASLDMQLEQAQGTRERLAQAECVLEQFGNEDHHEFIWKFHSMASR

SEQ ID NO: 6236 - protein, 233 aa, Homo sapiens
MSTESMIRDVELAEEALPKKTGGPQGSRRCLFLSLFSFLIVAGATTLFCLLHFGVIGPQREEFPRDLSLISPLAQAVRSSSRTPSDKPVAHVVANPQAEGQLQWLNRRANALLANGVELRDNQLVVPSEGLYLIYSQVLFKGQGCPSTHVLLTHTISRIAVSYQTKVNLLSAIKSPCQRETPEGAEAKPWYEPIYLGGVFQLEKGDRLSAEINRPDYLDFAESGQVYFGIIAL

SEQ ID NO: 6237 - protein, 839 aa, Homo sapiens [sequence omitted]

SEQ ID NO: 6238 - protein, 837 aa, Homo sapiens
METLTPGHLQPSPSSPRPRAAPGSLGRVTRRRLSRWIALTRKVSWTPARPSQSALLSPSRGQETAPPVPGCCPRTLSPPAPRRPSGSMIAGVSLKPLLRITARIWRACCSSCRRARSTSQTTSSKVAPALGSGRAPALACPDPPLCLSDPETGKTCLLKAMLNLHDGQNTTIPLLLEIARQTDSLKELVNASYTDSYYKGQTALHIAIERRNMALVTLLVENGADVQAAAHGDFFKKTKGRPGFYFGELPLSLAACTNQLGIVKFLLQNSWQTADISARDSVGNTVLHALVEVADNTADNTKFVTSMYNEILMLGAKLHPTLKLEELTNKKGMTPLALAAGTGKIGVLAYILQREIQEPECRHLSRKFTEWAYGPVHSSLYDLSCIDTCEKNSVLEVIAYSSSETPNRHDMLLVEPLNRLLQDKWDRFVKRIFYFNFLVYCLYMIIFTMAAYYRPVDGLPPFKMEKTGDYFRVTGEILSVLGGVYFFFRGIQYFLQRRPSMKTLFVDSYSEMLFFLQSLFMLATVVLYFSHLKEYVASMVFSLALGWTNMLYYTRGFQQMGIYAVMIEKMILRDLCRFMFVYIVFLFGFSTAVVTLIEDGKNDSLPSESTSHRWRGPACRPPDSSYNSLYSTCLELFKFTIGMGDLEFTENYDFKAVFIILLLAYVILTYILLLNMLIALMGETVNKIAQESKNIWKLQRAITILDTEKSFLKCMRKAFRSGKLLQVGYTPDGKDDYRWCFRVDEVNWTTWNTNVGIINEDPGNCEGVKRTLSFSLRSSRVSGRHWKNFALVPLLREASARDRQSAQPEEVYLRQFSGSLKPEDAEVFKSPAASGEK

SEQ ID NO: 6239 - protein, 569 aa, Homo sapiens
MAELEAVADDLDALIDDLDYLPGHFHLEMQLNFEPRSPAPQRARDLKLQREGLRQELQLAAAPQRPAVRHLLGAFAFYLEELDEARECFLEVAHEHPGNLNAWANLAHVYGRLGQEEEEEACAARLADLMGLAEEPEAAGDPQLRAARCLAEQGYAHGFDVGCASPEERARGLAAGIALYDKALGYGQQIPMEEKRGWYFTMATLYIRLDGIFLELGSEEQKRLPAFNRTLALLRQVLKSEDPRHRALAWCYLGMLLERKDTFSTTPMGVHDCGYSGTDPLDCFGKAIEIAKNQPPILNRLAKIFYFLGKQDMAIGTCNMALDVLRDPELNWQAYCTRAKIHIRAYLHDLKRAKMGLGGMPDRNHLACAKADLEEVVRVCPGFKAYLDIGQVYYYMGVDAVQELLAVDEAALNQALVFLAKAGESELGATLPELQLLRGKCLRIKGEDANAAACFKRAVELDDAGSSHTDGFGCLLEALLAQWSQAQLSDGELGREVDAWLRRAQDKYPAARLRQELQRVWRGHTDEVLGLARALVAQGRPALVRLLFETMEREGEGASAPRDRRAVSF

SEQ ID NO: 6240 - protein, 372 aa, Homo sapiens
MAELEAVADDLDALIDDLDYLPGHFHLEMQLNFEPRSPAPQRARDLKLQREGLRQELQLAAAPQRPAVRHLLGAFAFYLEELDEARECFLEVAHEHPGNLNAWANLAHVYGRLGQEEEEEACAARLADLMGLAEEPEAAGDPQLRAARCLAEQGYAHGFDVGCASPEERARGLAAGIALYDKALGYGQQIPMEEKRGWYFTMATLYIRLDGIFLELGSEEQKRLPAFNRTLALLRQVLKSEDPRHRALAWCYLGMLLERKDTFSTTPMGVHDCGYSGTDPLDCFGKAIEIAKNQPPILNRLAKIFYFLGKQDMAIGTCNMALDVLRDPELNWQAYCTRAKRRGLTMLPRLVSNSWAQAVLPPRPPKVLEFQV

SEQ ID NO: 6241 - protein, 390 aa, Homo sapiens
MNGTRNWCTLVDVHPEDQAAGSVDILRLTLQGELTGDELEHIAQKAGRKTYAMVSSHSAGHSLASELVESHDGHEEIIKVYLKGRSGDKMIHEKNINQLKSEVQYIQEARNCLQKLREDISSKLDRNLGDSLHRQEIQVVLEKPNGFSQSPTALYSSPPEVDTCINEDVESLRKTVQDLLAKLQEAKRQHQSDCVAFEVTLSRYQREAEQSNVALQREEDRVEQKEAEVGELQRRLLGMETEHQALLAKVREGEVALEELRSNNADCQAEREKAATLEKEVAGLREKIHHLDDMLKSQQRKVRQMIEQLQNSKAVIQSKDATIQELKEKIAYLEAENLEMHDRMEHLIEKQISHGNFSTQARAKTENPGSIRISKPPSPKPMPVIRVVET

SEQ ID NO: 6242 - protein, 365 aa, Homo sapiens
MNGTRNWCTLVDVHPEDQAAAGRKTYAMVSSHSAGHSLASELVESHDGHEEIIKVYLKGRSGDKMIHEKNINQLKSEVQYIQEARNCLQKLREDISSKLDRNLGDSLHRQEIQVVLEKPNGFSQSPTALYSSPPEVDTCINEDVESLRKTVQDLLAKLQEAKRQHQSDCVAFEVTLSRYQREAEQSNVALQREEDRVEQKEAEVGELQRRLLGMETEHQALLAKVREGEVALEELRSNNADCQAEREKAATLEKEVAGLREKIHHLDDMLKSQQRKVRQMIEQLQNSKAVIQSKDATIQELKEKIAYLEAENLEMHDRMEHLIEKQISHGNFSTQARAKTENPGSIRISKPPSPKPMPVIRVVET

SEQ ID NO: 6243 - protein, 331 aa, Homo sapiens
MNGTRNWCTLVDVHPEDQAAVYLKGRSGDKMIHEKNINQLKSEVQYIQEARNCLQKLREDISSKLDRNLGDSLHRQEIQVVLEKPNGFSQSPTALYSSPPEVDTCINEDVESLRKTVQDLLAKLQEAKRQHQSDCVAFEVTLSRYQREAEQSNVALQREEDRVEQKEAEVGELQRRLLGMETEHQALLAKVREGEVALEELRSNNADCQAEREKAATLEKEVAGLREKIHHLDDMLKSQQRKVRQMIEQLQNSKAVIQSKDATIQELKEKIAYLEAENLEMHDRMEHLIEKQISHGNFSTQARAKTENPGSIRISKPPSPKPMPVIRVVET

SEQ ID NO: 6244 - protein, 204 aa, Homo sapiens
MVCGGFACSKNCLCALNLLYTLVSLLLIGIAAWGIGFGLISSLRVVGVVIAVGIFLFLIALVGLIGAVKHHQVLLFFYMIILLLVFIVQFSVSCACLALNQEQQGQLLEVGWNNTASARNDIQRNLNCCGFRSVNPNDTCLASCVKSDHSCSPCAPIIGEYAGEVLRFVGGIGLFFSFTEILGVWLTYRYRNQKDPRANPSAFL

SEQ ID NO: 6245 - protein, 525 aa, Homo sapiens
MVSRPEPEGEAMDAELAVAPPGCSHLGSFKVDNWKQNLRAIYQCFVWSGTAEARKRKAKSCICHVCGVHLNRLHSCLYCVFFGCFTKKHIHEHAKAKRHNLAIDLMYGGIYCFLCQDYIYDKDMEIIAKEEQRKAWKMQGVGEKFSTWEPTKRELELLKHNPKRRKITSNCTIGLRGLINLGNTCFMNCIVQALTHTPLLRDFFLSDRHRCEMQSPSSCLVCEMSSLFQEFYSGHRSPHIPYKLLHLVWTHARHLAGYEQQDAHEFLIAALDVLHRHCKGDDNGKKANNPNHCNCIIDQIFTGGLQSDVTCQVCHGVSTTIDPFWDISLDLPGSSTPFWPLSPGSEGNVVNGESHVSGTTTLTDCLRRFTRPEHLGSSAKIKCSGCHSYQESTKQLTMKKLPIVACFHLKRFEHSAKLRRKITTYVSFPLELDMTPFMASSKESRMNGQYQQPTDSLNNDNKYSLFAVVNHQGTLESGHYTSFIRQHKDQWFKCDDAIITKASIKDVLDSEGYLLFYHKQFLEYE

SEQ ID NO: 6246 - protein, 513 aa, Homo sapiens
MAPGWPSLSAGSRQEAPQLAAGGSAYQAVGRQFQPRATALQGPSQAKSCICHVCGVHLNRLHSCLYCVFFGCFTKKHIHEHAKAKRHNLAIDLMYGGIYCFLCQDYIYDKDMEIIAKEEQRKAWKMQGVGEKFSTWEPTKRELELLKHNPKRRKITSNCTIGLRGLINLGNTCFMNCIVQALTHTPLLRDFFLSDRHRCEMQSPSSCLVCEMSSLFQEFYSGHRSPHIPYKLLHLVWTHARHLAGYEQQDAHEFLIAALDVLHRHCKGDDNGKKANNPNHCNCIIDQIFTGGLQSDVTCQVCHGVSTTIDPFWDISLDLPGSSTPFWPLSPGSEGNVVNGESHVSGTTTLTDCLRRFTRPEHLGSSAKIKCSGCHSYQESTKQLTMKKLPIVACFHLKRFEHSAKLRRKITTYVSFPLELDMTPFMASSKESRMNGQYQQPTDSLNNDNKYSLFAVVNHQGTLESGHYTSFIRQHKDQWFKCDDAIITKASIKDVLDSEGYLLFYHKQFLEYE

SEQ ID NO: 6247 - protein, 317 aa, Homo sapiens
MASVIPASNRSMRSDRNTYVGKRFVHVKNPYLDLMDEDILYHLDLGTKTHNLPAMFGDVKFVCVGGSPNRMKAFALFMHKELGFEEAEEDIKDICAGTDRYCMYKTGPVLAISHGMGIPSISIMLHELIKLLHHARCCDVTIIRIGTSGGIGIAPGTVVITDIAVDSFFKPRFEQVILDNIVTRSTELDKELSEELFNCSKEIPNFPTLVGHTMCTYDFYEGQGRLDGALCSFSREKKLDYLKRAFKAGVRNIEMESTVFAAMCGLCGLKAAVVCVTLLDRLDCDQINLPHDVLVEYQQRPQLLISNFIRRRLGLCD

SEQ ID NO: 6248 - protein, 374 aa, Homo sapiens
MLAPGCELDPDQEVVRTRPEDVPASPSTSTMIVSVLRPPSHASCTACGTVTFHIVERMASVIPASNRSMRSDRNTYVGKRFVHVKNPYLDLMDEDILYHLDLGTKTHNLPAMFGDVKFVCVGGSPNRMKAFALFMHKELGFEEAEEDIKDICAGTDRYCMYKTGPVLAISHGMGIPSISIMLHELIKLLHHARCCDVTIIRIGTSGGIGIAPGTVVITDIAVDSFFKPRFEQVILDNIVTRSTELDKELSEELFNCSKEIPNFPTLVGHTMCTYDFYEGQGRLDGALCSFSREKKLDYLKRAFKAGVRNIEMESTVFAAMCGLCGLKAAVVCVTLLDRLDCDQINLPHDVLVEYQQRPQLLISNFIRRRLGLCD

SEQ ID NO: 6249 - protein, 162 aa, Homo sapiens
MAWGLPCHQNTAGANPHLFLGCYSTSSLQGLEYGGQRGDAHGKPGVLHGELEPHDHTSRLERHDLHSQLPTSVQVRHHWWEGALDLAKKRQQQTSINVFTTIKQGSRCDRWMVLGAISLLYNQEEAPDDRPLRARREVRSQHLSWAFPGTAGPGLVCAGDSQ

SEQ ID NO: 6250 - protein, 945 aa, Homo sapiens
MGARSGARGALLLALLLCWDPRLSQAGTDSGSEVLPDSFPSAPAEPLPYFLQEPQDAYIVKNKPVELRCRAFPATQIYFKCNGEWVSQNDHVTQEGLDEATGLRVREVQIEVSRQQVEELFGLEDYWCQCVAWSSAGTTKSRRAYVRIAYLRKNFDQEPLGKEVPLDHEVLLQCRPPEGVPVAEVEWLKNEDVIDPTQDTNFLLTIDHNLIIRQARLSDTANYTCVAKNIVAKRRSTTATVIVYVNGGWSSWAEWSPCSNRCGRGWQKRTRTCTNPAPLNGGAFCEGQAFQKTACTTICPVDGAWTEWSKWSACSTECAHWRSRECMAPPPQNGGRDCSGTLLDSKNCTDGLCMQNKKTLSDPNSHLLEASGDAALYAGLVVAIFVVVAILMAVGVVVYRRNCRDFDTDITDSSAALTGGFHPVNFKTARPSNPQLLHPSVPPDLTASAGIYRGPVYALQDSTDKIPMTNSPLLDPLPSLKVKVYSSSTTGSGPGLADGADLLGVLPPGTYPSDFARDTHFLHLRSASLGSQQLLGLPRDPGSSVSGTFGCLGGRLSIPGTGVSLLVPNGAIPQGKFYEMYLLINKAESTLPLSEGTQTVLSPSVTCGPTGLLLCRPVILTMPHCAEVSARDWIFQLKTQAHQGHWEEVVTLDEETLNTPCYCQLEPRACHILLDQLGTYVFTGESYSRSAVKRLQLAVFAPALCTSLEYSLRVYCLEDTPVALKEVLELERTLGGYLVEEPKPLMFKDSYHNLRLSLHDLPHAHWRSKLLAKYQEIPFYHIWSGSQKALHCTFTLERHSLASTELTCKICVRQVEGEGQIFQLHTTLAETPAGSLDTLCSAPGSTVTTQLGPYAFKIPLSIRQKICNSLDAPNSRGNDWRMLAQKLSMDRYLNYFATKASPTGVILDLWEALQQDDGDLNSLASALEEMGKSEMLVAVATDGDC

SEQ ID NO: 6251 - protein, 934 aa, Homo sapiens
MGARSGARGALLLALLLCWDPRLSQAGTDSGSEVLPDSFPSAPAEPLPYFLQEPQDAYIVKNKPVELRCRAFPATQIYFKCNGEWVSQNDHVTQEGLDEATGLRVREVQIEVSRQQVEELFGLEDYWCQCVAWSSAGTTKSRRAYVRIAYLRKNFDQEPLGKEVPLDHEVLLQCRPPEGVPVAEVEWLKNEDVIDPTQDTNFLLTIDHNLIIRQARLSDTANYTCVAKNIVAKRRSTTATVIVYVNGGWSSWAEWSPCSNRCGRGWQKRTRTCTNPAPLNGGAFCEGQAFQKTACTTICPVDGAWTEWSKWSACSTECAHWRSRECMAPPPQNGGRDCSGTLLDSKNCTDGLCMQMLEASGDAALYAGLVVAIFVVVAILMAVGVVVYRRNCRDFDTDITDSSAALTGGFHPVNFKTARPSNPQLLHPSVPPDLTASAGIYRGPVYALQDSTDKIPMTNSPLLDPLPSLKVKVYSSSTTGSGPGLADGADLLGVLPPGTYPSDFARDTHFLHLRSASLGSQQLLGLPRDPGSSVSGTFGCLGGRLSIPGTGVSLLVPNGAIPQGKFYEMYLLINKAESTLPLSEGTQTVLSPSVTCGPTGLLLCRPVILTMPHCAEVSARDWIFQLKTQAHQGHWEEVVTLDEETLNTPCYCQLEPRACHILLDQLGTYVFTGESYSRSAVKRLQLAVFAPALCTSLEYSLRVYCLEDTPVALKEVLELERTLGGYLVEEPKPLMFKDSYHNLRLSLHDLPHAHWRSKLLAKYQEIPFYHIWSGSQKALHCTFTLERHSLASTELTCKICVRQVEGEGQIFQLHTTLAETPAGSLDTLCSAPGSTVTTQLGPYAFKIPLSIRQKICNSLDAPNSRGNDWRMLAQKLSMDRYLNYFATKASPTGVILDLWEALQQDDGDLNSLASALEEMGKSEMLVAVATDGDC

SEQ ID NO: 6252 - protein, 472 aa, Homo sapiens
MAGPGWGPPRLDGFILTERLGSGTYATVYKAYAKKDTREVVAIKCVAKKSLNKASVENLLTEIEILKGIRHPHIVQLKDFQWDSDNIYLIMEFCAGGDLSRFIHTRRILPEKVARVFMQQLASALQFLHERNISHLDLKPQNILLSSLEKPHLKLADFGFAQHMSPWDEKHVLRGSPLYMAPEMVCQRQYDARVDLWSMGVILYEALFGQPPFASRSFSELEEKIRSNRVIELPLRPLLSRDCRDLLQRLLERDPSRRISFQDFFAHPWVDLEHMPSGESLGRATALVVQAVKKDQEGDSAAALSLYCKALDFFVPALHYEVDAQRKEAIKAKVGQYVSRAEELKAIVSSSNQALLRQGTSARDLLREMARDKPRLLAALEVASAAMAKEEAAGGEQDALDLYQHSLGELLLLLAAEPPGRRRELLHTEVQNLMARAEYLKEQVKMRESRWEADTLDKEGLSESVRSSCTLQ

SEQ ID NO: 6253 - protein, 214 aa, Homo sapiens
MAGPGWGPPRLDGFILTERLGSGTYATVYKAYAKKDTREVVAIKCVAKKSLNKASVENLLTEIEILKGIRHPHIVQLKDFQWDSDNIYLIMEFCAGGDLSRFIHTRRILPEKVARVFMQQLASALQFLHERNISHLDLKPQNILLSSLEKPHLKLADFGFAQHMSPWDEKHVLRGSPLYMAPEMVCQRQYDARVDLWSMGVILYGETSFPCFSP

SEQ ID NO: 6254 - protein, 470 aa, Homo sapiens
MAGPGWGPPRLDGFILTERLGSGTYATVYKAYAKKDTREVVAIKCVAKKSLNKASVENLLTEIEILKGIRHPHIVQLKDFQWDSDNIYLIMEFCAGGDLSRFIHTRRILPEKVARVFMQQLASALQFLHERNISHLDLKPQNILLSSLEKPHLKLADFGFAQHMSPWDEKHVLRGSPLYMAPEMVCQRQYDARVDLWSMGVILYEALFGQPPFASRSFSELEEKIRSNRVIELPLRPLLSRDCRDLLQRLLERDPSRRISFQDFFAHPWVDLEHMPSGESLGRATALVVQAVKKDQEGDSAAALSLYCKALDFFVPALHYEVDAQRKEAIKAKVGQYVSRAEELKAIVSSSNQALLRQGTSARDLLREMARDKPRLLAALEVASAAMAKEEAAGGEQDALDLYQHSLGELLLLLAAEPPGRRRELLHTEVQNLMARAEYLKEQMRESRWEADTLDKEGLSESVRSSCTLQ

SEQ ID NO: 6255 - protein, 483 aa, Homo sapiens
MQRNGSASRGLEKTRLRLCREARIPESAFLTGLTRESWEARCWCAKDTREVVAIKCVAKKSLNKASVENLLTEIEILKGIRHPHIVQLKDFQWDSDNIYLIMEFCAGGDLSRFIHTRRILPEKVARVFMQQLASALQFLHERNISHLDLKPQNILLSSLEKPHLKLADFGFAQHMSPWDEKHVLRGSPLYMAPEMVCQRQYDARVDLWSMGVILYEALFGQPPFASRSFSELEEKIRSNRVIELPLRPLLSRDCRDLLQRLLERDPSRRISFQDFFAHPWVDLEHMPSGESLGRATALVVQAVKKDQEGDSAAALSLYCKALDFFVPALHYEVDAQRKEAIKAKVGQYVSRAEELKAIVSSSNQALLRQGTSARDLLREMARDKPRLLAALEVASAAMAKEEAAGGEQDALDLYQHSLGELLLLLAAEPPGRRRELLHTEVQNLMARAEYLKEQVKMRESRWEADTLDKEGLSESVRSSCTLQ

SEQ ID NO: 6256 - protein, 1235 aa, Homo sapiens
MFGDLFEEEYSTVSNNQYGKGKKLKTKALEPPAPREFTNLSGIRNQGGTCYLNSLLQTLHFTPEFREALFSLGPEELGLFEDKDKPDAKVRIIPLQLQRLFAQLLLLDQEAASTADLTDSFGWTSNEEMRQHDVQELNRILFSALETSLVGTSGHDLIYRLYHGTIVNQIVCKECKNVSERQEDFLDLTVAVKNVSGLEDALWNMYVEEEVFDCDNLYHCGTCDRLVKAAKSAKLRKLPPFLTVSLLRFNFDFVKCERYKETSCYTFPLRINLKPFCEQSELDDLEYIYDLFSVIIHKGGCYGGHYHVYIKDVDHLGNWQFQEEKSKPDVNLKDLQSEEEIDHPLMILKAILLEENNLIPVDQLGQKLLKKIGISWNKKYRKQHGPLRKFLQLHSQIFLLSSDESTVRLLKNSSLQAESDFQRNDQQIFKMLPPESPGLNNSISCPHWFDINDSKVQPIREKDIEQQFQGKESAYMLFYRKSQLQRPPEARANPRYGVPCHLLNEMDAANIELQTKRAECDSANNTFELHLHLGPQYHFFNGALHPVVSQTESVWDLTFDKRKTLGDLRQSIFQLLEFWEGDMVLSVAKLVPAGLHIYQSLGGDELTLCETEIADGEDIFVWNGVEVGGVHIQTGIDCEPLLLNVLHLDTSSDGEKCCQVIESPHVFPANAEVGTVLTALAIPAGVIFINSAGCPGGEGWTAIPKEDMRKTFREQGLRNGSSILIQDSHDDNSLLTKEEKWVTSMNEIDWLHVKNLCQLESEEKQVKISATVNTMVFDIRIKAIKELKLMKELADNSCLRPIDRNGKLLCPVPDSYTLKEAELKMGSSLGLCLGKAPSSSQLFLFFAMGSDVQPGTEMEIVVEETISVRDCLKLMLKKSGLQGDAWHLRKMDWCYEAGEPLCEEDATLKELLICSGDTLLLIEGQLPPLGFLKVPIWWYQLQGPSGHWESHQDQTNCTSSWGRVWRATSSQGASGNEPAQVSLLYLGDIEISEDATLAELKSQAMTLPPFLEFGVPSPAHLRAWTVERKRPGRLLRTDRQPLREYKLGRRIEICLEPLQKGENLGPQDVLLRTQVRIPGERTYAPALDLVWNAAQGGTAGSLRQRVADFYRLPVEKIEIAKYFPEKFEWLPISSWNQQITKRKKKKKQDYLQGAPYYLKDGDTIGVKNLLIDDDDDFSTIRDDTGKEKQKQRALGRRKSQEALHEQSSYILSSAETPARPRAPETSLSIHVGSFR

SEQ ID NO: 6257 - protein, 163 aa, Homo sapiens
MGSSLGLCLGKAPSSSQLFLFFAMGSDVQPGTEMEIVVEETISVRDCLKLMLKKSGLQGDAWHLRKMDWCYEAGEPLCEEDATLKELLICSGDTLLLIEGQLPPLGFLKVPIWWYQLQGPSGHWESHQDQTNCTSSWGRVWRATSSQGENRMGFQQPVHHKEK

SEQ ID NO: 6258 - protein, 1247 aa, Homo sapiens
MSLFLRVVFSFTMFGDLFEEEYSTVSNNQYGKGKKLKTKALEPPAPREFTNLSGIRNQGGTCYLNSLLQTLHFTPEFREALFSLGPEELGLFEDKDKPDAKVRIIPLQLQRLFAQLLLLDQEAASTADLTDSFGWTSNEEMRQHDVQELNRILFSALETSLVGTSGHDLIYRLYHGTIVNQIVCKECKNVSERQEDFLDLTVAVKNVSGLEDALWNMYVEEEVFDCDNLYHCGTCDRLVKAAKSAKLRKLPPFLTVSLLRFNFDFVKCERYKETSCYTFPLRINLKPFCEQSELDDLEYIYDLFSVIIHKGGCYGGHYHVYIKDVDHLGNWQFQEEKSKPDVNLKDLQSEEEIDHPLMILKAILLEENNLIPVDQLGQKLLKKIGISWNKKYRKQHGPLRKFLQLHSQIFLLSSDESTVRLLKNSSLQAESDFQRNDQQIFKMLPPESPGLNNSISCPHWFDINDSKVQPIREKDIEQQFQGKESAYMLFYRKSQLQRPPEARANPRYGVPCHLLNEMDAANIELQTKRAECDSANNTFELHLHLGPQYHFFNGALHPVVSQTESVWDLTFDKRKTLGDLRQSIFQLLEFWEGDMVLSVAKLVPAGLHIYQSLGGDELTLCETEIADGEDIFVWNGVEVGGVHIQTGIDCEPLLLNVLHLDTSSDGEKCCQVIESPHVFPANAEVGTVLTALAIPAGVIFINSAGCPGGEGWTAIPKEDMRKTFREQGLRNGSSILIQDSHDDNSLLTKEEKWVTSMNEIDWLHVKNLCQLESEEKQVKISATVNTMVFDIRIKAIKELKLMKELADNSCLRPIDRNGKLLCPVPDSYTLKEAELKMGSSLGLCLGKAPSSSQLFLFFAMGSDVQPGTEMEIVVEETISVRDCLKLMLKKSGLQGDAWHLRKMDWCYEAGEPLCEEDATLKELLICSGDTLLLIEGQLPPLGFLKVPIWWYQLQGPSGHWESHQDQTNCTSSWGRVWRATSSQGASGNEPAQVSLLYLGDIEISEDATLAELKSQAMTLPPFLEFGVPSPAHLRAWTVERKRPGRLLRTDRQPLREYKLGRRIEICLEPLQKGENLGPQDVLLRTQVRIPGERTYAPALDLVWNAAQGGTAGSLRQRVADFYRLPVEKIEIAKYFPEKFEWLPISSWNQQITKRKKKKKQDYLQGAPYYLKDGDTIGVKNLLIDDDDDFSTIRDDTGKEKQKQRALGRRKSQEALHEQSSYILSSAETPARPRAPETSLSIHVGSFR

SEQ ID NO: 6259 - protein, 124 aa, Homo sapiens
MRQAGRAALLAALLLLVQLCPGSSQRSPEAAGVQDPSLRWSPGARNQGGGARALLLLLAERFPRRAGPGRLGLGTAGERPRRDNPSLSIDLTFHLLRTLLELARTQSQRERAEQNRIIFDSVGK

SEQ ID NO: 6260 - protein, 601 aa, Homo sapiens
MAEPSGAETRPPIRVTVKTPKDKEEIVICDRASVKEFKEEISRRFKAQQDQLVLIFAGKILKDGDTLNQHGIKDGLTVHLVIKTPQKAQDPAAATASSPSTPDPASAPSTTPASPATPAQPSTSGSASSDAGSGSRRSSGGGPSPGAGEGSPSATASILSGFGGILGLGSLGLGSANFMELQQQMQRQLMSNPEMLSQIMENPLVQDMMSNPDLMRHMIMANPQMQQLMERNPEISHMLNNPELMRQTMELARNPAMMQEMMRNQDRALSNLESIPGGYNALRRMYTDIQEPMFSAAREQFGNNPFSSLAGNSDSSSSQPLRTENREPLPNPWSPSPPTSQAPGSGGEGTGGSGTSQVHPTVSNPFGINAASLGSGMFNSPEMQALLQQISENPQLMQNVISAPYMRSMMQTLAQNPDFAAQMMVNVPLFAGNPQLQEQLRLQLPVFLQQMQNPESLSILTNPRAMQALLQIQQGLQTLQTEAPGLVPSLGSFGISRTPAPSAGSNAGSTPEAPTSSPATPATSSPTGASSAQQQLMQQMIQLLAGSGNSQVQTPEVRFQQQLEQLNSMGFINREANLQALIATGGDINAAIERLLGSQLS

SEQ ID NO: 6261 - protein, 226 aa, Homo sapiens
MAEPSGAETRPPIRVTVKTPKDKEEIVICDRASVKEFKEEISRRFKAQQDQLVLIFAGKILKDGDTLNQHGIKDGLTVHLVIKTPQKAQDPAPPAAPSLPAADAEPRVTLHPYQSPSHAGIAADPAGTTDLADRGPWAGTQPWLLWDIPDPSTLSRQQRRVYARGPHFLTSHASHIFSNRGFQRPAATHAADDPAFGWKWKLTGADARSEISAAAGAAQLHGLHQS

SEQ ID NO: 6262 - protein, 1281 aa, Homo sapiens
MVRKKNPPLRNVASEGEGQILEPIGTESKVSGKNKEFSADQMSENTDQSDAAELNHKEEHSLHVQDPSSSSKKDLKSAVLSEKAGFNYESPSKGGNFPSFPHDEVTDRNMLAFSSPAAGGVCEPLKSPQRAEADDPQDMACTPSGDSLETKEDQKMSPKATEETGQAQSGQANCQGLSPVSVASKNPQVPSDGGVRLNKSKTDLLVNDNPDPAPLSPELQDFKCNICGYGYYGNDPTDLIKHFRKYHLGLHNRTRQDAELDSKILALHNMVQFSHSKDFQKVNRSVFSGVLQDINSSRPVLLNGTYDVQVTSGGTFIGIGRKTPDCQGNTKYFRCKFCNFTYMGNSSTELEQHFLQTHPNKIKASLPSSEVAKPSEKNSNKSIPALQSSDSGDLGKWQDKITVKAGDDTPVGYSVPIKPLDSSRQNGTEATSYYWCKFCSFSCESSSSLKLLEHYGKQHGAVQSGGLNPELNDKLSRGSVINQNDLAKSSEGETMTKTDKSSSGAKKKDFSSKGAEDNMVTSYNCQFCDFRYSKSHGPDVIVVGPLLRHYQQLHNIHKCTIKHCPFCPRGLCSPEKHLGEITYPFACRKSNCSHCALLLLHLSPGAAGSSRVKHQCHQCSFTTPDVDVLLFHYESVHESQASDVKQEANHLQGSDGQQSVKESKEHSCTKCDFITQVEEEISRHYRRAHSCYKCRQCSFTAADTQSLLEHFNTVHCQEQDITTANGEEDGHAISTIKEEPKIDFRVYNLLTPDSKMGEPVSESVVKREKLEEKDGLKEKVWTESSSDDLRNVTWRGADILRGSPSYTQASLGLLTPVSGTQEQTKTLRDSPNVEAAHLARPIYGLAVETKGFLQGAPAGGEKSGALPQQYPASGENKSKDESQSLLRRRRGSGVFCANCLTTKTSLWRKNANGGYVCNACGLYQKLHSTPRPLNIIKQNNGEQIIRRRTRKRLNPEALQAEQLNKQQRGSNEEQVNGSPLERRSEDHLTESHQREIPLPSLSKYEAQGSLTKSHSAQQPVLVSQTLDIHKRMQPLHIQIKSPQESTGDPGNSSSVSEGKGSSERGSPIEKYMRPAKHPNYSPPGSPIEKYQYPLFGLPFVHNDFQSEADWLRFWSKYKLSVPGNPHYLSHVPGLPNPCQNYVPYPTFNLPPHFSAVGSDNDIPLDLAIKHSRPGPTANGASKEKTKAPPNVKNEGPLNVVKTEKVDRSTQDELSTKCVHCGIVFLDEVMYALHMSCHGDSGPFQCSICQHLCTDKYDFTTHIQRGLHRNNAQVEKNGKPKE

SEQ ID NO: 6263 - protein, 1294 aa, Homo sapiens
MPYEVNAGYDFTNMVRKKNPPLRNVASEGEGQILEPIGTESKVSGKNKEFSADQMSENTDQSDAAELNHKEEHSLHVQDPSSSSKKDLKSAVLSEKAGFNYESPSKGGNFPSFPHDEVTDRNMLAFSSPAAGGVCEPLKSPQRAEADDPQDMACTPSGDSLETKEDQKMSPKATEETGQAQSGQANCQGLSPVSVASKNPQVPSDGGVRLNKSKTDLLVNDNPDPAPLSPELQDFKCNICGYGYYGNDPTDLIKHFRKYHLGLHNRTRQDAELDSKILALHNMVQFSHSKDFQKVNRSVFSGVLQDINSSRPVLLNGTYDVQVTSGGTFIGIGRKTPDCQGNTKYFRCKFCNFTYMGNSSTELEQHFLQTHPNKIKASLPSSEVAKPSEKNSNKSIPALQSSDSGDLGKWQDKITVKAGDDTPVGYSVPIKPLDSSRQNGTEATSYYWCKFCSFSCESSSSLKLLEHYGKQHGAVQSGGLNPELNDKLSRGSVINQNDLAKSSEGETMTKTDKSSSGAKKKDFSSKGAEDNMVTSYNCQFCDFRYSKSHGPDVIVVGPLLRHYQQLHNIHKCTIKHCPFCPRGLCSPEKHLGEITYPFACRKSNCSHCALLLLHLSPGAAGSSRVKHQCHQCSFTTPDVDVLLFHYESVHESQASDVKQEANHLQGSDGQQSVKESKEHSCTKCDFITQVEEEISRHYRRAHSCYKCRQCSFTAADTQSLLEHFNTVHCQEQDITTANGEEDGHAISTIKEEPKIDFRVYNLLTPDSKMGEPVSESVVKREKLEEKDGLKEKVWTESSSDDLRNVTWRGADILRGSPSYTQASLGLLTPVSGTQEQTKTLRDSPNVEAAHLARPIYGLAVETKGFLQGAPAGGEKSGALPQQYPASGENKSKDESQSLLRRRRGSGVFCANCLTTKTSLWRKNANGGYVCNACGLYQKLHSTPRPLNIIKQNNGEQIIRRRTRKRLNPEALQAEQLNKQQRGSNEEQVNGSPLERRSEDHLTESHQREIPLPSLSKYEAQGSLTKSHSAQQPVLVSQTLDIHKRMQPLHIQIKSPQESTGDPGNSSSVSEGKGSSERGSPIEKYMRPAKHPNYSPPGSPIEKYQYPLFGLPFVHNDFQSEADWLRFWSKYKLSVPGNPHYLSHVPGLPNPCQNYVPYPTFNLPPHFSAVGSDNDIPLDLAIKHSRPGPTANGASKEKTKAPPNVKNEGPLNVVKTEKVDRSTQDELSTKCVHCGIVFLDEVMYALHMSCHGDSGPFQCSICQHLCTDKYDFTTHIQRGLHRNNAQVEKNGKPKE

SEQ ID NO: 6264 - protein, 1285 aa, Homo sapiens
MQSNMVRKKNPPLRNVASEGEGQILEPIGTESKVSGKNKEFSADQMSENTDQSDAAELNHKEEHSLHVQDPSSSSKKDLKSAVLSEKAGFNYESPSKGGNFPSFPHDEVTDRNMLAFSSPAAGGVCEPLKSPQRAEADDPQDMACTPSGDSLETKEDQKMSPKATEETGQAQSGQANCQGLSPVSVASKNPQVPSDGGVRLNKSKTDLLVNDNPDPAPLSPELQDFKCNICGYGYYGNDPTDLIKHFRKYHLGLHNRTRQDAELDSKILALHNMVQFSHSKDFQKVNRSVFSGVLQDINSSRPVLLNGTYDVQVTSGGTFIGIGRKTPDCQGNTKYFRCKFCNFTYMGNSSTELEQHFLQTHPNKIKASLPSSEVAKPSEKNSNKSIPALQSSDSGDLGKWQDKITVKAGDDTPVGYSVPIKPLDSSRQNGTEATSYYWCKFCSFSCESSSSLKLLEHYGKQHGAVQSGGLNPELNDKLSRGSVINQNDLAKSSEGETMTKTDKSSSGAKKKDFSSKGAEDNMVTSYNCQFCDFRYSKSHGPDVIVVGPLLRHYQQLHNIHKCTIKHCPFCPRGLCSPEKHLGEITYPFACRKSNCSHCALLLLHLSPGAAGSSRVKHQCHQCSFTTPDVDVLLFHYESVHESQASDVKQEANHLQGSDGQQSVKESKEHSCTKCDFITQVEEEISRHYRRAHSCYKCRQCSFTAADTQSLLEHFNTVHCQEQDITTANGEEDGHAISTIKEEPKIDFRVYNLLTPDSKMGEPVSESVVKREKLEEKDGLKEKVWTESSSDDLRNVTWRGADILRGSPSYTQASLGLLTPVSGTQEQTKTLRDSPNVEAAHLARPIYGLAVETKGFLQGAPAGGEKSGALPQQYPASGENKSKDESQSLLRRRRGSGVFCANCLTTKTSLWRKNANGGYVCNACGLYQKLHSTPRPLNIIKQNNGEQIIRRRTRKRLNPEALQAEQLNKQQRGSNEEQVNGSPLERRSEDHLTESHQREIPLPSLSKYEAQGSLTKSHSAQQPVLVSQTLDIHKRMQPLHIQIKSPQESTGDPGNSSSVSEGKGSSERGSPIEKYMRPAKHPNYSPPGSPIEKYQYPLFGLPFVHNDFQSEADWLRFWSKYKLSVPGNPHYLSHVPGLPNPCQNYVPYPTFNLPPHFSAVGSDNDIPLDLAIKHSRPGPTANGASKEKTKAPPNVKNEGPLNVVKTEKVDRSTQDELSTKCVHCGIVFLDEVMYALHMSCHGDSGPFQCSICQHLCTDKYDFTTHIQRGLHRNNAQVEKNGKPKE

SEQ ID NO: 6265 - protein, 1644 aa, Homo sapiens
MEESKTLKSENHEPKKNVICEESKAVQVIGNQTLKARNDKSVKEIENSSPNRNSSKKNKQNDICIEKTEVKSCKVNAANLPGPKDLGLVLRDQSHCKAKKFPNSPVKAEKATISQAKSEKATSLQAKAEKSPKSPNSVKAEKASSYQMKSEKVPSSPAEAEKGPSLLLKDMRQKTELQQIGKKIPSSFTSVDKVNIEAVGGEKCALQNSPRSQKQQTCTDNTGDSDDSASGIEDVSDDLSKMKNDESNKENSSEMDYLENATVIDESALTPEQRLGLKQAEERLERDHIFRLEKRSPEYTNCRYLCKLCLIHIENIQGAHKHIKEKRHKKNILEKQEESELRSLPPPSPAHLAALSVAVIELAKEHGITDDDLRVRQEIVEEMSKVITTFLPECSLRLYGSSLTRFALKSSDVNIDIKFPPKMNHPDLLIKVLGILKKNVLYVDVESDFHAKVPVVVCRDRKSGLLCRVSAGNDMACLTTDLLTALGKIEPVFIPLVLAFRYWAKLCYIDSQTDGGIPSYCFALMVMFFLQQRKPPLLPCLLGSWIEGFDPKRMDDFQLKGIVEEKFVKWECNSSSATEKNSIAEENKAKADQPKDDTKKTETDNQSNAMKEKHGKSPLALETPNRVSLGQLWLELLKFYTLDFALEEYVICVRIQDILTRENKNWPKRRIAIEDPFSVKRNVARSLNSQLVYEYVVERFRAAYRYFACPQTKGGNKSTVDFKKREKGKISNKKPVKSNNMATNGCILLGETTEKINAEREQPVQCDEMDCTSQRCIIDNNNLLVNELDFADHGQDSSSLSTSKSSEIEPKLDKKQDDLAPSETCLKKELSQCNCIDLSKSPDPDKSTGTDCRSNLETESSHQSVCTDTSATSCNCKATEDASDLNDDDNLPTQELYYVFDKFILTSGKPPTIVCSICKKDGHSKNDCPEDFRKIDLKPLPPMTNRFREILDLVCKRCFDELSPPCSEQHNREQILIGLEKFIQKEYDEKARLCLFGSSKNGFGFRDSDLDICMTLEGHENAEKLNCKEIIENLAKILKRHPGLRNILPITTAKVPIVKFEHRRSGLEGDISLYNTLAQHNTRMLATYAAIDPRVQYLGYTMKVFAKRCDIGDASRGSLSSYAYILMVLYFLQQRKPPVIPVLQEIFDGKQIPQRMVDGWNAFFFDKTEELKKRLPSLGKNTESLGELWLGLLRFYTEEFDFKEYVISIRQKKLLTTFEKQWTSKCIAIEDPFDLNHNLGAGVSRKMTNFIMKAFINGRKLFGTPFYPLIGREAEYFFDSRVLTDGELAPNDRCCRVCGKIGHYMKDCPKRKSLLFRLKKKDSEEEKEGNEEEKDSRDVLDPRDLHDTRDFRDPRDLRCFICGDAGHVRRECPEVKLARQRNSSVAAAQLVRNLVNAQQVAGSAQQQGDQSIRTRQSSECSESPSYSPQPQPFPQNSSQSAAITQPSSQPGSQPKLGPPQQGAQPPHQVQMPLYNFPQSPPAQYSPMHNMGLLPMHPLQIPAPSWPIHGPVIHSAPGSAPSNIGLNDPSIIFAQPAARPVAIPNTSHDGHWPRTVAPNSLVNSGAVGNSEPGFRGLTPPIPWEHAPRPHFPLVPASWPYGLHQNFMHQGNARFQPNKPFYTQDRCATRRCRERCPHPPRGNVSE

SEQ ID NO: 6266 - protein, 719 aa, Homo sapiens
MEESKTLKSENHEPKKNVICEESKAVQVIGNQTLKARNDKSVKEIENSSPNRNSSKKNKQNDICIEKTEVKSCKVNAANLPGPKDLGLVLRDQSHCKAKKFPNSPVKAEKATISQAKSEKATSLQAKAEKSPKSPNSVKAEKASSYQMKSEKVPSSPAEAEKGPSLLLKDMRQKTELQQIGKKIPSSFTSVDKVNIEAVGGEKCALQNSPRSQKQQTCTDNTGDSDDSASGIEDVSDDLSKMKNDESNKENSSEMDYLENATVIDESALTPEQRLGLKQAEERLERDHIFRLEKRSPEYTNCRYLCKLCLIHIENIQGAHKHIKEKRHKKNILEKQEESELRSLPPPSPAHLAALSVAVIELAKEHGITDDDLRVRQEIVEEMSKVITTFLPECSLRLYGSSLTRFALKSSDVNIDIKFPPKMNHPDLLIKVLGILKKNVLYVDVESDFHAKVPVVVCRDRKSGLLCRVSAGNDMACLTTDLLTALGKIEPVFIPLVLAFRYWAKLCYIDSQTDGGIPSYCFALMVMFFLQQRKPPLLPCLLGSWIEGFDPKRMDDFQLKGIVEEKFVKWECNSSSATEKNSIAEENKAKADQPKDDTKKTETDNQSNAMKEKHGKSPLALETPNRVSLGQLWLELLKFYTLDFALEEYVICVRIQDILTRENKNWPKRRIAIEDPFSVKRNVALQPGRQEWKLCLKKKKKNSVKYTFIYEIQVSLFVI

SEQ ID NO: 6267 - protein, 205 aa, Homo sapiens
MTGLALLYSGVFVAFWACALAVGVCYTIFDLGFRFDVAWFLTETSPFMWSNLGIGLAISLSVVGAAWGIYITGSSIIGGGVKAPRIKTKNLVSIIFCEAVAIYGIIMAIVISNMAEPFSATDPKAIGHRNYHAGYSMFGAGLTVGLSNLFCGVCVGIVGSGAALADAQNPSLFVKILIVEIFGSAIGLFGVIVAILQTSRVKMGD

SEQ ID NO: 6268 - protein, 158 aa, Homo sapiens
MWSNLGIGLAISLSVVGAAWGIYITGSSIIGGGVKAPRIKTKNLVSIIFCEAVAIYGIIMAIVISNMAEPFSATDPKAIGHRNYHAGYSMFGAGLTVGLSNLFCGVCVGIVGSGAALADAQNPSLFVKILIVEIFGSAIGLFGVIVAILQTSRVKMGD

SEQ ID NO: 6269 - protein, 450 aa, Homo sapiens
MAASKTQGAVARMQEDRDGSCSTVGGVGYGDSKDCILEPLSLPESPGGTTTLEGSPSVPCIFCEEHFPVAEQDKLLKHMIIEHKIVIADVKLVADFQRYILYWRKRFTEQPITDFCSVIRINSTAPFEEQENYFLLCDVLPEDRILREELQKQRLREILEQQQQERNDTNFHGVCMFCNEEFLGNRSVILNHMAREHAFNIGLPDNIVNCNEFLCTLQKKLDNLQCLYCEKTFRDKNTLKDHMRKKQHRKINPKNREYDRFYVINYLELGKSWEEVQLEDDRELLDHQEDDWSDWEEHPASAVCLFCEKQAETIEKLYVHMEDAHEFDLLKIKSELGLNFYQQVKLVNFIRRQVHQCRCYGCHVKFKSKADLRTHMEETKHTSLLPDRKTWDQLEYYFPTYENDTLLCTLSDSESDLTAQEQNENVPIISEDTSKLYALKQSSILNQLLL

SEQ ID NO: 6270 - protein, 364 aa, Homo sapiens
MSLAGGRAPRKTAGNRLSGLLEAEEEDEFYQTTYGGFTEESGDDEYQGDQSDTEDEVDSDFDIDEGDEPSSDGEAEEPRRKRRVVTKAYKEPLKSLRPRKVNTPAGSSQKAREEKALLPLELQDDGSDSRKSMRQSTAEHTRQTFLRVQERQGQSRRRKGPHCERPLTQEELLREAKITEELNLRSLETYERLEADKKKQVHKKRKCPGPIITYHSVTVPLVGEPGPKEENVDIEGLDPAPSVSALTPHAGTGPVNPPARCSRTFITFSDDATFEEWFPQGRPPKVPVREVCPVTHRPALYRDPVTDIPYATARAFKIIREAYKKYITAHGLPPTASALGPGPPPPEPLPGSGPRALRQKIVIK

SEQ ID NO: 6271 - protein, 375 aa, Homo sapiens
MSLAGGRAPRKTAGNRLSGLLEAEEEDEFYQTTYGGFTEESGDDEYQGDQSDTEDEVDSDFDIDEGDEPSSDGEAEEPRRKRRVVTKAYKEPLKSLRPRKVNTPAGSSQKAREEKALLPLELQDDGSDSRKSMRQSTAEHTRQTFLRVQERQGQSRRRKGPHCERPLTQEELLREAKITEELNLRSLETYERLEADKKKQVHKKRKCPGPIITYHSVTVPLVGEPGPKEENVDIEGSLCFSLSFVLRLDPAPSVSALTPHAGTGPVNPPARCSRTFITFSDDATFEEWFPQGRPPKVPVREVCPVTHRPALYRDPVTDIPYATARAFKIIREAYKKYITAHGLPPTASALGPGPPPPEPLPGSGPRALRQKIVIK

SEQ ID NO: 6272 - protein, 208 aa, Homo sapiens
MEMTKLFSYIVIKNVYYPQVSFGISANTFLLLFHIFTFAYTHRLKPIDMTISHLPLIHILLLFTQAILVSSDLFESWNIQNNDLKCKIITFLNRVMRGVSICTTCLLSVLQAITISPSTSFLEKFKHISANHTLGFILFSWVLNMFITNNLLLFIVPTPNRIGASLLFVTEHCYVLPMSYTHRSLFFILMVLRDVIFIGLMVLSSGYG

SEQ ID NO: 6273 - protein, 218 aa, Homo sapiens
MKGLRVAKAFQPSQGCSRQALGHLSGRGPSPRSEMNSSVGDLGVGGCSLWDDPARFIVVPAAYALALGLGLPANVAALAMFIRSGGRLGQALLLYLFNLALVDEFFTLTLQLWLTYYLGLARRPPATRPGPPTTCPPMRRWSSPRSSACAAAASYAVPGPGRLPAWPGAYGAPRALPAPSPGWRAWPLPAWSTAGQARGWPPPRWPSRPPSCWCSRPT

SEQ ID NO: 6274 - protein, 1029 aa, Homo sapiens
MTRENVAHNALRQEGLVKGKDDTWKWGTSFQGSSSSVWETSHLHFRQLRYHETSGPQEALSRLRELCRRWLRPEARTKAQILELLVLEQFLSILPGEIRTWVQLHHPGSGEEAVALVEELQKDLDGPAIQVPVLVKDQDTLQKVVSAPGTTLPPVLPGSHIAAEICPHPPTDLVAFNLQDPQHDSPAPEASALSQEENPRNQLMALMLLTAQPQELVMFEEVSVCFTSEEWACLGPIQRALYWDVMLENYGNVTSLEWETMTENEEVTSKPSSSQRADSHKGTSKRLQGSVPQVLDFEEECEWQVLASQWGNETDERADTVKKVSLCERDKKKRTPPEKQGQKWKELGDSLTFGSAISESLIGTEGKKFYKCDMCCKHFNKISHLINHRRIHTGEKPHKCKECGKGFIQRSSLLMHLRNHSGEKPYKCNECGKAFSQSAYLLNHQRIHTGEKPYKCKECGKGFYRHSGLIIHLRRHSGERPYKCNECGKVFSQNAYLIDHQRLHKGEEPYKCNKCQKAFILKKSLILHQRIHSGEKPYKCDECGKTFAQTTYLIDHQRLHSAENPYKCKECGKVFIRSKSLLLHQRVHTEKKTFGCKKCGKIFSSKSNFIDHKRMHSREKPYKCTECGKAFTQSAYLFDHQRLHNGEKPYECNECGKVFILKKSLILHQRFHTGENLYECKDCGKVFGSNRNLIDHERLHNGEKPYECRECGKTFIMSKSFMVHQKLHTQEKAYKCEDCGKAFSYNSSLLVHRRIHTGEKPFECSECGRAFSSNRNLIEHKRIHSGEKPYECDECGKCFILKKSLIGHQRIHTREKSYKCNDCGKVFSYRSNLIAHQRIHTGEKPYACSECGKGFTYNRNLIEHQRIHSGEKTYECHVCRKVLTSSRNLMVHQRIHTGEKPYKCNECGKDFSQNKNLVVHQRMHTGEKPYECDKCRKSFTSKRNLVGHQRIHTGEKPYGCNDCSKVFRQRKNLTVHQKIHTDEKPCECDVSEKEFSQTSNLHLQQKIHTIEEFSWLQNTNESKIEIQKI

SEQ ID NO: 6275 - protein, 267 aa, Homo sapiens
MTRENVAHNALRQEGLVKGKDDTWKWGTSFQGSSSSVWETSHLHFRQLRYHETSGPQEALSRLRELCRRWLRPEARTKAQILELLVLEQFLSILPGEIRTWVQLHHPGSGEEAVALVEELQKDLDGPAIQVPVLVKDQDTLQKVVSAPGTTLPPVLPGSHIAAEICPHPPTDLVAFNLQDPQHDSPAPEASALSQEENPRNQLMALMLLTAQPQELVMFEEVSVCFTSEEWACLGPIQRALYWDVMLENYGNVTSLGYRKYRRQRNK

SEQ ID NO: 6276 - protein, 518 aa, Homo sapiens
MAAAALRPPAQGTVTFEDVAVNFSQEEWSLLSEAQRCLYHDVMLENLTLISSLGCWYGAKDETPSKQTLSIQQESPLRTHWTGVCTKKVHLWGMCGPLLGDILHQGTQHNQKLNGFGAYEKKLDDDANHHQDQKQHIGEKSYRSNAKGTSFVKNCKFHMSHEPFIFHEVGKDFLSSLRLLQQEDIHTSGKSNFETKHGIPLQGGKTHYICGESTIPFSNKHSLVLHQRLLPREGPYVCSDSGKFTSKSNSFNNHQGVRTGKRPYQCGQCDESFWYKAHLTEHQRVHTGERPYECGECDKSFSHKHSLVDHQRVHTGERPYECDECGKSFSHKRSLVHHQRVHTGERPYQCGECGKSFNHKCNLIQHQRVHTGERPFECTACGKLFRSNSHLKEHQRVHTGERPYECKECRKSFRYKSHLTEHQRVHTGERPYECRECGKCFHQKGSLIQHQQIHSGERPHECGECGKCFHQKGSLIRHQQIHSGERPHECGECGKCFRQKGNLIKHQRVHTGERHHEC

SEQ ID NO: 6277 - protein, 659 aa, Homo sapiens
MPGPPRSLEMGLLTFRDVAIEFSLEEWQHLDIAQQNLYRNVMLENYRNLAFLGIAVSKPDLITCLEQGKEPWNMKRHEMVDEPPGMCPHFAQDLWPEQGMEDSFQKAILRRYGKYGHENLQLRKGCKSVDEYKVNKEGYNGLNQCFTTAQSKVFQCDKYLKVFYKFLNSNRPKIRHTEKKSFKCKKRVKLFCMLSHKTQHKSIYHREKSYKCKECGKTFNWSSTLTNHRKIYTEEKPYKCEEYNKSPKQLSTLTTHEIIHAGEKLYKCEECGEAFNRSSNLTTHKIIHTGEKPYKCEECGKAFIWSSTLTEHKKIHTRKKPYKCEECGKAFIWSSTLTRHKRMHTGEKPYKCEECGKAFSQSSTLTTHKIIHTGEKRYKCLECGKAFKQLSTLTTHKIIHVGEKLYKCEECGKGFNRSSNLTTHKIIHTGEKPYKCEECGKAFIWSSTLTKHKRIHTREKPYKCEECGKAFIWSSTLTRHKRMHTGEKPYKCEECGKSFSQSSTLTTHKIIHTGEKPYKCEECGKAFNWSSTLTKHKIIHTEEKPYKCEKCGKAFKQSSILTNHKRIHTGEKPYKCEECGKSFNRSSTFTKHKVIHTGVKPYKCEECGKAFFWSSTLTKHKRIHTGEQPYKWEKFGKAFNRSSHLTTDKITHWREILQV

SEQ ID NO: 6278 - protein, 351 aa, Homo sapiens
MPGPPRSLEMGLLTFRDVAIEFSLEEWQHLDIAQQNLYRNVMLENYRNLAFLGIAVSKPDLITCLEQGKEPWNMKRHEMVDEPPGMCPHFAQDLWPEQGMEDSFQKAILRRYGKYGHENLQLRKGCKSVDEYKVNKEGYNGLNQCFTTAQSKVFQCDKYLKVFYKFLNSNRPKIRHTEKKSFKCKKRVKLFCMLSHKTQHKSIYHREKSYKCKECGKTFNWSSTLTNHRKIYTEEKPYKCEEYNKSPKQLSTLTTHEIIHAGEKLYKCEECGEAFNRSSTFTKHKVIHTGVKPYKCEECGKAFFWSSTLTKHKRIHTGEQPYKWEKFGKAFNRSSHLTTDKITHWREILQV

SEQ ID NO: 6279 - protein, 909 aa, Homo sapiens
MKKRRKVTSNLEKIHLGYHKDSSEGNVAVECDQVTYTHSAGRPTPEALHCYQELPPSPDQRKLLSSLQYNKNLLKYLNDDRQKQPSFCDLLIIVEGKEFSAHKVVVAVGSSYFHACLSKNPSTDVVTLDHVTHSVFQHLLEFLYTSEFFVYKYEIPLVLEAAKFLDIIDAVKLLNNENVAPFHSELTEKSSPEETLNELTGRLSNNHQCKFCSRHFCYKKSLENHLAKTHRSLLLGKKHGLKMLERSFSARRSKRNRKCPVKFDDTSDDEQESGDGSDNLNQENFDKEKSDRNDSEDPGSEYNAEEDELEEEMSDEYSDIEEQSEKDHNDAEEEPEAGDSVGNVHEGLTPVVIQNSNKKILQCPKCDKTFDRIGKYESHTRVHTGEKPFECDICHQRYSTKSNLTVHRKKHSNETEFHKKEHKCPYCNKLHASKKTLAKHVKRFHPENAQEFISIKKTKSESWKCDICKKSFTRRPHLEEHMILHSQDKPFKCTYCEEHFKSRFARLKHQEKFHLGPFPCDICGRQFNDTGNLKRHIECTHGGKRKWTCFICGKSVRERTTLKEHLRIHSGEKPHLCSICGQSFRHGSSYRLHLRVHHDDKRYECDECGKTFIRHDHLTKHKKIHSGEKAHQCEECGKCFGRRDHLTVHYKSVHLGEKVWQKYKATFHQCDVCKKIFKGKSSLEMHFRTHSGEKPYKCQICNQSFRIKKTLTKHLVIHSDARPFNCQHCNATFKRKDKLKYHIDHVHEIKSPDDPLSTSEEKLVSLPVEYSSDDKIFQTETKQYMDQPKVYQSEAKTMLQNVSAEVCVPVTLVPVQMPDTPSDLVRHTTTLPPSSHEILSPQPQSTDYPRAADLAFLEKYTLTPQPANIVHPVRPEQMLDPREQSYLGTLLGLDSTTGVQNISTNEHHS

SEQ ID NO: 6280 - protein, 627 aa, Homo sapiens
MKKRRKVTSNLEKIHLGYHKDSSEGNVAVECDQVTYTHSAGRPTPEALHCYQELPPSPDQRKLLSSLQYNKNLLKYLNDDRQKQPSFCDLLIIVEGKEFSAHKVVVAVGSSYFHACLSKNPSTDVVTLDHVTHSVFQHLLEFLYTSEFFVYKYEIPLVLEAAKFLDIIDAVKLLNNENVAPFHSELTEKSSPEETLNELTGRLSNNHQCKFCSRHFCYKKSLENHLAKTHRSLLLGKKHGLKMLERSFSARRSKRNRKCPVKFDDTSDDEQESGDGSDNLNQENFDKEKSDRNDSEDPGSEYNAEEDELEEEMSDEYSDIEEQSEKDHNDAEEEPEAGDSVGNVHEGLTPVVIQNSNKKILQCPKCDKTFDRIGKYESHTRVHTGEKPFECDICHQRYSTKSNLTVHRKKHSNETEFHKKEHKCPYCNKLHASKKTLAKHVKRFHPENAQEFISIKKTKSESWKCDICKKSFTRRPHLEEHMILHSQDKPFKCTYCEEHFKSRFARLKHQEKFHLGPFPCDICGRQFNDTGNLKRHIECTHGGKRKWTCFICGKSVRERTTLKEHLRIHSGEKPHLCSICGQSFRHGSSYRLHLRVHHDDKRYECDECGKTFIRHDHLTKHKKIHSD

SEQ ID NO: 6281 - protein, 265 aa, Homo sapiens
MGLRIHFVVDPHGWCCMGLIVFVWLYNIVLIPKIVLFPHYEEGHIPGILIIIFYGISIFCLVALVRASITDPGRLPENPKIPHGEREFWELCNKCNLMRPKRSHHCSRCGHCVRRMDHHCPWINNCVGEDNHWLFLQLCFYTELLTCYALMFSFCHYYYFLPLKKRNLDLFVFRHELAIMRLAAFMGITMLVGITGLFYTQLIGIITDTTSIEKMSNCCEDISRPRKPWQQTFSEVFGTRWKILWFIPFRQRQPLRVPYHFANHV

SEQ ID NO: 6282 - protein, 437 aa, Homo sapiens
MAAATLRTPTQGTVTFEDVAVHFSWEEWGLLDEAQRCLYRDVMLENLALLTSLDVHHQKQHLGEKHFRSNVGRALFVKTCTFHVSGEPSTCREVGKDFLAKLGFLHQQAAHTGEQSNSKSDGGAISHRGKTHYNCGEHTKAFSGKHTLVQQQRTLTTERCYICSECGKSFSKSYSLNDHWRLHTGEKPYECRECGKSFRQSSSLIQHRRVHTAVRPHECDECGKLFSNKSNLIKHRRVHTGERPYECSECGKSFSQRSALLQHRGVHTGERPYECSECGKFFTYHSSLIKHQKVHSGSRPYECSECGKSFSQNSSLIEHHRVHTGERPYKCSECGKSFSQRSALLQHRGVHTGERPYECSECGKFFPYSSSLRKHQRVHTGSRPYECSECGKSFTQNSGLIKHRRVHTGEKPYECTECGKSFSHNSSLIKHQRIHSR

SEQ ID NO: 6283 - protein, 550 aa, Homo sapiens
MGWSDLQPAMGGEAERFQAQLEVKLVTGGSPVVFTGNLTRQVGSKLAFSASLSHLLSDQANVTALLERKEENGRRVAALGAELFVPGLVGLRALGLLQQQGQLWTNSLRIQYSLLGQAKQAAHECSTSQKLRADSGSDGAYRLELRHELHCTQILAFSHKVQLWHEEDSGHLHSQLEVSYGKQWDKNSNKRHLRVSQTFKNDSGPALSNHFMEFVLQVPERQVDCRVQLYHLSLRLPYVESSSHLKVQYNGRPLFVAGGQWKDTSRATLWKWEGVLNLDSPWLMVSAAHRLYWPHRAVFQAVLELTLGKAWTLKDLVVSVGCRSQGPNREGKIQVYTAATTYLRVSTVTVLAQSLFHSWSELESAWNTAVQGEIHAENSRDRKILNCWLKGPQQELNLTAAYRHLEWPRKTQVSLTAVWIGAQGQPRGLQLEGELEELRQDRTLYRKRGALLLRHPLHLPIPQSLLLQETFTADRRHQRYSLETRVVLNGREETLQTMVLGCQAGHPYVCAGLMHPYDGKVIPRNTEGCLVTWNQHTSLALLSGLESGVQ

SEQ ID NO: 6284 - protein, 577 aa, Homo sapiens
MLRRGHLAFRDVAIEFPQEEWKCLDPAQRTLYREVMVENYRNLVFLGICLPDLSVISMLEQRRDPRNLQSEVKIANNPGGRECIKGVNAESSSKLGSNAGNKSLKNQLGLTFQLHLSELQLFQAERNISGCKHVEKPINNSLVSPLQKIYSSVKSHILNKYRNDFDDSPFLPQEQKAQIREKPCECNEHGKAFRVSSRLANNQVIHTADNPYKCNECDKVFSNSSNLVQHQRIHTGEKPYKCHECGKLFNRISLLARHQRIHTGEKPYKCHECGKVFTQNSHLANHHRIHTGEKPYKCNECGKVFNRNAHLARHQKIHSGEKPYKCKECGKAFSGGSGLTAHLVIHTGEKLYKCNKCGKVFNRNAHLTRHQRIHTGEKPYECKECGKVFRHKFCLTNHHRMHTGEQPYKCNECGKAFRDCSGLTAHLLIHTGEKPYKCKECAKVFRHRLSLSNHQRFHTGEKPYRCDECGKDFTRNSNLANHHRIHTGEKPYKCSECHKVFSHNSHLARHRQIHTGEKSYKCNECGKVFSHKLYLKKHERIHTGEKPYRCHECGKDFTRNSNLANHHRIHTGEKPYR

SEQ ID NO: 6285 - protein, 98 aa, Homo sapiens
MLRRGHLAFRDVAIEFPQEEWKCLDPAQRTLYREVMVENYRNLVFLGICLPDLSVISMLEQRRDPRNLQSEVKIANNPGSCSVTQAVVEWQSSVAIVA

SEQ ID NO: 6286 - protein, 427 aa, Homo sapiens
MGVLTFRDVAVEFSPEEWECLDSAQQRLYRDVMLENYGNLVSLGLAIFKPDLMTCLEQRKEPWKVKRQEAVAKHPAGSFHFTAEILPDHDIKDSFQKVILRKYGSCDLNNLHLKKDYQSVGNCKGQKSSYNGLHQCLSATHSKTCQCNKCGRGFQLCSIFTEHKDIFSREKCHKCEECGKDCRLFSDFTRHKKIHTVERCYKCEECGKAFKKFSNLTEHKRVHTGEKPYKCEGCGKTFTCSSTLVKHKRNHTGDRPYKCEECGKAFKCFSDLTNHKRIHTGEKPYKCEECNKAYRWFSDLAKHKIIHTGDKPYTCNECGKAFKWFSALSKHKRIHTGEKPYICEECGKAFTRSSTLFNHKRIHMEERPYKCEECSKTFKCFSDLTNHKRIHTGEKPYKCEECGKASSWFSHLIRHKRIHTREKLHKC

SEQ ID NO: 6287 - protein, 1053 aa, Homo sapiens
MSSEESYRAILRYLTNEREPYAPGTEGNVKRKIRKAAACYVVRGGTLYYQRRQRHRKTFAELEVVLQPERRRDLIEAAHLGPGGTHHTRHQTWHYLSKTYWWRGILKQVKDYIKQCSKCQEKLDRSRPISDVSEMLEELGLDLESGEESNESEDDLSNFTSSPTTASKPAKKKPVSKHELVFVDTKGVVKRSSPKHCQAVLKQLNEQRLSNQFCDVTLLIEGEEYKAHKSVLSANSEYFRDLFIEKGAVSSHEAVVDLSGFCKASFLPLLEFAYTSVLSFDFCSMADVAILARHLFMSEVLEICESVHKLMEEKQLTVYKKGEVQTVASTQDLRVQNGGTAPPVASSEGTTTSLPTELGDCEIVLLVNGELPEAEQNGEVGRQPEPQVSSEAESALSSVGCIADSHPEMESVDLITKNNQTELETSNNRENNTVSNIHPKLSKENVISSSPEDSGMGNDISAEDICAEDIPKHRQKVDQPLKDQENLVASTAKTDFGPDDDTYRSRLRQRSVNEGAYIRLHKGMEKKLQKRKAVPKSAVQQVAQKLVQRGKKMKQPKRDAKENTEEASHKCGECGMVFQRRYALIMHKLKHERARDYKCPLCKKQFQYSASLRAHLIRHTRKDAPSSSSSNSTSNEASGTSSEKGRTKREFICSICGRTLPKLYSLRIHMLKHTGVKPHACQVCGKTFIYKHGLKLHQSLHQSQKQFQCELCVKSFVTKRSLQEHMSIHTGESKYLCSVCGKSFHRGSGLSKHFKKHQPKPEVRGYHCTQCEKSFFEARDLRQHMNKHLGVKPFQCQFCDKCYSWKKDWYSHVKSHSVTEPYRCNICGKEFYEKALFRRHVKKATHGKKGRAKQNLERVCEKCGRKFTQLREYRRHMNNHEGVKPFECLTCGVAWADARSLKRHVRTHTGERPYVCPVCSEAYIDARTLRKHMTKFHRDYVPCKIMLEKDTLQFHNQGTQVAHAVSILTAGMQEQESSGPQELETVVVTGETMEALEAVAATEEYPSVSTLSDQSIMQVVNYVLAQQQGQKLSEVAEAIQTVKVEVAHISGGE

SEQ ID NO: 6288 - protein, 503 aa, Homo sapiens
MGALTFRDVAIEFSLEEWQCLDTEQQNLYRNVMLDNYRNLVFLGIAVSKPDLITCLEQEKEPWNLKTHDMVAKPPVICSHIAQDLWPEQGIKDYFQEVILRQYKKCRHENLLLRKGCKNVDEFKMHKKGYNRHNQCLTTSHSKIFQCDKYVKVFHKFSNSNRHKIRHTSKKPFKCKECGKLFCILSHLAQHKKIHTGEKSYKCEEYGKAFNESSNCTTHKRITEKKPYKCKECGKAFNWFSHFTTHKRIHTGEKPYQCEKCGKFFNQSTNLTTHKRIHTGEKPYKCEECGKAFNQSSNLTEHKKIHTKEQPYKCEKCGKAFKWSSTLTKHKRIHNGEKPYKCEECGKAFNRSSTLNRHKITHTGGKPYKYKECGKAFNQSSTLTIHKIIHTVEKFYKCEECGKAFSRISHLTTHKRIHTGEKPYKCEECGRAFNQSSTLTTHKRIHTGEKPYECEECGKAFNRSSTLTTHKIIHSGEKIYKCKECGKAFRRFSHLTRHKTIHT

SEQ ID NO: 6289 - protein, 234 aa, Homo sapiens
MRSGEPACTMDQARGLDDAAARGGQCPGLGPAPTPTPPGRLGAPYSEAWGYFHLAPGRPGHPSGHWATCRLCGEQVGRGPGFHAGTSALWRHLRSAHRRELESSGAGSSPPAAPCPPPPGPAAAPEGDWARLLEQMGALAVRGSRRERELERRELAVEQGERALERRRRALQEEERAAAQARRELQAEREALQARLRDVSRREGALGWAPAAPPPLKDDPEGDRDGCVITKVLL

SEQ ID NO: 6290 - protein, 424 aa, Homo sapiens
MASMPPTPEAQGPILFEDLAVYFSQEECVTLHPAQRSLSKDGTKESLEDAALMGEEGKPEINQQLSLESMELDELALEKYPIAAPLVPYPEKSSEDGVGNPEAKILSGTPTYKRRVISLLVTIENHTPLVELSEYLGTNTLSEILDSPWEGAKNVYKCPECDQNFSDHSYLVLHQKIHSGEKKHKCGDCGKIFNHRANLRTHRRIHTGEKPYKCAKCSASFRQHSHLSRHMNSHVKEKPYTCSICGRGFMWLPGLAQHQKSHSAENTYESTNCDKHFNEKPNLALPEETFVSGPQYQHTKCMKSFRQSLYPALSEKSHDEDSERCSDDGDNFFSFSKFKPLQCPDCDMTFPCFSELISHQNIHTEERPHKCKTCEESFALDSELACHQKSHMLAEPFKCTVCGKTFKSNLHLITHKRTHIKNTT

SEQ ID NO: 6291 - protein, 51 aa, Homo sapiens [sequence omitted]

SEQ ID NO: 6292 - protein, 1914 aa, Homo sapiens
MADGKGDAAAVAGAGAEAPAVAGAGDGVETESMVRGHRPVSPAPGASGLRPCLWQLETELREQEVSEVSSLNYCRSFCQTLLQYASNKNASEHIVYLLEVYRLAIQSFASARPYLTTECEDVLLVLGRLVLSCFELLLSVSESELPCEVWLPFLQSLQESHDALLEFGNNNLQILVHVTKEGVWKNPVLLKILSQQPVETEEVNKLIAQEGPSFLQMRIKHLLKSNCIPQATALSKLCAESKEISNVSSFQQAYITCLCSMLPNEDAIKEIAKVDCKEVLDIICNLESEGQDNTAFVLCTTYLTQQLQTASVYCSWELTLFWSKLQRRIDPSLDTFLERCRQFGVIAKTQQHLFCLIRVIQTEAQDAGLGVSILLCVRALQLRSSEDEEMKASVCKTIACLLPEDLEVRRACQLTEFLIEPSLDGFNMLEELYLQPDQKFDEENAPVPNSLRCELLLALKAHWPFDPEFWDWKTLKRHCHQLLGQEASDSDDDLSGYEMSINDTDVLESFLSDYDEGKEDKQYRRRDLTDQHKEKRDKKPIGSSERYQRWLQYKFFCLLCKRECIEARILHHSKMHMEDGIYTCPVCIKKFKRKEMFVPHVMEHVKMPPSRRDRSKKKLLLKGSQKGICPKSPSAIPEQNHSLNDQAKGESHEYVTFSKLEDCHLQDRDLYPCPGTDCSRVFKQFKYLSVHLKAEHQNNDENAKHYLDMKNRREKCTYCRRHFMSAFHLREHEQVHCGPQPYMCVSIDCYARFGSVNELLNHKQKHDDLRYKCELNGCNIVFSDLGQLYHHEAQHFRDASYTCNFLGCKKFYYSKIEYQNHLSMHNVENSNGDIKKSVKLEESATGEKQDCINQPHLLNQTDKSHLPEDLFCAESANSQIDTETAENLKENSDSNSSDQLSHSSSASMNEELIDTLDHSETMQDVLLSNEKVFGPSSLKEKCSSMAVCFDGTKFTCGFDGCGSTYKNARGMQKHLRKVHPYHFKPKKIKTKDLFPSLGNEHNQTTEKLDAEPKPCSDTNSDSPDEGLDHNIHIKCKREHQGYSSESSICASKRPCTEDTMLELLLRLKHLSLKNSITHGSFSGSLQGYPSSGAKSLQSVSSISDLNFQNQDENMPSQYLAQLAAKPFFCELQGCKYEFVTREALLMHYLKKHNYSKEKVLQLTMFQHRYSPFQCHICQRSFTRKTHLRIHYKNKHQIGSDRATHKLLDNEKCDHEGPCSVDRLKGDCSAELGGDPSSNSEKPHCHPKKDECSSETDLESSCEETESKTSDISSPIGSHREEQEGREGRGSRRTVAKGNLCYILNKYHKPFHCIHKTCNSSFTNLKGLIRHYRTVHQYNKEQLCLEKDKARTKRELVKCKKIFACKYKECNKRFLCSKALAKHCSDSHNLDHIEEPKVLSEAGSAARFSCNQPQCPAVFYTFNKLKHHLMEQHNIEGEIHSDYEIHCDLNGCGQIFTHRSNYSQHVYYRHKDYYDDLFRSQKVANERLLRSEKVCQTADTQGHEHQTTRRSFNAKSKKCGLIKEKKAPISFKTRAEALHMCVEHSEHTQYPCMVQGCLSVVKLESSIVRHYKRTHQMSSAYLEQQMENLVVCVKYGTKIKEEPPSEADPCIKKEENRSCESERTEHSHSPGDSSAPIQNTDCCHSSERDGGQKGCIESSSVFDADTLLYRGTLKCNHSSKTTSLEQCNIVQPPPPCKIENSIPNPNGTESGTYFTSFQLPLPRIKESETRQHSSGQENTVKNPTHVPKENFRKHSQPRSFDLKTYKPMGFESSFLKFIQESEEKEDDFDDWEPSEHLTLSNSSQSSNDLTGNVVANNMVNDSEPEVDIPHSSSDSTIHENLTAIPPLIVAETTTVPSLENLRVVLDKALTDCGELALKQLHYLRPVVVLERSKFSTPILDLFPTKKTDELCVGSS

SEQ ID NO: 6293 - protein, 255 aa, Homo sapiens
MISSCTTRKMAEQEQRKIPLVPENLLKKRKAYQALKATQAKQALLAKKEQKKGKGLRFKRLESFLHDSWRQKRDKVRLRRLEVKPHALELPDKHSLAFVVRIERIDGVSLLVQRTIARLRLKKIFSGVFVKVTPQNLKMLRIVEPYVTWGFPNLKSVRELILKRGQAKVKNKTIPLTDNTVIEEHLGKFGVICLEDLIHEIAFPGKHFQEISWFLCPFHLSVARHATKNRVGFLKEMGTPGYRGERINQLIRQLN

SEQ ID NO: 6294 - protein, 162 aa, Homo sapiens
MISSCTTRKMAEQEQRKIPLVPENLLKKRKAYQALKATQAKQALLAKKEQKKGKGLRFKRLESFLHDSWRQKRDKVRLRRLEVKPHALELPDKHSLAFVVRIERIDGVSLLVQRTIARLRLKKIFSGVFVKVTPQNLKMLRIVEPYVTWGEVWRHLLGRPHS

SEQ ID NO: 6295 - protein, 67 aa, Homo sapiens
MIIPVRCFTCGKIVGNKWEAYLGLLQAEYTEGDALDALGLKRYCCRRMLLAHVDLIEKLLNYAPLEK

SEQ ID NO: 6296 - protein, 349 aa, Homo sapiens
MAKAGDKSSSSGKKSLKRKAAAEELQEAAGAGDGATENGVQPPKAAAFPPGFSISEIKNKQRRHLMFTRWKQQQRKEKLAAKKKLKKEREALGDKAPPKPVPKTIDNQRVYDETTVDPNDEEVAYDEATDEFASYFNKQTSPKILITTSDRPHGRTVRLCEQLSTVIPNSHVYYRRGLALKKIIPQCIARDFTDLIVINEDRKTPNGLILSHLPNGPTAHFKMSSVRLRKEIKRRGKDPTEHIPEIILNNFTTRLGHSIGRMFASLFPHNPQFIGRQVATFHNQRDYIFFRFHRYIFRSEKKVGIQELGPRFTLKLRSLQKGTFDSKYGEYEWVHKPREMDTSRRKFHL

SEQ ID NO: 6297 - protein, 346 aa, Homo sapiens
MAASQAVEEMRSRVVLGEFGVRNVHTTDFPGNYSGYDDAWDQDRFEKNFRVDVVHMDENSLEFDMVGIDAAIANAFRRILLAEVPTMAVEKVLVYNNTSIVQDEILAHRLGLIPIHADPRLFEYRNQGDEEGTEIDTLQFRLQVRCTRNPHAAKDSSDPNELYVNHKVYTRHMTWIPLGNQADLFPEGTIRPVHDDILIAQLRPGQEIDLLMHCVKGIGKDHAKFSPVATASYRLLPDITLLEPVEGEAAEELSRCFSPGVIEVQEVQGKKVARVANPRLDTFSREIFRNEKLKKVVRLARVRDHYIFSVESTGVLPPDVLVSEAIKVLMGKCRRFLDELDAVQMD

SEQ ID NO: 6298 - protein, 342 aa, Homo sapiens
MAASQAVEEMRSRVVLGEFGVRNVHTTDFPGNYSGYDDAWDQDRFEKNFRVDVVHMDENSLEFDMVGIDAAIANAFRRILLAEVPTMAVEKVLVYNNTSIVQDEILAHRLGLIPIHADPRLFEYRNQGDEEGTEIDTLQFRLQVRCTRNPHAAKDSSDPNELYVNHKVYTRHMTWIPLGNQADLFPEGTIRPVHDDILIAQLRPGQEIDLLMHCVKGIGKDHAKFSPVATASYRLLPDITLLEPVEGEAAEELSRCFSPGVIEVQEVQGKKVARVANPRLDTFSREIFRNEKLKKVVRLARVRDHYICKKDLLAAVAHTCNPSTLGGQGEWITGSRERDHPG

SEQ ID NO: 6299 - protein, 535 aa, Homo sapiens
MEAPTVETPPDPSPPSAPAPALVPLRAPDVARLREEQEKVVTNCQERIQHWKKVDNDYNALRERLSTLPDKLSYNIMVPFGPFAFMPGKLVHTNEVTVLLGDNWFAKCSAKQAVGLVEHRKEHVRKTIDDLKKVMKNFESRVEFTEDLQKMSDAAGDIVDIREEIKCDFEFKAKHRIAHKPHSKPKTSDIFEADIANDVKSKDLLADKELWARLEELERQEELLGELDSKPDTVIANGEDTTSSEEEKEDRNTNVNAMHQVTDSHTPCHKDVASSEPFSGQVNSQLNCSVNGSSSYHSDDDDDDDDDDDDDNIDDDDGDNDHEALGVGDNSIPTIYFSHTVEPKRVRINTGKNTTLKFSEKKEEAKRKRKNSTGSGHSAQELPTIRTPADIYRAFVDVVNGEYVPRKSILKSRSRENSVCSDTSESSAAEFDDRRGVLRSISCEEATCSDTSESILEEEPQENQKKLLPLSVTPEAFSGTVIEKEFVSPSLTPPPAIAHPALPTIPERKEVLLEASEETGKRVSKFKAARLQQKD

SEQ ID NO: 6300 - protein, 459 aa, Homo sapiens
MVPFGPFAFMPGKLVHTNEVTVLLGDNWFAKCSAKQAVGLVEHRKEHVRKTIDDLKKVMKNFESRVEFTEDLQKMSDAAGDIVDIREEIKCDFEFKAKHRIAHKPHSKPKTSDIFEADIANDVKSKDLLADKELWARLEELERQEELLGELDSKPDTVIANGEDTTSSEEEKEDRNTNVNAMHQVTDSHTPCHKDVASSEPFSGQVNSQLNCSVNGSSSYHSDDDDDDDDDDDDDNIDDDDGDNDHEALGVGDNSIPTIYFSHTVEPKRVRINTGKNTTLKFSEKKEEAKRKRKNSTGSGHSAQELPTIRTPADIYRAFVDVVNGEYVPRKSILKSRSRENSVCSDTSESSAAEFDDRRGVLRSISCEEATCSDTSESILEEEPQENQKKLLPLSVTPEAFSGTVIEKEFVSPSLTPPPAIAHPALPTIPERKEVLLEASEETGKRVSKFKAARLQQKD

SEQ ID NO: 6301 - protein, 509 aa, Homo sapiens
MRLGNVDFTLGSNVPCVYLVFSVNRKKVDNDYNALRERLSTLPDKLSYNIMVPFGPFAFMPGKLVHTNEVTVLLGDNWFAKCSAKQAVGLVEHRKEHVRKTIDDLKKVMKNFESRVEFTEDLQKMSDAAGDIVDIREEIKCDFEFKAKHRIAHKPHSKPKTSDIFEADIANDVKSKDLLADKELWARLEELERQEELLGELDSKPDTVIANGEDTTSSEEEKEDRNTNVNAMHQVTDSHTPCHKDVASSEPFSGQVNSQLNCSVNGSSSYHSDDDDDDDDDDDDDNIDDDDGDNDHEALGVGDNSIPTIYFSHTVEPKRVRINTGKNTTLKFSEKKEEAKRKRKNSTGSGHSAQELPTIRTPADIYRAFVDVVNGEYVPRKSILKSRSRENSVCSDTSESSAAEFDDRRGVLRSISCEEATCSDTSESILEEEPQENQKKLLPLSVTPEAFSGTVIEKEFVSPSLTPPPAIAHPALPTIPERKEVLLEASEETGKRVSKFKAARLQQKD

SEQ ID NO: 6302 - protein, 475 aa, Homo sapiens
MTTWSSLQGSHVSKRALAYALVVTNCQERIQHWKKVDNDYNALRERLSTLPDKLSYNIMVPFGPFAFMPGKLVHTNEVTVLLGDNWFAKCSAKQAVGLVEHRKEHVRKTIDDLKKVMKNFESRVEFTEDLQKMSDAAGDIVDIREEIKCDFEFKAKHRIAHKPHSKPKTSDIFEADIANDVKSKDLLADKELWARLEELERQEELLGELDSKPDTVIANGEDTTSSEEEKEDRNTNVNAMHQVTDSHTPCHKDVASSEPFSGQVNSQLNCSVNGSSSYHSDDDDDDDDDDDDDNIDDDDGDNDHEALGVGDNSIPTIYFSHTVEPKRVRINTGKNTTLKFSEKKEEAKRKRKNSTGSGHSAQELPTIRTPADIYRAFVDVVNGEYVPRKSILKSRSRENSVCSDTSESSAAEFDDRRGVLRSISCEEATCSDTSESILEEEPQENQKKLLPLSVTPEVLRLVGYSRNLAPLNVIL

SEQ ID NO: 6303 - protein, 133 aa, Homo sapiens
MEEDQELERKISGLKTSMAEGERKTALEMVQAAGTDRHCVTFVLHEEDHTLGNSLRYMIMKNPEVEFCGYTTTHPSESKINLRIQTRGTLPAVEPFQRGLNELMNVCQHVLDKFEASIKDYKDQKASRNESTF

SEQ ID NO: 6304 - protein, 117 aa, Homo sapiens
MNAPPAFESFLLFEGEKKITINKDTKVPNACLFTINKEDHTLGNIIKSQLLKDPQVLFAGYKVPHPLEHKIIIRVQTTPDYSPQEAFTNAITDLISELSLLEERFRVAIKDKQEGIE

SEQ ID NO: 6305 - protein, 198 aa, Homo sapiens [sequence omitted]

SEQ ID NO: 6306 - protein, 296 aa, Homo sapiens [sequence omitted]

SEQ ID NO: 6307 - protein, 251 aa, Homo sapiens [sequence omitted]

SEQ ID NO: 6308 - protein, 688 aa, Homo sapiens
MKPLSLLIEILIILGVTIKTIKAEEHNKRQKERNVTTQVSVNEIKQYLSHILEQRTSSNVINKRENLLEKKKNQRKIRIKGIQNKDILKRNKNHLQKQAEKNFTDEGDQLFKMGIKVLQQSKSQKQKEEAYLLFAKAADMGNLKAMEKMADALLFGNFGVQNITAAIQLYESLAKEGSCKAQNALGFLSSYGIGMEYDQAKALIYYTFGSAGGNMMSQMILGYRYLSGINVLQNCEVALSYYKKVADYIADTFEKSEGVPVEKVRLTERPENLSSNSEILDWDIYQYYKFLAERGDVQIQVSLGQLHLIGRKGLDQDYYKALHYFLKAAKAGSANAMAFIGKMYLEGNAAVPQNNATAFKYFSMAASKGNAIGLHGLGLLYFHGKGVPLNYAEALKYFQKAAEKGWPDAQFQLGFMYYSGSGIWKDYKLAFKYFYLASQSGQPLAIYYLAKMYATGTGVVRSCRTAVELYKGVCELGHWAEKFLTAYFAYKDGDIDSSLVQYALLAEMGYEVAQSNSAFILESKKANILEKEKMYPMALLLWNRAAIQGNAFARVKIGDYHYYGYGTKKDYQTAATHYSIAANKYHNAQAMFNLAYMYEHGLGITKDIHLARRLYDMAAQTSPDAHIPVLFAVMKLETTHLLRDILFFNFTTRWNWLKLDNTIGPHWDLFVIGLIVPGLILLLRNHHG

SEQ ID NO: 6309 - protein, 575 aa, Homo sapiens
MKPLSLLIEILIILGVTIKTIKAEEHNKRQKERNVTTQVSVNEIKQYLSHILEQRTSSNVINKRENLLEKKKNQRKIRIKGIQNKDILKRNKNHLQKQAEKNFTDEGDQLFKMGIKVLQQSKSQKQKEEAYLLFAKAADMGNLKAMEKMADALLFGNFGVQNITAAIQLYESLAKEGSCKAQNALGFLSSYGIGMEYDQAKALIYYTFGSAGGNMMSQMILGYRYLSGINVLQNCEVALSYYKKVADYIADTFEKSEGVPVEKVRLTERPENLSSNSEILDWDIYQYYKFLAERGDVQIQVSLGQLHLIGRKGLDQDYYKALHYFLKAAKAGSANAMAFIGKMYLEGNAAVPQNNATAFKYFSMAASKGNAIGLHGLGLLYFHGKGVPLNYAEALKYFQKAAEKGWPDAQFQLGFMYYSGSGIWKDYKLAFKYFYLASQSGQPLAIYYLAKMYATGTGVVRSCRTAVEKRLTFLKKRRCIQWRFSYGIELPFKDIHLARRLYDMAAQTSPDAHIPVLFAVMKLETTHLLRDILFFNFTTRWNWLKLDNTIGPHWDLFVIGLIVPGLILLLRNHHG

SEQ ID NO: 6310 - protein, 173 aa, Homo sapiens
MAAMASLGALALLLLSSLSRCSAEACLEPQITPSYYTTSDAVISTETVFIVEISLTCKNRVQNMALYADVGGKQFPVTRGQDVGRYQVSWSLDHKSAHAGTYEVRFFDEESYSLLRKAQRNNEDISIIPPLFTVSVDHRGTWNGPWVSTEVLAAAIGLVIYYLAFSAKSHIQA

SEQ ID NO: 6311 - protein, 1085 aa, Homo sapiens
MSTPSRFKKDKEIIAEYESQVKEIRAQLVEQQKCLEQQTEMRVQLLQDLQDFFRKKAEIETEYSRNLEKLAERFMAKTRSTKDHQQYKKDQNLLSPVNCWYLLLNQVRRESKDHATLSDIYLNNVIMRFMQISEDSTRMFKKSKEIAFQLHEDLMKVLNELYTVMKTYHMYHAESISAESKLKEAEKQEEKQIGRSGDPVFHIRLEERHQRRSSVKKIEKMKEKRQAKYSENKLKSIKARNEYLLTLEATNASVFKYYIHDLSDLIDCCDLGYHASLNRALRTYLSAEYNLETSRHEGLDIIENAVDNLEPRSDKQRFMEMYPAAFCPPMKFEFQSHMGDEVCQVSAQQPVQAELMLRYQQLQSRLATLKIENEEVKKTTEATLQTIQDMVTIEDYDVSECFQHSRSTESVKSTVSETYLSKPSIAKRRANQQETEQFYFMKLREYLEGSNLITKLQAKHDLLQRTLGEGHRAEYMTTRPPNVPPKPQKHRKSRPRSQYNTKLFNGDLETFVKDSGQVIPLIVESCIRFINLYGLQHQGIFRVSGSQVEVNDIKNSFERGENPLADDQSNHDINSVAGVLKLYFRGLENPLFPKERFNDLISCIRIDNLYERALHIRKLLLTLPRSVLIVMRYLFAFLNHLSQYSDENMMDPYNLAICFGPTLMPVPEIQDQVSCQAHVNEIIKTIIIHHETIFPDAKELDGPVYEKCMAGDDYCDSPYSEHGTLEEVDQDAGTEPHTSEDECEPIEAIAKFDYVGRSARELSFKKGASLLLYHRASEDWWEGRHNGIDGLVPHQYIVVQDMDDTFSDTLSQKADSEASSGPVTEDKSSSKDMNSPTDRHPDGYLARQRKRGEPPPPVRRPGRTSDGHCPLHPPHALSNSSVDLGSPSLASHPRGLLQNRGLNNDSPERRRRPGHGSLTNISRHDSLKKIDSPPIRRSTSSGQYTGFNDHKPLDPETIAQDIEETMNTALNELRELERQSTAKHAPDVVLDTLEQVKNSPTPATSTESLSPLHNVALRSSEPQIRRSTSSSSDTMSTFKPMVAPRMGVQLKPPALRPKPAVLPKTNPTIGPAPPPQGPTDKSCTM

SEQ ID NO: 6312 - protein, 1062 aa, Homo sapiens
MSTPSRFKKDKEIIAEYESQVKEIRAQLVEQQKCLEQQTEMRVQLLQDLQDFFRKKAEIETEYSRNLEKLAERFMAKTRSTKDHQQYKKDQNLLSPVNCWYLLLNQVRRESKDHATLSDIYLNNVIMRFMQISEDSTRMFKKSKEIAFQLHEDLMKVLNELYTVMKTYHMYHAESISAESKLKEAEKQEEKQIGRSGDPVFHIRLEERHQRRSSVKKIEKMKEKRQAKYSENKLKSIKARNEYLLTLEATNASVFKYYIHDLSDLIDCCDLGYHASLNRALRTYLSAEYNLETSRHEGLDIIENAVDNLEPRSDKQRFMEMYPAAFCPPMKFEFQSHMGDEVCQVSAQQPVQAELMLRYQQLQSRLATLKIENEEVKKTTEATLQTIQDMVTIEDYDVSECFQHSRSTESVKSTVSETYLSKPSIAKRRANQQETEQFYFMKLREYLEGSNLITKLQAKHDLLQRTLGEGHRAEYMTTSRGRRNSHTRHQDSGQVIPLIVESCIRFINLYGLQHQGIFRVSGSQVEVNDIKNSFERGENPLADDQSNHDINSVAGVLKLYFRGLENPLFPKERFNDLISCIRIDNLYERALHIRKLLLTLPRSVLIVMRYLFAFLNHLSQYSDENMMDPYNLAICFGPTLMPVPEIQDQVSCQAHVNEIIKTIIIHHETIFPDAKELDGPVYEKCMAGDDYCDSPYSEHGTLEEVDQDAGTEPHTSEDECEPIEAIAKFDYVGRSARELSFKKGASLLLYHRASEDWWEGRHNGIDGLVPHQYIVVQDMDDTFSDTLSQKADSEASSGPVTEDKSSSKDMNSPTDRHPDGYLARQRKRGEPPPPVRRPGRTSDGHCPLHPPHALSNSSVDLGSPSLASHPRGLLQNRGLNNDSPERRRRPGHGSLTNISRHDSLKKIDSPPIRRSTSSGQYTGFNDHKPLDPETIAQDIEETMNTALNELRELERQSTAKHAPDVVLDTLEQVKNSPTPATSTESLSPLHNVALRSSEPQIRRSTSSSSDTMSTFKPMVAPRMGVQLKPPALRPKPAVLPKTNPTIGPAPPPQGPTDKSCTM

SEQ ID NO: 6313 - protein, 530 aa, Homo sapiens
MEEDSLYLGGEWQFNHFSKLTSSRPDAAFAEIQRTSLPEKSPLSCETRVDLCDDLAPVARQLAPREKLPLSNRRPAAVGAGLQNMGNTCYVNASLQCLTYTPPLANYMLSREHSQTCHRHKGCMLCTMQAHITRALHNPGHVIQPSQALAAGFHRGKQEDAHEFLMFTVDAMKKACLPGHKQVDHHSKDTTLIHQIFGGYWRSQIKCLHCHGISDTFDPYLDIALDIQAAQSVQQALEQLVKPEELNGENAYHCGVCLQRAPASKMLTLLTSAKVLILVLKRFSDVTGNKIAKNVQYPECLDMQPYMSQPNTGPLVYVLYAVLVHAGWSCHNGHYFSYVKAQEGQWYKMDDAEVTASSITSVLSQQAYVLFYIQKSEWERHSESVSRGREPRALGAEDTDRRATQGELKRDHPCLQAPELDEHLVERATQESTLDHWKFLQEQNKTKPEFNVRKVEGTLPPDVLVIHQSKYKCGMKNHHPEQQSSLLNLSSSTPTHQESMNTGTLASLRGRARRSKGKNKHSKRALLVCQ

SEQ ID NO: 6314 - protein, 530 aa, Homo sapiens
MEDDSLYLGGEWQFNHFSKLTSSRPDAAFAEIQRTSLPEKSPLSCETRVDLCDDLAPVARQLAPREKLPLSSRRPAAVGAGLQNMGNTCYVNASLQCLTYTPPLANYMLSREHSQTCHRHKGCMLCTMQAHITRALHNPGHVIQPSQALAAGFHRGKQEDAHEFLMFTVDAMKKACLPGHKQVDHHSKDTTLIHQIFGGYWRSQIKCLHCHGISDTFDPYLDIALDIQAAQSVQQALEQLVKPEELNGENAYHCGVCLQRAPASKTLTLHTSAKVLILVLKRFSDVTGNKIAKNVQYPECLDMQPYMSQQNTGPLVYVLYAVLVHAGWSCHNGHYFSYVKAQEGQWYKMDDAEVTASSITSVLSQQAYVLFYIQKSEWERHSESVSRGREPRALGAEDTDRRATQGELKRDHPCLQAPELDEHLVERATQESTLDHWKFLQEQNKTKPEFNVRKVEGTLPPDVLVIHQSKYKCGMKNHHPEQQSSLLKLSSTTPTHQESMNTGTLASLRGRARRSKGKNKHSKRALLVCQ

SEQ ID NO: 6315 - protein, 223 aa, Homo sapiens
MKLHYVAVLTLAILMFLTWLPESLSCNKALCASDVSKCLIQELCQCRPGEGNCSCCKECMLCLGALWDECCDCVGMCNPRNYSDTPPTSKSTVEELHEPIPSLFRALTEGDTQLNWNIVSFPVAEELSHHENLVSFLETVNQPHHQNVSVPSNNVHAPYSSDKEHMCTVVYFDDCMSIHQCKISCESMGASKYRWFHNACCECIGPECIDYGSKTVKCMNCMF

SEQ ID NO: 6316 - protein, 75 aa, Homo sapiens
MKLHYVAVLTLAILMFLTWLPESLSCNKALCASDVSKCLIQELCQCRPGEGNCSCCKECMLCLGALWDECCDCVD

SEQ ID NO: 6317 - protein, 567 aa, Homo sapiens
MAGVGDAAAPGEGGGGGVDGPQRDGRGEAEQPGGSGGQGPPPAPQLTETLGFYESDRRRERRRGRTELSLLRFLSAELTRGYFLEHNEAKYTERRERVYTCLRIPRELEKLMVFGIFLCLDAFLYVFTLLPLRVFLALFRLLTLPCYGLRDRRLLQPAQVCDILKGVILVICYFMMHYVDYSMMYHLIRGQSVIKLYIIYNMLEVADRLFSSFGQDILDALYWTATEPKERKRAHIGVIPHFFMAVLYVFLHAILIMVQATTLNVAFNSHNKSLLTIMMSNNFVEIKGSVFKKFEKNNLFQMSNSDIKERFTNYVLLLIVCLRNMEQFSWNPDHLWVLFPDVCMVIASEIAVDIVKHAFITKFNDITADVYSEYRASLAFDLVSSRQKNAYTDYSDSVARRMGFIPLPLAVLLIRVVTSSIKVQGILSYACVILFYFGLISLKVLNSIVLLGKSCQYVKEAKMEEKLSNPPATCTPGKPSSKSQNKCKPSQGLSTEENLSASITKQPIHQKENIIPLLVTSNSDQFLTTPDGDEKDITQDNSELKHRSSKKDLLEIDRFTICGNRID

SEQ ID NO: 6318 - protein, 562 aa, Homo sapiens
MAGVGDAAAPGEGGGGGVDGPQRDGRGEAEQPGGSGGQGPPPAPQLTETLGFYESDRRRERRRGRTELSLLRFLSAELTRGYFLEHNEAKYTERRERVYTCLRIPRELEKLMVFGIFLCLDAFLYVFTLLPLRVFLALFRLLTLPCYGLRDRRLLQPAQVCDILKGVILVICYFMMHYVDYSMMYHLIRGQSVIKLYIIYNMLEVADRLFSSFGQDILDALYWTATEPKERKRAHIGVIPHFFMAVLYVFLHAILIMVQATTLNVAFNSHNKSLLTIMMSNNFVEIKGSVFKKFEKNNLFQMSNSDIKERFTNYVLLLIVCLRNMEQFSWNPDHLWVLFPDVCMVIASEIAVDIVKHAFITKFNDITADVYSEYRASLAFDLVSSRQKNAYTDYSDSVARRMGFIPLPLAVLLIRVVTSSIKVQGILSYACVILFYFGLISLKVLNSIVLLGKSCQYVKEAKMEEKLSNPPATCTPGKPSSKSQNKCKPSQGLSTEENLSASITKQPIHQKENIIPLLVTSNSDQFLTTPDGDEKDITQDNSELKHRSSKSVLLCQSGLPEC

SEQ ID NO: 6319 - protein, 407 aa, Homo sapiens
MYNAFWNHLKEQLLSTPPDFTCALELLKDVKENRLRNEIEEALDTDLLKQEAEHGALDVPHLSNYILNLMALLCAPVRDEAIQKLETIRDPVQLLRGILRVLGLMKMDMVNYTIQSFRPYLQEHSIQYEQAKFQELLDKQPSLLDYTTKWLTKAATDITTLCPSSPDSPSSSCSMACSLPSGAGNNSEPPSPTMVLYQGYLNLLLWDLENVEFPETLLMDRIRLQELAFQLHQLTVLASVLLVARSFSGEVLFRSPEFVDRLKCTTKALTEEFISRPEETMLSVSEQVSQEVHQGLKDMGLTTLSSENTASLLGQLQNITKKENCIRSIVDQWIRFFLKCCLLHGMQESLLHFPGGLILIEKELAELGWKFLNLMHHNQQVFGPYYAEILKHIIHPAQAQETDVEPN

SEQ ID NO: 6320 - protein, 274 aa, Homo sapiens
MGKSLSHLPLHSSKEDAYDGVTSENMRNGLVNSEVHNEDGRNGDVSQFPYVEFTGRDSVTCPTCQGTGRIPRGQENQLVALIPYSDQRLRPRRTKLYVMASVFVCLLLSGLAVFFLFPRSIDVKYIGVKSAYVSYDVQKRTIYLNITNTLNITNNNYYSVEVENITAQVQFSKTVIGKARLNNITIIGPLDMKQIDYTVPTVIAEEMSYMYDFCTLISIKVHNIVLMMQVTVTTTYFGHSEQISQERYQYVDCGRNTTYQLGQSEYLNVLQPQQ

SEQ ID NO: 6321 - protein, 800 aa, Homo sapiens
MAALAEEQTEVAVKLEPEGPPTLLPPQAGDGAGEGSGGTTNNGPNGGGGNVAASSSTGGDGGTPKPTVAVSAAAPAGAAPVPAAAPDAGAPHDRQTLLAVLQFLRQSKLREAEEALRREAGLLEEAVAGSGAPGEVDSAGAEVTSALLSRVTASAPGPAAPDPPGTGASGATVVSGSASGPAAPGKVGSVAVEDQPDVSAVLSAYNQQGDPTMYEEYYSGLKHFIECSLDCHRAELSQLFYPLFVHMYLELVYNQHENEAKSFFEKFHGDQECYYQDDLRVLSSLTKKEHMKGNETMLDFRTSKFVLRISRDSYQLLKRHLQEKQNNQIWNIVQEHLYIDIFDGMPRSKQQIDAMVGSLAGEAKREANKSKVFFGLLKEPEIEVPLDDEDEEGENEEGKPKKKKPKKDSIGSKSKKQDPNAPPQNRIPLPELKDSDKLDKIMNMKETTKRVRLGPDCLPSICFYTFLNAYQGLTAVDVTDDSSLIAGGFADSTVRVWSVTPKKLRSVKQASDLSLIDKESDDVLERIMDEKTASELKILYGHSGPVYGASFSPDRNYLLSSSEDGTVRLWSLQTFTCLVGYKGHNYPVWDTQFSPYGYYFVSGGHDRVARLWATDHYQPLRIFAGHLADVNCTRFHPNSNYVATGSADRTVRLWDVLNGNCVRIFTGHKGPIHSLTFSPNGRFLATGATDGRVLLWDIGHGLMVGELKGHTDTVCSLRFSRDGEILASGSMDNTVRLWDAIKAFEDLETDDFTTATGHINLPENSQELLLGTYMTKSTPVVHLHFTRRNLVLAAGAYSPQ

SEQ ID NO: 6322 - protein, 745 aa, Homo sapiens
MAALAEEQTEVAVKLEPEGPPTLLPPQAGDGAGEGSGGTTNNGPNGGGGNVAASSSTGGDGGTPKPTVAVSAAAPAGAAPVPAAAPDAGAPHDRQTLLAVLQFLRQSKLREAEEALRREAGLLEEAVAGSGAPGEVDSAGAEVTSALLSRVTASAPGPAAPDPPGTGASGATVVSGSASGPAAPGKVGSVAVEDQPDVSAVLSAYNQQGDPTMYEEYYSGLKHFIECSLDCHRAELSQLFYPLFVHMYLELVYNQHENEAKSFFEKFHGDQECYYQDDLRVLSSLTKKEHMKGNETMLDFRTSKFVLRISRDSYQLLKRHLQEKQNNQIWNIVQEHLYIDIFDGMPRSKQQIDAMVGSLAGEAKREANKSKVFFGLLKEPEIEVPLDDEDEEGENEEGKPKKKKPKKDSIGSKSKKQDPNAPPQNRIPLPELKDSDKLDKIMNMKETTKRVRLGPDCLPSICFYTFLNAYQGLTAVDVTDDSSLIAGGFADSTVRVWSVTPKKLRSVKQASDLSLIDKESDDVLERIMDEKTASELKILYGHSGPVYGASFSPDRLWATDHYQPLRIFAGHLADVNCTRFHPNSNYVATGSADRTVRLWDVLNGNCVRIFTGHKGPIHSLTFSPNGRFLATGATDGRVLLWDIGHGLMVGELKGHTDTVCSLRFSRDGEILASGSMDNTVRLWDAIKAFEDLETDDFTTATGHINLPENSQELLLGTYMTKSTPVVHLHFTRRNLVLAAGAYSPQ

SEQ ID NO: 6323 - protein, 309 aa, Homo sapiens
MITFLPIIFSILIVVTFVIGNFANGFIALVNSIEWFKRQKISFADQILTALAVSRVGLLWVLVLNWYATELNPAFNSIEVRITAYNVWAVINHFSNWLATSLSIFYLLKIANFSNLIFLHLKRRVKSVVLVILLGPLLFLVCHLFVINMNQIIWTKEYEGNMTWKIKLRSAMYLSNTTVTILANLVPFTLTLISFLLLICSLCKHLKKMQLHGKGSQDPSMKVHIKALQTVTSFLLLCAIYFLSIIMSVWSFESLENKPVFMFCEAIAFSYPSTHPFILIWGNKKLKQTFLSVLWHVRYWVKGEKPSSS

SEQ ID NO: 6324 - protein, 233 aa, Homo sapiens
MWGYLSLMPVFLAVWAISGVWIVFAIAVTNRTVDLSKGFPYISICGSFPPQSCIFSQVLNMGAALAAWICIVRYHQLRDWGVRRWPNQLILWTGLLCALGTSVVGNFQEKNQRPTHLAGAFLAFILGNVYFWLQLLLWRLKRLPQPGAAWIGPLRLGLCSVCTILIVAMIVLHACSLRSVSAACEWVVAMLLFALFGLLAVDFSALESCTLCVQPWPSLSPPPASPISLPVQL

SEQ ID NO: 6325 - protein, 343 aa, Homo sapiens
MWPNGSSLGPCFRPTNITLEERRLIASPWFAASFCVVGLASNLLALSVLAGARQGGSHTRSSFLTFLCGLVLTDFLGLLVTGTIVVSQHAALFEWHAVDPGCRLCRFMGVVMIFFGLSPLLLGAAMASERYLGITRPFSRPAVASQRRAWATVGLVWAAALALGLLPLLGVGRYTVQYPGSWCFLTLGAESGDVAFGLLFSMLGGLSVGLSFLLNTVSVATLCHVYHGQEAAQQRPRDSEVEMMAQLLGIMVVASVCWLPLLVFIAQTVLRNPPAMSPAGQLSRTTEKELLIYLRVATWNQILDPWVYILFRRAVLRRLQPRLSTRPRSLSLQPQLTQRSGLQ

SEQ ID NO: 6326 - protein, 407 aa, Homo sapiens
MWPNGSSLGPCFRPTNITLEERRLIASPWFAASFCVVGLASNLLALSVLAGARQGGSHTRSSFLTFLCGLVLTDFLGLLVTGTIVVSQHAALFEWHAVDPGCRLCRFMGVVMIFFGLSPLLLGAAMASERYLGITRPFSRPAVASQRRAWATVGLVWAAALALGLLPLLGVGRYTVQYPGSWCFLTLGAESGDVAFGLLFSMLGGLSVGLSFLLNTVSVATLCHVYHGQEAAQQRPRDSEVEMMAQLLGIMVVASVCWLPLLVFIAQTVLRNPPAMSPAGQLSRTTEKELLIYLRVATWNQILDPWVYILFRRAVLRRLQPRLSTRPRRSLTLWPSLEYSGTISAHCNLRLPGSSDSRASASRAAGITGVSHCARPCMLFDPEFDLLAGVQLLPFEPPTGKALSRKD

SEQ ID NO: 6327 - protein, 307 aa, Homo sapiens
MLRVVEGIFIFVVVSESVFGVLGNGFIGLVNCIDCAKNKLSTIGFILTGLAISRIFLIWIIITDGFIQIFSPNIYASGNLIEYISYFWVIGNQSSMWFATSLSIFYFLKIANFSNYIFLWLKSRTNMVLPFMIVFLLISSLLNFAYIAKILNDYKTKNDTVWDLNMYKSEYFIKQILLNLGVIFFFTLSLITCIFLIISLWRHNRQMQSNVTGLRDSNTEAHVKAMKVLISFIILFILYFIGMAIEISCFTVRENKLLLMFGMTTTAIYPWGHSFILILGNSKLKQASLRVLQQLKCCEKRKNLRVT

SEQ ID NO: 6328 - protein, 317 aa, Homo sapiens
MGGVIKSIFTFVLIVEFIIGNLGNSFIALVNCIDWVKGRKISSVDRILTALAISRISLVWLIFGSWCVSVFFPALFATEKMFRMLTNIWTVINHFSVWLATGLGTFYFLKIANFSNSIFLYLKWRVKKVVLVLLLVTSVFLFLNIALINIHINASINGYRRNKTCSSDSSNFTRFSSLIVLTSTVFIFIPFTLSLAMFLLLIFSMWKHRKKMQHTVKISGDASTKAHRGVKSVITFFLLYAIFSLSFFISVWTSERLEENLIILSQVMGMAYPSCHSCVLILGNKKLRQASLSVLLWLRYMFKDGEPSGHKEFRESS

SEQ ID NO: 6329 - protein, 155 aa, Homo sapiens
MSESKSGPEYASFFAVMGASAAMVFSALGAAYGTAKSGTGIAAMSVMRPEQIMKSIIPVVMAGIIAIYGLVVAVLIANSLNDDISLYKSFLQLGAGLSVGLSGLAAGFAIGIVGDAGVRGTAQQPRLFVGMILILIFAEVLGLYGLIVALILSTK

SEQ ID NO: 6330 - protein, 309 aa, Homo sapiens
MMSFLHIVFSILVVVAFILGNFANGFIALINFIAWVKRQKISSADQIIAALAVSRVGLLWVILLHWYSTVLNPTSSNLKVIIFISNAWAVTNHFSIWLATSLSIFYLLKIVNFSRLIFHHLKRKAKSVVLVIVLGSLFFLVCHLVMKHTYINVWTEECEGNVTWKIKLRNAMHLSNLTVAMLANLIPFTLTLISFLLLIYSLCKHLKKMQLHGKGSQDPSTKIHIKALQTVTSFLILLAIYFLCLIISFWNFKMRPKEIVLMLCQAFGIIYPSFHSFILIWGNKTLKQTFLSVLWQVTCWAKGQNQSTP

SEQ ID NO: 6331 - protein, 548 aa, Homo sapiens
MALHVPKAPGFAQMLKEGAKHFSGLEEAVYRNIQACKELAQTTRTAYGPNGMNKMVINHLEKLFVTNDAATILRELEVQHPAAKMIVMASHMQEQEVGDGTNFVLVFAGALLELAEELLRIGLSVSEVIEGYEIACRKAHEILPNLVCCSAKNLRDIDEVSSLLRTSIMSKQYGNEVFLAKLIAQACVSIFPDSGHFNVDNIRVCKILGSGISSSSVLHGMVFKKETEGDVTSVKDAKIAVYSCPFDGMITETKGTVLIKTAEELMNFSKGEENLMDAQVKAIADTGANVVVTGGKVADMALHYANKYNIMLVRLNSKWDLRRLCKTVGATALPRLTPPVLEEMGHCDSVYLSEVGDTQVVVFKHEKEDGAISTIVLRGSTDNLMDDIERAVDDGVNTFKVLTRDKRLVPGGGATEIELAKQITSYGETCPGLEQYAIKKFAEAFEAIPRALAENSGVKANEVISKLYAVHQEGNKNVGLDIEAEVPAVKDMLEAGILDTYLGKYWAIKLATNAAVTVLRVDQIIMAKPAGGPKPPSGKKDWDDDQND

SEQ ID NO: 6332 - protein, 529 aa, Homo sapiens
MHFSGLEEAVYRNIQACKELAQTTRTAYGPNGMNKMVINHLEKLFVTNDAATILRELEVQHPAAKMIVMASHMQEQEVGDGTNFVLVFAGALLELAEELLRIGLSVSEVIEGYEIACRKAHEILPNLVCCSAKNLRDIDEVSSLLRTSIMSKQYGNEVFLAKLIAQACVSIFPDSGHFNVDNIRVCKILGSGISSSSVLHGMVFKKETEGDVTSVKDAKIAVYSCPFDGMITETKGTVLIKTAEELMNFSKGEENLMDAQVKAIADTGANVVVTGGKVADMALHYANKYNIMLVRLNSKWDLRRLCKTVGATALPRLTPPVLEEMGHCDSVYLSEVGDTQVVVFKHEKEDGAISTIVLRGSTDNLMDDIERAVDDGVNTFKVLTRDKRLVPGGGATEIELAKQITSYGETCPGLEQYAIKKFAEAFEAIPRALAENSGVKANEVISKLYAVHQEGNKNVGLDIEAEVPAVKDMLEAGILDTYLGKYWAIKLATNAAVTVLRVDQIIMAKPAGGPKPPSGKKDWDDDQND

SEQ ID NO: 6333 - protein, 475 aa, Homo sapiens
MDQMVQHPAAKMIVMASHMQEQEVGDGTNFVLVFAGALLELAEELLRIGLSVSEVIEGYEIACRKAHEILPNLVCCSAKNLRDIDEVSSLLRTSIMSKQYGNEVFLAKLIAQACVSIFPDSGHFNVDNIRVCKILGSGISSSSVLHGMVFKKETEGDVTSVKDAKIAVYSCPFDGMITETKGTVLIKTAEELMNFSKGEENLMDAQVKAIADTGANVVVTGGKVADMALHYANKYNIMLVRLNSKWDLRRLCKTVGATALPRLTPPVLEEMGHCDSVYLSEVGDTQVVVFKHEKEDGAISTIVLRGSTDNLMDDIERAVDDGVNTFKVLTRDKRLVPGGGATEIELAKQITSYGETCPGLEQYAIKKFAEAFEAIPRALAENSGVKANEVISKLYAVHQEGNKNVGLDIEAEVPAVKDMLEAGILDTYLGKYWAIKLATNAAVTVLRVDQIIMAKPAGGPKPPSGKKDWDDDQND

SEQ ID NO: 6334 - protein, 353 aa, Homo sapiens
MAAPAQQTTQPGGGKRKGKAQYVLAKRARRCDAGGPRQLEPGLQGILITCNMNERKCVEEAYSLLNEYGDDMYGPEKFTDKDQQPSGSEGEDDDAEAALKKEVGDIKASTEMRLRRFQSVESGANNVVFIRTLGIEPEKLVHHILQDMYKTKKKKTRVILRMLPISGTCKAFLEDMKKYAETFLEPWFKAPNKGTFQIVYKSRNNSHVNREEVIRELAGIVCTLNSENKVDLTNPQYTVVVEIIKAVCCLSVVKDYMLFRKYNLQEVVKSPKDPSQLNSKQGNGKEAKLESADKSDQNNTAEGKNNQQVPENTEELGQTKPTSNPQVVNEGGAKPELASQATEGSKSNENDFS

SEQ ID NO: 6335 - protein, 389 aa, Homo sapiens
MSEIRFTNLTWDQVITLDQVLDEVIPIHGKGNFPTMEVKPKDIIHVVKDQLIGQGIIVKDARLNGSVASYILASHNGISYKDLDVIFGVELPGNEEFQVVKDAVLDCLLDFLPKDVKKEKLSPDIMKDAYVQKLVKVCNGHDCWSLISLSNNTGKNLELKFVSSLRRQFEFSVDSFQIVLDPMLDFYSDKNAKLTKESYPVVVAESMYGDFQEAMTHLQHKLICTRKPEEIRGGGLLKYCSLLVHGFKPACMSEIKNLERYMCSRFFIDFPHIEEQQKKIESYLHNHFIGEGMTKYDYLMTLHGVVNESTVCLMSYERRQILHLITMMALKVLGELNILPNTQKVTCFYQPAPYFAAEARYPIYVIPEPPPVSFQPYHPLHFRGSNGMS

SEQ ID NO: 6336 - protein, 213 aa, Homo sapiens
MVQSCSAYGCKNRYDKDKPVSFHKFPLTRPSLCKEWEAAVRRKNFKPTKYSSICSEHFTPDCFKRECNNKLLKENAVPTIFLCTEPHDKKEDLLEPQEQLPPPPLPPPVSQVDAAIGLLMPPLQTPVNLSVFCDHNYTVEDTMHQRKRIHQLEQQVEKLRKKLKTAQQRCRRQERQLEKLKEVVHFQKEKDDVSERGYVILPNDYFEIVEVPA

SEQ ID NO: 6337 - protein, 53 aa, Homo sapiens
MVQSCSAYGCKNRYDKDKPVSFHKKKIFWSHRNSFPHLLYRLLFPRLMLLLDY

SEQ ID NO: 6338 - protein, 1140 aa, Homo sapiens
MWLKPEEVLLKNALKLWVTQKSSCYFILQRRRGHGEGGGRLTGRLVGALDAVLDSNARVAPFRILLQVPGSQVYSPIACGATLEEINQHWDWLEQNLLHTLSVFDNKDDIASFVKGKVKALIAEETSSRLAEQEEEPEKFREALVKFEARFNFPEAEKLVTYYSCCCWKGRVPRQGWLYLSINHLCFYSFFLGKELKLVVPWVDIQKLERTSNVFLTDTIRITTQNKERDFSMFLNLDEVFKVMEQLADVTLRRLLDNEVFDLDPDLQEPSQITKRDLEARAQNEFFRAFFRLPRKEKLHAVVDCSLWTPFSRCHTTGRMFASDSYICFASREDGCCKIILPLREVVSIEKMEDTSLLPHPIIVSIRSKVAFQFIELRDRDSLVEALLARLKQVHANHPVHYDTSADDDMASLVFHSTSMCSDHRFGDLEMMSSQNSEESEKEKSPLMHPDALVTAFQQSGSQSPDSRMSREQIKISLWNDHFVEYGRTVCMFRTEKIRKLVAMGIPESLRGRLWLLFSDAVTDLASHPGYYGNLVEESLGKCCLVTEEIERDLHRSLPEHPAFQNETGIAALRRVLTAYAHRNPKIGYCQSMNILTSVLLLYTKEEEAFWLLVAVCERMLPDYFNHRVIGAQVDQSVFEELIKGHLPELAEHMNDLSALASVSLSWFLTLFLSIMPLESAVNVVDCFFYDGIKAIFQLGLAVLEANAEDLCSSKDDGQALMILSRFLDHIKNEDSPGPPVGSHHAFFSDDQEPYPVTDISDLIRDSYEKFGDQSVEQIEHLRYKHRIRVLQGHEDTTKQNVLRVVIPEVSILPEDLEELYDLFKREHMMSCYWEQPRPMASRHDPSRPYAEQYRIDARQFAHLFQLVSPWTCGAHTEILAERTFRLLDDNMDQLIEFKAFVSCLDIMYNGEMNEKIKLLYRLHIPPALTENDRDSQSPLRNPLLSTSRPLVFGKPNGDAVDYQKQLKQMIKDLAKEKDKTEKELPKMSQREFIQFCKTLYSMFHEDPEENDLYQAIATVTTLLLQIGEVGQRGSSSGSCSQECGEELRASAPSPEDSVFADTGKTPQDSQAFPEAAERDWTVSLEHILASLLTEQSLVNFFEKPLDMKSKLENAKINQYNLKTFEMSHQSQSELKLSNL

SEQ ID NO: 6339 - protein, 897 aa, Homo sapiens
MEQLADVTLRRLLDNEVFDLDPDLQEPSQITKRDLEARAQNEFFRAFFRLPRKEKLHAVVDCSLWTPFSRCHTTGRMFASDSYICFASREDGCCKIILPLREVVSIEKMEDTSLLPHPIIVSIRSKVAFQFIELRDRDSLVEALLARLKQVHANHPVHYDTSADDDMASLVFHSTSMCSDHRFGDLEMMSSQNSEESEKEKSPLMHPDALVTAFQQSGSQSPDSRMSREQIKISLWNDHFVEYGRTVCMFRTEKIRKLVAMGIPESLRGRLWLLFSDAVTDLASHPGYYGNLVEESLGKCCLVTEEIERDLHRSLPEHPAFQNETGIAALRRVLTAYAHRNPKIGYCQSMNILTSVLLLYTKEEEAFWLLVAVCERMLPDYFNHRVIGAQVDQSVFEELIKGHLPELAEHMNDLSALASVSLSWFLTLFLSIMPLESAVNVVDCFFYDGIKAIFQLGLAVLEANAEDLCSSKDDGQALMILSRFLDHIKNEDSPGPPVGSHHAFFSDDQEPYPVTDISDLIRDSYEKFGDQSVEQIEHLRYKHRIRVLQGHEDTTKQNVLRVVIPEVSILPEDLEELYDLFKREHMMSCYWEQPRPMASRHDPSRPYAEQYRIDARQFAHLFQLVSPWTCGAHTEILAERTFRLLDDNMDQLIEFKAFVSCLDIMYNGEMNEKIKLLYRLHIPPALTENDRDSQSPLRNPLLSTSRPLVFGKPNGDAVDYQKQLKQMIKDLAKEKDKTEKELPKMSQREFIQFCKTLYSMFHEDPEENDLYQAIATVTTLLLQIGEVGQRGSSSGSCSQECGEELRASAPSPEDSVFADTGKTPQDSQAFPEAAERDWTVSLEHILASLLTEQSLVNFFEKPLDMKSKLENAKINQYNLKTFEMSHQSQSELKLSNL

SEQ ID NO: 6340 - protein, 363 aa, Homo sapiens
MFKRHKSLASERKRALLSQRATRFILKDDMRNFHFLSKLVLSAGPLRPTPAVKHSKTTHFEIEIFDAQTRKQICILDKVTQSSTIHDVKQKFHKACPKWYPSRVGLQLECGGPFLKDYITIQSIAASSIVTLYATDLGQQVSWTTVFLAEYTGPLLIYLLFYLRIPCIYDGKESARRLRHPVVHLACFCHCIHYIRYLLETLFVHKVSAGHTPLKNLIMSCAFYWGFTSWIAYYINHPLYTPPSFGNRQITVSAINFLICEAGNHFINVMLSHPNHTGNNACFPSPNYNPFTWMFFLVSCPNYTYEIGSWISFTVMTQTLPVGIFTLLMSIQMSLWAQKKHKIYLRKFNSYIHRKSAMIPFIL

SEQ ID NO: 6341 - protein, 324 aa, Homo sapiens
MAAAAPGNGRASAPRLLLLFLVPLLWAPAAVRAGPDEDLSHRNKEPPAPAQQLQPQPVAVQGPEPARVEKIFTPAAPVHTNKEDPATQTNLGFIHAFVAAISVIIVSELGDKTFFIAAIMAMRYNRLTVLAGAMLALGLMTCLSVLFGYATTVIPRVYTYYVSTVLFAIFGIRMLREGLKMSPDEGQEELEEVQAELKKKDEEFQRTKLLNGPGDVETGTSITVPQKKWLHFISPIFVQALTLTFLAEWGDRSQLTTIVLAAREDPYGVAVGGTVGHCLCTGLAVIGGRMIAQKISVRTVTIIGGIVFLAFAFSALFISPDSGF

SEQ ID NO: 6342 - protein, 261 aa, Homo sapiens
MEIPMQKIFTPAAPVHTNKEDPATQTNLGFIHAFVAAISVIIVSELGDKTFFIAAIMAMRYNRLTVLAGAMLALGLMTCLSVLFGYATTVIPRVYTYYVSTVLFAIFGIRMLREGLKMSPDEGQEELEEVQAELKKKDEEFQRTKLLNGPGDVETGTSITVPQKKWLHFISPIFVQALTLTFLAEWGDRSQLTTIVLAAREDPYGVAVGGTVGHCLCTGLAVIGGRMIAQKISVRTVTIIGGIVFLAFAFSALFISPDSGF

SEQ ID NO: 6343 - protein, 219 aa, Homo sapiens
MAIFSVYVVNKAGGLIYQLDSYAPRAEAEKTFSYPLDLLLKLHDERVLVAFGQRDGIRVGHAVLAINGMDVNGRYTADGKEVLEYLGNPANYPVSIRFGRPRLTSNEKLMLASMFHSLFAIGSQLSPEQGSSGIEMLETDTFKLHCYQTLTGIKFVVLADPRQAGIDSLLRKIYEIYSDFALKNPFYSLEMPIRCELFDQNLKLALEVAEKAGTFGPGS

SEQ ID NO: 6344 - protein, 165 aa, Homo sapiens
MAIFSVYVVNKAGGLIYQLDSYAPRAEAEKTFSYPLDLLLKLHDERVLVAFGQRDGIRVGHAVLAINGMDVNGRYTADGKEMLETDTFKLHCYQTLTGIKFVVLADPRQAGIDSLLRKIYEIYSDFALKNPFYSLEMPIRCELFDQNLKLALEVAEKAGTFGPGS

SEQ ID NO: 6345 - protein, 527 aa, Homo sapiens
MSDTLTADVIGRRVEVNGEHATVRFAGVVPPVAGPWLGVEWDNPERGKHDGSHEGTVYFKCRHPTGGSFIRPNKVNFGTDFLTAIKNRYVLEDGPEEDRKEQIVTIGNKPVETIGFDSIMKQQSQLSKLQEVSLRNCAVSCAGEKGGVAEACPNIRKVDLSKNLLSSWDEVIHIADQLRHLEVLNVSENKLKFPSGSVLTGTLSVLKVLVLNQTGITWAEVLRCVAGCPGLEELYLESNNIFISERPTDVLQTVKLLDLSSNQLIDENQLYLIAHLPRLEQLILSDTGISSLHFPDAGIGCKTSMFPSLKYLVVNDNQISQWSFFNELEKLPSLRALSCLRNPLTKEDKEAETARLLIIASIGQLKTLNKCEILPEERRRAELDYRKAFGNEWKQAGGHKDPEKNRLSEEFLTAHPRYQFLCLKYGAPEDWELKTQQPLMLKNQLLTLKIKYPHQLDQKVLEKQLPGSMTIQKVKGLLSRLLKVPVSDLLLSYESPKKPGREIELENDLKSLQFYSVENGDCLLVRW

SEQ ID NO: 6346 - protein, 578 aa, Homo sapiens
MSDTLTADVIGRRVEVNGEHATVRFAGVVPPVAGPWLGVEWDNPERGKHDGSHEGTVYFKCRHPTGGSFIRPNKVNFGTDFLTAIKNRYVLEDGPEEDRKEQIVTIGNKPVETIGFDSIMKQQSQLSKLQEVSLRNCAVSCAGEKGGVAEACPNIRKVDLSKNLLSSWDEVIHIADQLRHLEVLNVSENKLKFPSGSVLTGTLSVLKVLVLNQTGITWAEAHAQCGGSRHGLDMQKDASKFVDLCVLQKCSTSNCIISAKDHTSMRMNVAKVLRCVAGCPGLEELYLESNNIFISERPTDVLQTVKLLDLSSNQLIDENQLYLIAHLPRLEQLILSDTGISSLHFPDAGIGCKTSMFPSLKYLVVNDNQISQWSFFNELEKLPSLRALSCLRNPLTKEDKEAETARLLIIASIGQLKTLNKCEILPEERRRAELDYRKAFGNEWKQAGGHKDPEKNRLSEEFLTAHPRYQFLCLKYGAPEDWELKTQQPLMLKNQLLTLKIKYPHQLDQKVLEKQLPGSMTIQKVKGLLSRLLKVPVSDLLLSYESPKKPGREIELENDLKSLQFYSVENGDCLLVRW

SEQ ID NO: 6347 - protein, 153 aa, Homo sapiens
SQPHTKPSVFVMKNGTNVACLVKEFYPKDIRINLVSSKKITEFDPAIVISPSGKYNAVKLGKYEDSNSVTCSVQHDNKTVHSTDFEVKTDSTDHVKPKETENTKQPSKSCHKPKAIVHTEKVNMMSLTVLGLRMLFAKTVAVNFLLTAKLFFL

SEQ ID NO: 6348 - protein, 122 aa, Homo sapiens
MAPLQLLHPWGRRGAWASQHSLLSQEAMGPGEGAEPTPWGYLRAEHWGASPSGAPTLPFAPDECSLTPGSPPHPLNKQKHHPPHPSQTQKDLVPRSPQLEKSRIRLRRTLRNLGGGRGQRGQ

SEQ ID NO: 6349 - protein, 235 aa, Homo sapiens
MRPDDINPRTGLVVALVSVFLVFGFMFTVSGMKGETLGNIPLLAIGPAICLPGIAAIALARKTEGCTKWPENELLWVRKLPCFRKPKDKEVVELLRTPSDLESGKGSSDELAKKAGLRGKPPPQSQGEVSVASSINSPTPTEEGECQSLVQNGHQEETSRYLDGYCPSGSSLTYSALDVKCSARDRSECPEPEDSIFFVPQDSIIVCSYKQNSPYDRYCCYINQIQGRWDHETIV

SEQ ID NO: 6350 - protein, 477 aa, Homo sapiens
MSAAPGLLHQELSCPLCLQLFDAPVTAECGHSFCRACLGRVAGEPAADGTVLCPCCQAPTRPQALSTNLQLARLVEGLAQVPQGHCEEHLDPLSIYCEQDRALVCGVCASLGSHRGHRLLPAAEAHARLKTQLPQQKLQLQEACMRKEKSVAVLEHQLVEVEETVRQFRGAVGEQLGKMRVFLAALEGSLDREAERVRGEAGVALRRELGSLNSYLEQLRQMEKVLEEVADKPQTEFLMKYCLVTSRLQKILAESPPPARLDIQLPIISDDFKFQVWRKMFRALMPALEELTFDPSSAHPSLVVSSSGRRVECSEQKAPPAGEDPRQFDKAVAVVAHQQLSEGEHYWEVDVGDKPRWALGVIAAEAPRRGRLHAVPSQGLWLLGLREGKILEAHVEAKEPRALRSPERRPTRIGLYLSFGDGVLSFYDASDADALVPLFAFHERLPRPVYPFFDVCWHDKGKNAQPLLLVGPEGAEA

SEQ ID NO: 6351 - protein, 269 aa, Homo sapiens
MSAAPGLLHQELSCPLCLQLFDAPVTAECGHSFCRACLGRVAGEPAADGTVLCPCCQAPTRPQALSTNLQLARLVEGLAQVPQGHCEEHLDPLSIYCEQDRALVCGVCASLGSHRGHRLLPAAEAHARLKTQLPQQKLQLQEACMRKEKSVAVLEHQLVEVEETVRQFRGAVGEQLGKMRVFLAALEGSLDREAERVRGEAGVALRRELGSLNSYLEQLRQMEKVLEEVADKPQTEFLMKYCLVTSRLQKILAESPPPARLDIQLPIIS

SEQ ID NO: 6352 - protein, 511 aa, Homo sapiens
MAAVGPRTGPGTGAEALALAAELQGEATCSICLELFREPVSVECGHSFCRACIGRCWERPGAGSVGAATRAPPFPLPCPQCREPARPSQLRPNRQLAAVATLLRRFSLPAAAPGEHGSQAAAARAAAARCGQHGEPFKLYCQDDGRAICVVCDRAREHREHAVLPLDEAVQEAKELLESRLRVLKKELEDCEVFRSTEKKESKELLKQMAAEQEKVGAEFQALRAFLVEQEGRLLGRLEELSREVAQKQNENLAQLGVEITQLSKLSSQIQETAQKPDLDFLQEFKSTLSRCSNVPGPKPTTVSSEMKNKVWNVSLKTFVLKGMLKKFKEDLRGELEKEEKVELTLDPDTANPRLILSLDLKGVRLGERAQDLPNHPCRFDTNTRVLASCGFSSGRHHWEVEVGSKDGWAFGVARESVRRKGLTPFTPEEGVWALQLNGGQYWAVTSPERSPLSCGHLSRVRVALDLEVGAVSFYAVEDMRHLYTFRVNFQERVFPLFSVCSTGTYLRIWP

SEQ ID NO: 6353 - protein, 303 aa, Homo sapiens
MAAEQEKVGAEFQALRAFLVEQEGRLLGRLEELSREVAQKQNENLAQLGVEITQLSKLSSQIQETAQKPDLDFLQEFKSTLSRCSNVPGPKPTTVSSEMKNKVWNVSLKTFVLKGMLKKFKEDLRGELEKEEKVELTLDPDTANPRLILSLDLKGVRLGERAQDLPNHPCRFDTNTRVLASCGFSSGRHHWEVEVGSKDGWAFGVARESVRRKGLTPFTPEEGVWALQLNGGQYWAVTSPERSPLSCGHLSRVRVALDLEVGAVSFYAVEDMRHLYTFRVNFQERVFPLFSVCSTGTYLRIWP

SEQ ID NO: 6354 - protein, 329 aa, Homo sapiens
MTQATGQMLCLHVQVPLQLLLLGQKQMAAEQEKVGAEFQALRAFLVEQEGRLLGRLEELSREVAQKQNENLAQLGVEITQLSKLSSQIQETAQKPDLDFLQEFKSTLSRCSNVPGPKPTTVSSEMKNKVWNVSLKTFVLKGMLKKFKEDLRGELEKEEKVELTLDPDTANPRLILSLDLKGVRLGERAQDLPNHPCRFDTNTRVLASCGFSSGRHHWEVEVGSKDGWAFGVARESVRRKGLTPFTPEEGVWALQLNGGQYWAVTSPERSPLSCGHLSRVRVALDLEVGAVSFYAVEDMRHLYTFRVNFQERVFPLFSVCSTGTYLRIWP

SEQ ID NO: 6355 - protein, 221 aa, Homo sapiens
MAAVGPRTGPGTGAEALALAAELQGEATCSICLELFREPVSVECGHSFCRACIGRCWERPGAGSVGAATRAPPFPLPCPQCREPARPSQLRPNRQLAAVATLLRRFSLPAAAPGEHGSQAAAARAAAARCGQHGEPFKLYCQDDGRAICVVCDRAREHREHAVLPLDEAVQEAKELLESRLRVLKKELEDCEVFRSTEKKESKELLVSQAPAGPPWDITEA

SEQ ID NO: 6356 - protein, 471 aa, Homo sapiens
MEFVTALVNLQEESSCPICLEYLKDPVTINCGHNFCRSCLSVSWKDLDDTFPCPVCRFCFPYKSFRRNPQLRNLTEIAKQLQIRRSKRKRQKENAMCEKHNQFLTLFCVKDLEILCTQCSFSTKHQKHYICPIKKAASYHREILEGSLEPLRNNIERVEKVIILQGSKSVELKKKVEYKREEINSEFEQIRLFLQNEQEMILRQIQDEEMNILAKLNENLVELSDYVSTLKHLLREVEGKSVQSNLELLTQAKSMHHKYQNLKCPELFSFRLTKYGFSLPPQYSGLDRIIKPFQVDVILDLNTAHPQLLVSEDRKAVRYERKKRNICYDPRRFYVCPAVLGSQRFSSGRHYWEVEVGNKPKWILGVCQDCLLRNWQDQPSVLGGFWAIGRYMKSGYVASGPKTTQLLPVVKPSKIGIFLDYELGDLSFYNMNDRSILYTFNDCFTEAVWPYFYTGTDSEPLKICSVSDSER

SEQ ID NO: 6357 - protein, 1081 aa, Homo sapiens
MPRRKQQAPRRAAAYVSEELKAAALVDEGLDPEEHTADGEPSAKYMCPEKELARACPSYQNSPAAEFSCHEMDSESHISETSDRMADFESGSIKNEEETKEVTVPLEDTTVSDSLEQMKAVYNNFLSNSYWSNLNLNLHQPSSEKNNGSSSSSSSSSSSCGSGSFDWHQSAMAKTLQQVSQSRMLPEPSLFSTVQLYRQSSKLYGSIFTGASKFRCKDCSAAYDTLVELTVHMNETGHYRDDNHETDNNNPKRWSKPRKRSLLEMEGKEDAQKVLKCMYCGHSFESLQDLSVHMIKTKHYQKVPLKEPVTPVAAKIIPATRKKASLELELPSSPDSTGGTPKATISDTNDALQKNSNPYITPNNRYGHQNGASYAWHFEARKSQILKCMECGSSHDTLQELTAHMMVTGHFIKVTNSAMKKGKPIVETPVTPTITTLLDEKVQSVPLAATTFTSPSNTPASISPKLNVEVKKEVDKEKAVTDEKPKQKDKPGEEEEKCDISSKYHYLTENDLEESPKGGLDILKSLENTVTSAINKAQNGTPSWGGYPSIHAAYQLPNMMKLSLGSSGKSTPLKPMFGNSEIVSPTKNQTLVSPPSSQTSPMPKTNFHAMEELVKKVTEKVAKVEEKMKEPDGKLSPPKRATPSPCSSEVGEPIKMEASSDGGFRSQENSPSPPRDGCKDGSPLAEPVENGKELVKPLASSLSGSTAIITDHPPEQPFVNPLSALQSVMNIHLGKAAKPSLPALDPMSMLFKMSNSLAEKAAVATPPPLQSKKADHLDRYFYHVNNDQPIDLTKGKSDKGCSLGSVLLSPTSTAPATSSSTVTTAKTSAVVSFMSNSPLRENALSDISDMLKNLTESHTSKSSTPSSISEKSDIDGATLEEAEESTPAQKRKGRQSNWNPQHLLILQAQFAASLRQTSEGKYIMSDLSPQERMHISRFTGLSMTTISHWLANVKYQLRRTGGTKFLKNLDTGHPVFFCNDCASQIRTPSTYISHLESHLGFRLRDLSKLSTEQINSQIAQTKSPSEKMVTSSPEEDLGTSYQCKLCNRTFASKHAVKLHLSKTHGKSPEDHLLYVSELEKQ

SEQ ID NO: 6358 - protein, 239 aa, Homo sapiens
MARGCLCCLKYMMFLFNLIFWLCGCGLLGVGIWLSVSQGNFATFSPSFPSLSAANLVIAIGTIVMVTGFLGCLGAIKENKCLLLSFFIVLLVILLAELILLILFFVYMDKVNENAKKDLKEGLLLYHTENNVGLKNAWNIIQAEMRCCGVTDYTDWYPVLGENTVPDRCCMENSQGCGRNATTPLWRTGCYEKVKMWFDDNKHVLGTVGMCILIMQILGMAFSMTLFQHIHRTGKKYDA

SEQ ID NO: 6359 - protein, 764 aa, Homo sapiens
MRPADLLQLVLLLDLPRDLGGMGCSSPPCECHQEEDFRVTCKDIQRIPSLPPSTQTLKLIETHLRTIPSHAFSNLPNISRIYVSIDVTLQQLESHSFYNLSKVTHIEIRNTRNLTYIDPDALKELPLLKFLGIFNTGLKMFPDLTKVYSTDIFFILEITDNPYMTSIPVNAFQGLCNETLTLKLYNNGFTSVQGYAFNGTKLDAVYLNKNKYLTVIDKDAFGGVYSGPSLLDVSQTSVTALPSKGLEHLKELIARNTWTLKKLPLSLSFLHLTRADLSYPSHCCAFKNQKKIRGILESLMCNESSMQSLRQRKSVNALNSPLHQEYEENLGDSIVGYKEKSKFQDTHNNAHYYVFFEEQEDEIIGFGQELKNPQEETLQAFDSHYDYTICGDSEDMVCTPKSDEFNPCEDIMGYKFLRIVVWFVSLLALLGNVFVLLILLTSHYKLNVPRFLMCNLAFADFCMGMYLLLIASVDLYTHSEYYNHAIDWQTGPGCNTAGFFTVFASELSVYTLTVITLERWYAITFAMRLDRKIRLRHACAIMVGGWVCCFLLALLPLVGISSYAKVSICLPMDTETPLALAYIVFVLTLNIVAFVIVCCCYVKIYITVRNPQYNPGDKDTKIAKRMAVLIFTDFICMAPISFYALSAILNKPLITVSNSKILLVLFYPLNSCANPFLYAIFTKAFQRDVFILLSKFGICKRQAQAYRGQRVPPKNSTDIQVQKVTHDMRQGLHNMEDVYELIENSHLTPKKQGQISEEYMQTVL

SEQ ID NO: 6360 - protein, 253 aa, Homo sapiens
MRPADLLQLVLLLDLPRDLGGMGCSSPPCECHQEEDFRVTCKDIQRIPSLPPSTQTLKLIETHLRTIPSHAFSNLPNISRIYVSIDVTLQQLESHSFYNLSKVTHIEIRNTRNLTYIDPDALKELPLLKFLGIFNTGLKMFPDLTKVYSTDIFFILEITDNPYMTSIPVNAFQGLCNETLTLKLYNNGFTSVQGYAFNGTKLDAVYLNKNKYLTVIDKDAFGGVYSGPSLLLPLGRKSLSFETQKAPRSSMPS

SEQ ID NO: 6361 - protein, 274 aa, Homo sapiens
MRPADLLQLVLLLDLPRDLGGMGCSSPPCECHQEEDFRVTCKDIQRIPSLPPSTQTLKLIETHLRTIPSHAFSNLPNISRIYVSIDVTLQQLESHSFYNLSKVTHIEIRNTRNLTYIDPDALKELPLLKFLGIFNTGLKMFPDLTKVYSTDIFFILEITDNPYMTSIPVNAFQGLCNETLTLKLYNNGFTSVQGYAFNGTKLDAVYLNKNKYLTVIDKDAFGGVYSGPSLLVENVAVSGKGFCKSLFSWLYRLPLGRKSLSFETQKAPRSSMPS

SEQ ID NO: 6362 - protein, 944 aa, Homo sapiens
MTVSGPGTPEPRPATPGASSVEQLRKEGNELFKCGDYGGALAAYTQALGLDATPQDQAVLHRNRAACHLKLEDYDKAETEASKAIEKDGGDVKALYRRSQALEKLGRLDQAVLDLQRCVSLEPKNKVFQEALRNIGGQIQEKVRYMSSTDAKVEQMFQILLDPEEKGTEKKQKASQNLVVLAREDAGAEKIFRSNGVQLLQRLLDMGETDLMLAALRTLVGICSEHQSRTVATLSILGTRRVVSILGVESQAVSLAACHLLQVMFDALKEGVKKGFRGKEGAIIVDPARELKVLISNLLDLLTEVGVSGQGRDNALTLLIKAVPRKSLKDPNNSLTLWVIDQGLKKILEVGGSLQDPPGELAVTANSRMSASILLSKLFDDLKCDAERENFHRLCENYIKSWFEGQGLAGKLRAIQTVSCLLQGPCDAGNRALELSGVMESVIALCASEQEEEQLVAVEALIHAAGKAKRASFITANGVSLLKDLYKCSEKDSIRIRALVGLCKLGSAGGTDFSMKQFAEGSTLKLAKQCRKWLCNDQIDAGTRRWAVEGLAYLTFDADVKEEFVEDAAALKALFQLSRLEERSVLFAVASALVNCTNSYDYEEPDPKMVELAKYAKQHVPEQHPKDKPSFVRARVKKLLAAGVVSAMVCMVKTESPVLTSSCRELLSRVFLALVEEVEDRGTVVAQGGGRALIPLALEGTDVGQTKAAQALAKLTITSNPEMTFPGERIYEVVRPLVSLLHLNCSGLQNFEALMALTNLAGISERLRQKILKEKAVPMIEGYMFEEHEMIRRAATECMCNLAMSKEVQDLFEAQGNDRLKLLVLYSGEDDELLQRAAAGGLAMLTSMRPTLCSRIPQVTTHWLEILQALLLSSNQELQHRGAVVVLNMVEASREIASTLMESEMMEILSVLAKGDHSPVTRAAAACLDKAVEYGLIQPNQDGE

SEQ ID NO: 6363 - protein, 929 aa, Homo sapiens
MTASSVEQLRKEGNELFKCGDYGGALAAYTQALGLDATPQDQAVLHRNRAACHLKLEDYDKAETEASKAIEKDGGDVKALYRRSQALEKLGRLDQAVLDLQRCVSLEPKNKVFQEALRNIGGQIQEKVRYMSSTDAKVEQMFQILLDPEEKGTEKKQKASQNLVVLAREDAGAEKIFRSNGVQLLQRLLDMGETDLMLAALRTLVGICSEHQSRTVATLSILGTRRVVSILGVESQAVSLAACHLLQVMFDALKEGVKKGFRGKEGAIIVDPARELKVLISNLLDLLTEVGVSGQGRDNALTLLIKAVPRKSLKDPNNSLTLWVIDQGLKKILEVGGSLQDPPGELAVTANSRMSASILLSKLFDDLKCDAERENFHRLCENYIKSWFEGQGLAGKLRAIQTVSCLLQGPCDAGNRALELSGVMESVIALCASEQEEEQLVAVEALIHAAGKAKRASFITANGVSLLKDLYKCSEKDSIRIRALVGLCKLGSAGGTDFSMKQFAEGSTLKLAKQCRKWLCNDQIDAGTRRWAVEGLAYLTFDADVKEEFVEDAAALKALFQLSRLEERSVLFAVASALVNCTNSYDYEEPDPKMVELAKYAKQHVPEQHPKDKPSFVRARVKKLLAAGVVSAMVCMVKTESPVLTSSCRELLSRVFLALVEEVEDRGTVVAQGGGRALIPLALEGTDVGQTKAAQALAKLTITSNPEMTFPGERIYEVVRPLVSLLHLNCSGLQNFEALMALTNLAGISERLRQKILKEKAVPMIEGYMFEEHEMIRRAATECMCNLAMSKEVQDLFEAQGNDRLKLLVLYSGEDDELLQRAAAGGLAMLTSMRPTLCSRIPQVTTHWLEILQALLLSSNQELQHRGAVVVLNMVEASREIASTLMESEMMEILSVLAKGDHSPVTRAAAACLDKAVEYGLIQPNQDGE

SEQ ID NO: 6364 - protein, 222 aa, Homo sapiens
MTFPGERIYEVVRPLVSLLHLNCSGLQNFEALMALTNLAGISERLRQKILKEKAVPMIEGYMFEEHEMIRRAATECMCNLAMSKEVQDLFEAQGNDRLKLLVLYSGEDDELLQRAAAGGLAMLTSMRPTLCSRIPQVTTHWLEILQALLLSSNQELQHRGAVVVLNMVEASREIASTLMESEMMEILSVLAKGDHSPVTRAAAACLDKAVEYGLIQPNQDGE

SEQ ID NO: 6365 - protein, 58 aa, Homo sapiens
MKTQDDGVLPPYDVNQLLGWDLNLSLFLGLCLMLLLAGSCLPSPGITGLSHGSNREDR

SEQ ID NO: 6366 - protein, 270 aa, Homo sapiens
MPGKHQHFQEPEVGCCGKYFLFGFNIVFWVLGALFLAIGLWAWGEKGVLSNISALTDLGGLDPVWLFVVVGGVMSVLGFAGCIGALRENTFLLKFFSVFLGLIFFLELATGILAFVFKDWIRDQLNLFINNNVKAYRDDIDLQNLIDFAQEYWSCCGARGPNDWNLNIYFNCTDLNPSRERCGVPFSCCVRDPAEDVLNTQCGYDVRLKLELEQQGFIHTKGCVGQFEKWLQDNLIVVAGVFMGIALLQIFGICLAQNLVSDIKAVKANW

SEQ ID NO: 6367 - protein, 263 aa, Homo sapiens
MPGKHQHFQEPEVGCCGKYFLFGFNIVFWVLGALFLAIGLWAWGEKGVLSNISALTDLGGLDPVWLFVVVGGVMSVLGFAGCIGALRENTFLLKFFSVFLGLIFFLELATGILAFVFKDWIRDQLNLFINNNVKAYRDDIDLQNLIDFAQEYWSCCGARGPNDWNLNIYFNCTDLNPSRERCGVPFSCCVRDPAEDVLNTQCGYDVRLKLELEQQGFIHTKGCVGQFEKWLQDNLIVVAGVFMGIALLQIFGICLAQNLEQME

SEQ ID NO: 6368 - protein, 188 aa, Homo sapiens
MPGKHQHFQEPEVGCCGKYFLFGFNIVFWFSVFLGLIFFLELATGILAFVFKDWIRDQLNLFINNNVKAYRDDIDLQNLIDFAQEYEDVLNTQCGYDVRLKLELEQQGFIHTKGCVGQFEKWLQDNLIVVAGVFMGIALLQVPLWPHVPLPLPGPPSLSPHLSSVLQIFGICLAQNLVSDIKAVKANW

SEQ ID NO: 6369 - protein, 329 aa, Homo sapiens
MPGKHQHFQEPEVGCCGKYFLFGFNIVFWVLGALFLAIGLWAWGEKGVLSNISALTDLGGLDPVWLFVVVGGVMSVLGFAGCIGALRENTFLLKFFSVFLGLIFFLELATGILAFVFKDWIRDQLNLFINNNVKAYRDDIDLQNLIDFAQEYWSCCGARGPNDWNLNIYFNCTDLNPSRERCGVPFSCCVRDPAEDVLNTQCGYDVRLKLELEQQGFIHTKGCVGQFEKWLQDNLIVVAGVFMGIALLQIFGICLAQNLVSDIKAVKANWSKWNDDFENHWLTPTISEVLSTAGPQQNSLTGAPGPAPPSRHVFFGLGGLYPEPTFKNW

SEQ ID NO: 6370 - protein, 308 aa, Homo sapiens
MRPEGSLTYRVPERLRQGFCGVGRAAQALVCASAKEGTAFRMEAVQEGAAGVESEQAALGEEAVLLLDDIMAEVEVVAEEEGLVERREEAQRAQQAVPGPGPMTPESALEELLAVQVELEPVNAQARKAFSRQREKMERRRKPHLDRRGAVIQSVPGFWANVIANHPQMSALITDEDEDMLSYMVSLEVEEEKHPVHLCKIMLFFRSNPYFQNKVITKEYLVNITEYRASHSTPIEWYPDYEVEAYRRRHHNSSLNFFNWFSDHNFAGSNKIAEILCKDLWRNPLQYYKRMKPPEEGTETSGDSQLLS

SEQ ID NO: 6371 - protein, 244 aa, Homo sapiens
MAAAASPAILPRLAILPYLLFDWSGTGRADAHSLWYNFTIIHLPRHGQQWCEVQSQVDQKNFLSYDCGSDKVLSMGHLEEQLYATDAWGKQLEMLREVGQRLRLELADTELEDFTPSGPLTLQVRMSCECEADGYIRGSWQFSFDGRKFLLFDSNNRKWTVVHAGARRMKEKWEKDSGLTTFFKMVSMRDCKSWLRDFLMHRKKRLEPTAPPTMAPGLAQPKAIATTLSPWSFLIILCFILPGI

SEQ ID NO: 6372 - protein, 894 aa, Homo sapiens
MAWRCPRMGRVPLAWCLALCGWACMAPRGTQAEESPFVGNPGNITGARGLTGTLRCQLQVQGEPPEVHWLRDGQILELADSTQTQVPLGEDEQDDWIVVSQLRITSLQLSDTGQYQCLVFLGHQTFVSQPGYVGLEGLPYFLEEPEDRTVAANTPFNLSCQAQGPPEPVDLLWLQDAVPLATAPGHGPQRSLHVPGLNKTSSFSCEAHNAKGVTTSRTATITVLPQQPRNLHLVSRQPTELEVAWTPGLSGIYPLTHCTLQAVLSDDGMGIQAGEPDPPEEPLTSQASVPPHQLRLGSLHPHTPYHIRVACTSSQGPSSWTHWLPVETPEGVPLGPPENISATRNGSQAFVHWQEPRAPLQGTLLGYRLAYQGQDTPEVLMDIGLRQEVTLELQGDGSVSNLTVCVAAYTAAGDGPWSLPVPLEAWRPGQAQPVHQLVKEPSTPAFSWPWWYVLLGAVVAAACVLILALFLVHRRKKETRYGEVFEPTVERGELVVRYRVRKSYSRRTTEATLNSLGISEELKEKLRDVMVDRHKVALGKTLGEGEFGAVMEGQLNQDDSILKVAVKTMKIAICTRSELEDFLSEAVCMKEFDHPNVMRLIGVCFQGSERESFPAPVVILPFMKHGDLHSFLLYSRLGDQPVYLPTQMLVKFMADIASGMEYLSTKRFIHRDLAARNCMLNENMSVCVADFGLSKKIYNGDYYRQGRIAKMPVKWIAIESLADRVYTSKSDVWSFGVTMWEIATRGQTPYPGVENSEIYDYLRQGNRLKQPADCLDGLYALMSRCWELNPQDRPSFTELREDLENTLKALPPAQEPDEILYVNMDEGGGYPEPPGAAGGADPPTQPDPKDSCSCLTAAEVHPAGRYVLCPSTTPSPAQPADRGSPAAPGQEDGA

SEQ ID NO: 6373 - protein, 885 aa, Homo sapiens
MAWRCPRMGRVPLAWCLALCGWACMAPRGTQAEESPFVGNPGNITGARGLTGTLRCQLQVQGEPPEVHWLRDGQILELADSTQTQVPLGEDEQDDWIVVSQLRITSLQLSDTGQYQCLVFLGHQTFVSQPGYVGLEGLPYFLEEPEDRTVAANTPFNLSCQAQGPPEPVDLLWLQDAVPLATAPGHGPQRSLHVPGLNKTSSFSCEAHNAKGVTTSRTATITVLPQQPRNLHLVSRQPTELEVAWTPGLSGIYPLTHCTLQAVLSDDGMGIQAGEPDPPEEPLTSQASVPPHQLRLGSLHPHTPYHIRVACTSSQGPSSWTHWLPVETPEGVPLGPPENISATRNGSQAFVHWQEPRAPLQGTLLGYRLAYQGQDTPEVLMDIGLRQEVTLELQGDGSVSNLTVCVAAYTAAGDGPWSLPVPLEAWRPVKEPSTPAFSWPWWYVLLGAVVAAACVLILALFLVHRRKKETRYGEVFEPTVERGELVVRYRVRKSYSRRTTEATLNSLGISEELKEKLRDVMVDRHKVALGKTLGEGEFGAVMEGQLNQDDSILKVAVKTMKIAICTRSELEDFLSEAVCMKEFDHPNVMRLIGVCFQGSERESFPAPVVILPFMKHGDLHSFLLYSRLGDQPVYLPTQMLVKFMADIASGMEYLSTKRFIHRDLAARNCMLNENMSVCVADFGLSKKIYNGDYYRQGRIAKMPVKWIAIESLADRVYTSKSDVWSFGVTMWEIATRGQTPYPGVENSEIYDYLRQGNRLKQPADCLDGLYALMSRCWELNPQDRPSFTELREDLENTLKALPPAQEPDEILYVNMDEGGGYPEPPGAAGGADPPTQPDPKDSCSCLTAAEVHPAGRYVLCPSTTPSPAQPADRGSPAAPGQEDGA

SEQ ID NO: 6374 - protein, 263 aa, Homo sapiens
MDNSWRLGPAIGLSAGQSQLLVSLLLLLTRVQPGTDVAAPEHISYVPQLSNDTLAGRLTLSTFTLEQPLGQFSSHNISDLDTIWLVVALSNATQSFTAPRTNQDIPAPANFSQRGYYLTLRANRVLYQTRGQLHVLRVGNDTHCQPTKIGCNHPLPGPGPYRVKFLVMNDEGPVAETKWSSDTRLQQAQALRAVPGPQSPGTVVIIAILSILLAVLLTVLLAVLIYTCFNSCRSTSLSGPEEAGSVRRYTTHLAFSTPAEGAS

SEQ ID NO: 6375 - protein, 1087 aa, Homo sapiens
MMTSVGTNRARGNWEQPQNQNQTQHKQRPQATAEQIRLAQMISDHNDADFEEKVKQLIDITGKNQDECVIALHDCNGDVNRAINVLLEGNPDTHSWEMVGKKKGVSGQKDGGQTESNEEGKENRDRDRDYSRRRGGPPRRGRGASRGREFRGQENGLDGTKSGGPSGRGTERGRRGRGRGRGGSGRRGGRFSAQGMGTFNPADYAEPANTDDNYGNSSGNTWNNTGHFEPDDGTSAWRTATEEWGTEDWNEDLSETKIFTASNVSSVPLPAENVTITAGQRIDLAVLLGKTPSTMENDSSNLDPSQAPSLAQPLVFSNSKQTAISQPASGNTFSHHSMVSMLGKGFGDVGEAKGGSTTGSQFLEQFKTAQALAQLAAQHSQSGSTTTSSWDMGSTTQSPSLVQYDLKNPSDSAVHSPFTKRQAFTPSSTMMEVFLQEKSPAVATSTAAPPPPSSPLPSKSTSAPQMSPGSSDNQSSSPQPAQQKLKQQKKKASLTSKIPALAVEMPGSADISGLNLQFGALQFGSEPVLSDYESTPTTSASSSQAPSSLYTSTASESSSTISSNQSQESGYQSGPIQSTTYTSQNNAQGPLYEQRSTQTRRYPSSISSSPQKDLTQAKNGFSSVQATQLQTTQSVEGATGSAVKSDSPSTSSIPPLNETVSAASLLTTTNQHSSSLGGLSHSEEIPNTTTTQHSSTLSTQQNTLSSSTSSGRTSTSTLLHTSVESEANLHSSSSTFSTTSSTVSAPPPVVSVSSSLNSGSSLGLSLGSNSTVTASTRSSVATTSGKAPPNLPPGVPPLLPNPYIMAPGLLHAYPPQVYGYDDLQMLQTRFPLDYYSIPFPTPTTPLTGRDGSLASNPYSGDLTKFGRGDASSPAPATTLAQPQQNQTQTHHTTQQTFLNPALPPGYSYTSLPYYTGVPGLPSTFQYGPAVFPVAPTSSKQHGVNVSVNASATPFQQPSGYGSHGYNTGVSVTSSNTGVPDISGSVYSKTQQSFEKQGFHSGTPAASFNLPSALGSGGPINPATAAAYPPAPFMHILTPHQQPHSQILHHHLQQDGQTGSGQRSQTSSIPQKPQTNKSAYNSYSWGAN

SEQ ID NO: 6376 - protein, 983 aa, Homo sapiens
MMTSVGTNRARGNWEQPQNQNQTQHKQRPQATAEQIRLAQMISDHNDADFEEKVKQLIDITGKNQDECVIALHDCNGDVNRAINVLLEGNPDTHSWEMVGKKKGVSGQKDGGQTESNEEGKENRDRDRDYSRRRGGPPRRGRGASRGREFRGQENGLDGTKSGGPSGRGTERGRRGRGRGRGGSGRRGGRFSAQGMGTFNPADYAEPANTDDNYGNSSGNTWNNTGHFEPDDGTSAWRTATEEWGTEDWNEDLSETKIFTASNVSSVPLPAENVTITAGQRIDLAVLLGKTPSTMENDSSNLDPSQAPSLAQPLVFSNSKQTAISQPASGNTFSHHSMVSMLGKGFGDVGEAKGGSTTGSQFLEQFKTAQALAQLAAQHSQSGSTTTSSWDMGSTTQSPSLVQYDLKNPSDSAVHSPFTKRQAFTPSSTMMEVFLQEKSPAVATSTAAPPPPSSPLPSKSTSAPQMSPGSSDNQSSSPQPAQQKLKQQKKKASLTSKIPALAVEMPGSADISGLNLQFGALQFGSEPVLSDYESTPTTSASSSQAPSSLYTSTASESSSTISSNQSQESGYQSGPIQSTTYTSQNNAQGPLYEQRSTQTRRYPSSISSSPQKDLTQAKNGFSSVQATQLQTTQSVEGATGSAVKSDSPSTSSIPPLNETVSAASLLTTTNQHSSSLGGLSHSEEIPNTTTTQHSSTLSTQQNTLSSSTSSGRTSTSTLLHTSVESEANLHSSSSTFSTTSSTVSAPPPVVSVSSSLNSGSSLGLSLGSNSTVTASTRSSVATTSGKAPPNLPPGVPPLLPNPYIMAPGLLHAYPPQVYGYDDLQMLQTRFPLDYYSIPFPTPTTPLTGRDGSLASNPYSGDLTKFGRGDASSPAPATTLAQPQQNQTQTHHTTQQTFLNPALPPGYSYTSLPYYTGVPGLPSTFQYGPAVFPVAPTSSKQHGVNVSVNASATPFQQPSGYGSHGYNTGRKYPPPYKHFWTAES

SEQ ID NO: 6377 - protein, 1068 aa, Homo sapiens
MMTSVGTNRARGNWEQPQNQNQTQHKQRPQATAEQIRLAQMISDHNDADFEEKVKQLIDITGKNQDECVIALHDCNGDVNRAINVLLEGNPDTHSWEMVGKKKGVSGQKDGGQTESNEEGKENRDRDRDYSRRRGGPPRRGRGASRGREFRGQENGLDGTKSGGPSGRGTERGRRGRGRGRGGSGRRGGRFSAQGMGTFNPADYAEPANTDDNYGNSSGNTWNNTGHFEPDDGTSAWRTATEEWGTEDWNEDLSETKIFTASNVSSVPLPAENVTITAGQRIDLAVLLGKTPSTMENDSSNLDPSQAPSLAQPLVFSNSKQTAISQPASGNTFSHHSMVSMLGKGFGDVGEAKGGSTTGSQFLEQFKTAQALAQLAAQHSQSGSTTTSSWDMGSTTQSPSLVQYDLKNPSDSAVHSPFTKRQAFTPSSTMMEVFLQEKSPAVATSTAAPPPPSSPLPSKSTSAPQMSPGSSDNQSSSPQPAQQKLKQQKKKASLTSKIPALAVEMPGSADISGLNLQFGALQFGSEPVLSDYESTPTTSASSSQAPSSLYTSTASESSSTISSNQSQESGYQSGPIQSTTYTSQNNAQGPLYEQRSTQTRRYPSSISSSPQKDLTQAKNGFSSVQATQLQTTQSVEGATGSAVKSDSPSTSSIPPLNETVSAASLLTTTNQHSSSLGGLSHSEEIPNTTTTQHSSTLSTQQNTLSSSTSSGRTSTSTLLHTSVESEANLHSSSSTFSTTSSTVSAPPPVVSVSSSLNSGSSLGLSLGSNSTVTASTRSSVATTSGKAPPNLPPGVPPLLPNPYIMAPGLLHAYPPQVYGYDDLQMLQTRFPLDYYSIPFPTPTTPLTGRDGSLASNPYSGDLTKFGRGDASSPAPATTLAQPQQNQTQTHHTTQQTFLNPALPPGYSYTSLPYYTGVPGLPSTFQYGPAVFPVAPTSSKQHGVNVSVNASATPFQQPSGYGSHGYNTGVSVTSSNTGVPDISGSVYSKTQQSFEKQGFHSGTPAASFNLPSALGSGGPINPATAAAYPPAPFMHILTPHQQPHSQILHHHLQQDGQDILNFVDDQLGE

SEQ ID NO: 6378 - protein, 976 aa, Homo sapiens
MMTSVGTNRARGNWEQPQNQNQTQHKQRPQATAEQIRLAQMISDHNDADFEEKVKQLIDITGKNQDECVIALHDCNGDVNRAINVLLEGNPDTHSWEMVGKKKGVSGQKDGGQTESNEEGKENRDRDRDYSRRRGGPPRRGRVRGQENGLDGTKSGGPSGRGTERGRRGRGRGRGGSGRRGGRFSAQGMGTFNPADYAEPANTDDNYGNSSGNTWNNTGHFEPDDGTSAWRTATEEWGTEDWNEDLSETKIFTASNVSSVPLPAENVTITAGQRIDLAVLLGKTPSTMENDSSNLDPSQAPSLAQPLVFSNSKQTAISQPASGNTFSHHSMVSMLGKGFGDVGEAKGGSTTGSQFLEQFKTAQALAQLAAQHSQSGSTTTSSWDMGSTTQSPSLVQYDLKNPSDSAVHSPFTKRQAFTPSSTMMEVFLQEKSPAVATSTAAPPPPSSPLPSKSTSAPQMSPGSSDNQSSSPQPAQQKLKQQKKKASLTSKIPALAVEMPGSADISGLNLQFGALQFGSEPVLSDYESTPTTSASSSQAPSSLYTSTASESSSTISSNQSQESGYQSGPIQSTTYTSQNNAQGPLYEQRSTQTRRYPSSISSSPQKDLTQAKNGFSSVQATQLQTTQSVEGATGSAVKSDSPSTSSIPPLNETVSAASLLTTTNQHSSSLGGLSHSEEIPNTTTTQHSSTLSTQQNTLSSSTSSGRTSTSTLLHTSVESEANLHSSSSTFSTTSSTVSAPPPVVSVSSSLNSGSSLGLSLGSNSTVTASTRSSVATTSGKAPPNLPPGVPPLLPNPYIMAPGLLHAYPPQVYGYDDLQMLQTRFPLDYYSIPFPTPTTPLTGRDGSLASNPYSGDLTKFGRGDASSPAPATTLAQPQQNQTQTHHTTQQTFLNPALPPGYSYTSLPYYTGVPGLPSTFQYGPAVFPVAPTSSKQHGVNVSVNASATPFQQPSGYGSHGYNTGRKYPPPYKHFWTAES

SEQ ID NO: 6379 - protein, 1104 aa, Homo sapiens
MMTSVGTNRARGNWEQPQNQNQTQHKQRPQATAEQIRLAQMISDHNDADFEEKVKQLIDITGKNQDECVIALHDCNGDVNRAINVLLEGNPDTHSWEMVGKKKGVSGQKDGGQTESNEEGKENRDRDRDYSRRRGGPPRRGRGASRGREFRGQENGLDGTKSGGPSGRGTERGRRGRGRGRGGSGRRGGRFSAQGMGTFNPADYAEPANTDDNYGNSSGNTWNNTGHFEPDDGTSAWRTATEEWGTEDWNEDLSETKIFTASNVSSVPLPAENVTITAGQRIDLAVLLGKTPSTMENDSSNLDPSQAPSLAQPLVFSNSKQTAISQPASGNTFSHHSMVSMLGKGFGDVGEAKGGSTTGSQFLEQFKTAQALAQLAAQHSQSGSTTTSSWDMGSTTQSPSLVQYDLKNPSDSAVHSPFTKRQAFTPSSTMMEVFLQEKSPAVATSTAAPPPPSSPLPSKSTSAPQMSPGSSDNQSSSPQPAQQKLKQQKKKASLTSKIPALAVEMPGSADISGLNLQFGALQFGSEPVLSDYESTPTTSASSSQAPSSLYTSTASESSSTISSNQSQESGYQSGPIQSTTYTSQNNAQGPLYEQRSTQTRRYPSSISSSPQKDLTQAKNGFSSVQATQLQTTQSVEGATGSAVKSDSPSTSSIPPLNETVSAASLLTTTNQHSSSLGGLSHSEEIPNTTTTQHSSTLSTQQNTLSSSTSSGRTSTSTLLHTSVESEANLHSSSSTFSTTSSTVSAPPPVVSVSSSLNSGSSLGLSLGSNSTVTASTRSSVATTSGKAPPNLPPGVPPLLPNPYIMAPGLLHAYPPQVYGYDDLQMLQTRFPLDYYSIPFPTPTTPLTGRDGSLASNPYSGDLTKFGRGDASSPAPATTLAQPQQNQTQTHHTTQQTFLNPALPPGYSYTSLPYYTGVPGLPSTFQYGPAVFPVAPTSSKQHGVNVSVNASATPFQQPSGYGSHGYNTGVSVTSSNTGVPDISGSVYSKTQQSFEKQGFHSGTPAASFNLPSALGSGGPINPATAAAYPPAPFMHILTPHQQPHSQILHHHLQQDGQLPYLQMILCCQRQQEEQTGSGQRSQTSSIPQKPQTNKSAYNSYSWGAN

SEQ ID NO: 6380 - protein, 172 aa, Homo sapiens
METRPRLGATCLLGFSFLLLVISSDGHNGLGKGFGDHIHWRTLEDGKKEAAASGLPLMVIIHKSWCGACKALKPKFAESTEISELSHNFVMVNLEDEEEPKDEDFSPDGGYIPRILFLDPSGKVHPEIINENGNPSYKYFYVSAEQVVQGMKEAQERLTGDAFRKKHLEDEL

SEQ ID NO: 6381 - protein, 287 aa, Homo sapiens
MPPLWALLALGCLRFGSAVNLQPQLASVTFATNNPTLTTVALEKPLCMFDSKEALTGTHEVYLYVLVDSAISRNASVQDSTNTPLGSTFLQTEGGRTGPYKAVAFDLIPCSDLPSLDAIGDVSKASQILNAYLVRVGANGTCLWDPNFQGLCNAPLSAATEYRFKYVLVNMSTGLVEDQTLWSDPIRTNQLTPYSTIDTWPGRRSGGMIVITSILGSLPFFLLVGFAGAIALSLVDMGSSDGETTHDSQITQEAVPKSLGASESSYTSVNRGPPLDRAEVYSSKLQD

SEQ ID NO: 6382 - protein, 166 aa, Homo sapiens
MPPLWALLALGCLRFGSAVNLQPQLASVTFATNNPTLTTVALEKPLCMFDSKEALTGTHEVYLYVLVDSVTPYSTIDTWPGRRSGGMIVITSILGSLPFFLLVGFAGAIALSLVDMGSSDGETTHDSQITQEAVPKSLGASESSYTSVNRGPPLDRAEVYSSKLQD

SEQ ID NO: 6383 - protein, 528 aa, Homo sapiens
MATRVEEAARGRGGGAEEATEAGRGGRRRSPRQKFEIGTMEEAGICGLGVKADMLCNSQSNDILQHQGSNCGGTSNKHSLEEDEGSDFITENRNLVSPAYCTQESREEIPGGEARTDPPDGQQDSECNRNKEKTLGKEVLLLMQALNTLSTPEEKLAALCKKYADLLEESRSVQKQMKILQKKQAQIVKEKVHLQSEHSKAILARSKLESLCRELQRHNKTLKEENMQQAREEEERRKEATAHFQITLNEIQAQLEQHDIHNAKLRQENIELGEKLKKLIEQYALREEHIDKVFKHKELQQQLVDAKLQQTTQLIKEADEKHQREREFLLKEATESRHKYEQMKQQEVQLKQQLSLYMDKFEEFQTTMAKSNELFTTFRQEMEKMTKKIKKLEKETIIWRTKWENNNKALLQMAEEKTVRDKEYKALQIKLERLEKLCRALQTERNELNEKVEVLKEQVSIKAAIKAANRDLATPVMQPCTALDSHKELNTSSKRALGAHLEAEPKSQRSAVQKPPSTGSAPAIESVD

SEQ ID NO: 6384 - protein, 396 aa, Homo sapiens
MATRVEEAARGRGGGAEEATEAGRGGRRRSPRQKLEESRSVQKQMKILQKKQAQIVKEKVHLQSEHSKAILARSKLESLCRELQRHNKTLKEENMQQAREEEERRKEATAHFQITLNEIQAQLEQHDIHNAKLRQENIELGEKLKKLIEQYALREEHIDKVFKHKELQQQLVDAKLQQTTQLIKEADEKHQREREFLLKEATESRHKYEQMKQQEVQLKQQLSLYMDKFEEFQTTMAKSNELFTTFRQEMEKMTKKIKKLEKETIIWRTKWENNNKALLQMAEEKTVRDKEYKALQIKLERLEKLCRALQTERNELNEKVEVLKEQVSIKAAIKAANRDLATPVMQPCTALDSHKELNTSSKRALGAHLEAEPKSQRSAVQKPPSTGSAPAIESVD

SEQ ID NO: 6385 - protein, 1406 aa, Homo sapiens
MDMVENADSLQAQERKDILMKYDKGHRAGLPEDKGPEPVGINSSIDRFGILHETELPPVTAREAKKIRREMTRTSKWMEMLGEWETYKHSSKLIDRVYKGIPMNIRGPVWSVLLNIQEIKLKNPGRYQIMKERGKRSSEHIHHIDLDVRTTLRNHVFFRDRYGAKQRELFYILLAYSEYNPEVGYCRDLSHITALFLLYLPEEDAFWALVQLLASERHSLPGFHSPNGGTVQGLQDQQEHVVPKSQPKTMWHQDKEGLCGQCASLGCLLRNLIDGISLGLTLRLWDVYLVEGEQVLMPITSIALKVQQKRLMKTSRCGLWARLRNQFFDTWAMNDDTVLKHLRASTKKLTRKQGDLPPPAKREQGSLAPRPVPASRGGKTLCKGYRQAPPGPPAQFQRPICSASPPWASRFSTPCPGGAVREDTYPVGTQGVPSLALAQGGPQGSWRFLEWKSMPRLPTDLDIGGPWFPHYDFEWSCWVRAISQEDQLATCWQAEHCGEVHNKDMSWPEEMSFTANSSKIDRQKVPTEKGATGLSNLGNTCFMNSSIQCVSNTQPLTQYFISGRHLYELNRTNPIGMKGHMAKCYGDLVQELWSGTQKSVAPLKLRRTIAKYAPKFDGFQQQDSQELLAFLLDGLHEDLNRVHEKPYVELKDSDGRPDWEVAAEAWDNHLRRNRSIIVDLFHGQLRSQVKCKTCGHISVRFDPFNFLSLPLPMDSYMDLEITVIKLDGTTPVRYGLRLNMDEKYTGLKKQLRDLCGLNSEQILLAEVHDSNIKNFPQDNQKVQLSVSGFLCAFEIPVPSSPISASSPTQIDFSSSPSTNGMFTLTTNGDLPKPIFIPNGMPNTVVPCGTEKNFTNGMVNGHMPSLPDSPFTGYIIAVHRKMMRTELYFLSPQENRPSLFGMPLIVPCTVHTRKKDLYDAVWIQVSWLARPLPPQEASIHAQDRDNCMGYQYPFTLRVVQKDGNSCAWCPQYRFCRGCKIDCGEDRAFIGNAYIAVDWHPTALHLRYQTSQERVVDKHESVEQSRRAQAEPINLDSCLRAFTSEEELGESEMYYCSKCKTHCLATKKLDLWRLPPFLIIHLKRFQFVNDQWIKSQKIVRFLRESFDPSAFLVPRDPALCQHKPLTPQGDELSKPRILAREVKKVDAQSSAGKEDMLLSKSPSSLSANISSSPKGSPSSSRKSGTSCPSSKNSSPNSSPRTLGRSKGRLRLPQIGSKNKPSSSKKNLDASKENGAGQICELADALSRGHMRGGSQPELVTPQDHEVALANGFLYEHEACGNGCGDGYSNGQLGNHSEEDSTDDQREDTHIKPIYNLYAISCHSGILSGGHYITYAKNPNCKWYCYNDSSCEELHPDEIDTDSAYILFYEQQGIDYAQFLPKIDGKKMADTSSTDEDSESDYEKYSMLQ

SEQ ID NO: 6386 - protein, 1089 aa, Homo sapiens
MPQRLPHARQHTPLPLGSADYRRVVSVRPQGPHRDPKDSRDAAKREQGSLAPRPVPASRGGKTLCKGYRQAPPGPPAQFQRPICSASPPWASRFSTPCPGGAVREDTYPVGTQGVPSLALAQGGPQGSWRFLEWKSMPRLPTDLDIGGPWFPHYDFEWSCWVRAISQEDQLATCWQAEHCGEVHNKDMSWPEEMSFTANSSKIDRQKVPTEKGATGLSNLGNTCFMNSSIQCVSNTQPLTQYFISGRHLYELNRTNPIGMKGHMAKCYGDLVQELWSGTQKSVAPLKLRRTIAKYAPKFDGFQQQDSQELLAFLLDGLHEDLNRVHEKPYVELKDSDGRPDWEVAAEAWDNHLRRNRSIIVDLFHGQLRSQVKCKTCGHISVRFDPFNFLSLPLPMDSYMDLEITVIKLDGTTPVRYGLRLNMDEKYTGLKKQLRDLCGLNSEQILLAEVHDSNIKNFPQDNQKVQLSVSGFLCAFEIPVPSSPISASSPTQIDFSSSPSTNGMFTLTTNGDLPKPIFIPNGMPNTVVPCGTEKNFTNGMVNGHMPSLPDSPFTGYIIAVHRKMMRTELYFLSPQENRPSLFGMPLIVPCTVHTRKKDLYDAVWIQVSWLARPLPPQEASIHAQDRDNCMGYQYPFTLRVVQKDGNSCAWCPQYRFCRGCKIDCGEDRAFIGNAYIAVDWHPTALHLRYQTSQERVVDKHESVEQSRRAQAEPINLDSCLRAFTSEEELGESEMYYCSKCKTHCLATKKLDLWRLPPFLIIHLKRFQFVNDQWIKSQKIVRFLRESFDPSAFLVPRDPALCQHKPLTPQGDELSKPRILAREVKKVDAQSSAGKEDMLLSKSPSSLSANISSSPKGSPSSSRKSGTSCPSSKNSSPNSSPRTLGRSKGRLRLPQIGSKNKPSSSKKNLDASKENGAGQICELADALSRGHMRGGSQPELVTPQDHEVALANGFLYEHEACGNGCGDGYSNGQLGNHSEEDSTDDQREDTHIKPIYNLYAISCHSGILSGGHYITYAKNPNCKWYCYNDSSCEELHPDEIDTDSAYILFYEQQGIDYAQFLPKIDGKKMADTSSTDEDSESDYEKYSMLQ

SEQ ID NO: 6387 - protein, 786 aa, Homo sapiens
MDMVENADSLQAQERKDILMKYDKGHRAGLPEDKGPEPVGINSSIDRFGILHETELPPVTAREAKKIRREMTRTSKWMEMLGEWETYKHSSKLIDRVYKGIPMNIRGPVWSVLLNIQEIKLKNPGRYQIMKERGKRSSEHIHHIDLDVRTTLRNHVFFRDRYGAKQRELFYILLAYSEYNPEVGYCRDLSHITALFLLYLPEEDAFWALVQLLASERHSLPGFHSPNGGTVQGLQDQQEHVVPKSQPKTMWHQDKEGLCGQCASLGCLLRNLIDGISLGLTLRLWDVYLVEGEQVLMPITSIALKVQQKRLMKTSRCGLWARLRNQFFDTWAMNDDTVLKHLRASTKKLTRKQGDLPPPAKREQGSLAPRPVPASRGGKTLCKGYRQAPPGPPAQFQRPICSASPPWASRFSTPCPGGAVREDTYPVGTQGVPSLALAQGGPQGSWRFLEWKSMPRLPTDLDIGGPWFPHYDFEWSCWVRAISQEDQLATCWQAEHCGEVHNKDMSWPEEMSFTANSSKIDRQKVPTEKGATGLSNLGNTCFMNSSIQCVSNTQPLTQYFISGRHLYELNRTNPIGMKGHMAKCYGDLVQELWSGTQKSVAPLKLRRTIAKYAPKFDGFQQQDSQELLAFLLDGLHEDLNRVHEKPYVELKDSDGRPDWEVAAEAWDNHLRRNRSIIVDLFHGQLRSQVKCKTCGHISVRFDPFNFLSLPLPMDSYMDLEITVIKLDGTTPVRYGLRLNMDEKYTGLKKQLRDLCGLNSEQILLAEVHDSNIKISPLHHLQMECSP

SEQ ID NO: 6388 - protein, 502 aa, Homo sapiens
MASKKLGADFHGTFSYLDDVPFKTGDKFKTPAKVGLPIGFSLPDCLQVVREVQYDFSLEKKTIEWAEEIKKIEEAEREAECKIAEAEAKVNSKSGPEGDSKMSFSKTHSTATMPPPINPILASLQHNSILTPTRVSSSATKQKVLSPPHIKADFNLADFECEEDPFDNLELKTIDEKEELRNILVGTTGPIMAQLLDNNLPRGGSGSVLQDEEVLASLERATLDFKPLHKPNGFITLPQLGNCEKMSLSSKVSLPPIPAVSNIKSLSFPKLDSDDSNQKTAKLASTFHSTSCLRNGTFQNSLKPSTQSSASELNGHHTLGLSALNLDSGTEMPALTSSQMPSLSVLSVCTEESSPPNTGPTVTPPNFSVSQVPNMPSCPQAYSELQMLSPSERQCVETVVNMGYSYECVLRAMKKKGENIEQILDYLFAHGQLCEKGFDPLLVEEALEMHQCSEEKMMEFLQLMSKFKEMGFELKDIKEVLLLHNNDQDNALEDLMARAGAS

SEQ ID NO: 6389 - protein, 441 aa, Homo sapiens
MASKKLGADFHGTFSYLDDVPFKTGDKFKTPAKVGLPIGFSLPDCLQVVREVQYDFSLEKKTIEWAEEIKKIEEAEREAECKIAEAEAKVNSKSGPEGDSKMSFSKTHSTATMPPPINPILASLQHNSILTPTRVSSSATKQKVLSPPHIKADFNLADFECEEDPFDNLELKTIDEKEELRNILVGTTGPIMAQLLDNNLPRGGSGSVLQDEEVLASLERATLDFKPLHKPNGFITLPQLGNCEKMSLSSKVSLPPIPAVSNIKSLSFPKLDSDDSNQKTAKLASTFHSTSCLRNGTFQNSLKPSTQSSASELNGHHTLGLSALNLDSGTEMPALTSSQMPSLSVLSVCTEESSPPNTGPTILDYLFAHGQLCEKGFDPLLVEEALEMHQCSEEKMMEFLQLMSKFKEMGFELKDIKEVLLLHNNDQDNALEDLMARAGAS

SEQ ID NO: 6390 - protein, 538 aa, Homo sapiens
MSGAVRGRRREVGLQHGGCGTGGGYGDGLARSGQSWRWWRSLSLGAVGSSAGTEPGRPAGASTFRLLRRRQQRHSGSKWLLRSWVQIFMYDFSLEKKTIEWAEEIKKIEEAEREAECKIAEAEAKVNSKSGPEGDSKMSFSKTHSTATMPPPINPILASLQHNSILTPTRVSSSATKQKVLSPPHIKADFNLADFECEEDPFDNLELKTIDEKEELRNILVGTTGPIMAQLLDNNLPRGGSGSVLQDEEVLASLERATLDFKPLHKPNGFITLPQLGNCEKMSLSSKVSLPPIPAVSNIKSLSFPKLDSDDSNQKTAKLASTFHSTSCLRNGTFQNSLKPSTQSSASELNGHHTLGLSALNLDSGTEMPALTSSQMPSLSVLSVCTEESSPPNTGPTVTPPNFSVSQVPNMPSCPQAYSELQMLSPSERQCVETVVNMGYSYECVLRAMKKKGENIEQILDYLFAHGQLCEKGFDPLLVEEALEMHQCSEEKMMEFLQLMSKFKEMGFELKDIKEVLLLHNNDQDNALEDLMARAGAS

SEQ ID NO: 6391 - protein, 566 aa, Homo sapiens
MSGAVRGRRREVGLQHGGCGTGGGYGDGLARSGQSWRWWRSLSLGAVGSSAGTEPGRPAGASTFRLLRRRQQRHSGTFSYLDDVPFKTGDKFKTPAKVGLPIGFSLPDCLQVVREVQYDFSLEKKTIEWAEEIKKIEEAEREAECKIAEAEAKVNSKSGPEGDSKMSFSKTHSTATMPPPINPILASLQHNSILTPTRVSSSATKQKVLSPPHIKADFNLADFECEEDPFDNLELKTIDEKEELRNILVGTTGPIMAQLLDNNLPRGGSGSVLQDEEVLASLERATLDFKPLHKPNGFITLPQLGNCEKMSLSSKVSLPPIPAVSNIKSLSFPKLDSDDSNQKTAKLASTFHSTSCLRNGTFQNSLKPSTQSSASELNGHHTLGLSALNLDSGTEMPALTSSQMPSLSVLSVCTEESSPPNTGPTVTPPNFSVSQVPNMPSCPQAYSELQMLSPSERQCVETVVNMGYSYECVLRAMKKKGENIEQILDYLFAHGQLCEKGFDPLLVEEALEMHQCSEEKMMEFLQLMSKFKEMGFELKDIKEVLLLHNNDQDNALEDLMARAGAS

SEQ ID NO: 6392 - protein, 121 aa, Homo sapiens
MDKILGASFLVLWLQLCWVSGQQKEKSDQQQVKQSPQSLIVQKGGISIINCAYENTAFDYFPWYQQFPGKGPALLIAIRPDVSEKKEGRFTISFNKSAKQFSSHIMDSQPGDSATYFCAAS

SEQ ID NO: 6393 - protein, 699 aa, Homo sapiens
MSASASVGGPVPQPPPGPAAALPPGSAARALHVELPSQQRRLRHLRNIAARNIVNRNGHQLLDTYFTLHLCSTEKIYKEFYRSEVIKNSLNPTWRSLDFGIMPDRLDTSVSCFVVKIWGGKENIYQLLIEWKVCLDGLKYLGQQIHARNQNEIIFGLNDGYYGAPFEHKGYSNAQKTILLQVDQNCVRNSYDVFSLLRLHRAQCAIKQTQVTVQKIGKEIEEKLRLTSTSNELKKKSECLQLKILVLQNELERQKKALGREVALLHKQQIALQDKGSAFSAEHLKLQLQKESLNELRKECTAKRELFLKTNAQLTIRCRQLLSELSYIYPIDLNEHKDYFVCGVKLPNSEDFQAKDDGSIAVALGYTAHLVSMISFFLQVPLRYPIIHKGSRSTIKDNINDKLTEKEREFPLYPKGGEKLQFDYGVYLLNKNIAQLRYQHGLGTPDLRQTLPNLKNFMEHGLMVRCDRHHTSSAIPVPKRQSSIFGGADVGFSGGIPSPDKGHRKRASSENERLQYKTPPPSYNSALAQPVTTVPSMGETERKITSLSSSLDTSLDFSKENKKKGEDLVGSLNGGHANVHPSQEQGEALSGHRATVNGTLLPSEQAGSASVQLPGEFHPVSEAELCCTVEQAEEIIGLEATGFASGDQLEAFNCIPVDSAVAVECDEQVLGEFEEFSRRIYALNENVSSFRRPRRSSDK

SEQ ID NO: 6394 - protein, 327 aa, Homo sapiens
MISFFLQVPLRYPIIHKGSRSTIKDNINDKLTEKEREFPLYPKGGEKLQFDYGVYLLNKNIAQLRYQHGLGTPDLRQTLPNLKNFMEHGLMVRCDRHHTSSAIPVPKRQSSIFGGADVGFSGGIPSPDKGHRKRASSENERLQYKTPPPSYNSALAQPVTTVPSMGETERKITSLSSSLDTSLDFSKENKKKGEDLVGSLNGGHANVHPSQEQGEALSGHRATVNGTLLPSEQAGSASVQLPGEFHPVSEAELCCTVEQAEEIIGLEATGFASGDQLEAFNCIPVDSAVAVECDEQVLGEFEEFSRRIYALNENVSSFRRPRRSSDK

SEQ ID NO: 6395 - protein, 429 aa, Homo sapiens
MMSHPCVSLLGVPVLNPALVPHLAQGQVLLVSDPSPNTDPAKYSESTSATRHQMKGEDAQPQEMASTSFPRASGPSPEFRQHGDSDGKRGSPQNLPIEHHFACKECGDTFRLKVLLVQHQRVHSEEKGWECGDCGKVFRGVAEFNEHRKSHVAAEPQPGPSRALENAAEKREQMEREAKPFECEECGKRFKKNAGLSQHLRVHSREKPFDCEECGRSFKVNTHLFRHQKLHTSEKPFACKACSRDFLDRQELLKHQRMHTGHLPFDCDDCGKSFRGVNGLAEHQRIHSGAKPYGCPHCGKLFRRSSELTKHRRIHTGEKPYACGQCGKAFRQSSSLLEHARIHSGERPYACGECGKAFRGPSDLIKHRRIHSGLKPYECDKCGKAFRRSSGLSRHRRIHSGARRCECSQCGRVFKRRSALQKHQPTHHE

SEQ ID NO: 6396 - protein, 376 aa, Homo sapiens
MKGEDAQPQEMASTSFPRASGPSPEFRQHGDSDGKRGSPQNLPIEHHFACKECGDTFRLKVLLVQHQRVHSEEKGWECGDCGKVFRGVAEFNEHRKSHVAAEPQPGPSRALENAAEKREQMEREAKPFECEECGKRFKKNAGLSQHLRVHSREKPFDCEECGRSFKVNTHLFRHQKLHTSEKPFACKACSRDFLDRQELLKHQRMHTGHLPFDCDDCGKSFRGVNGLAEHQRIHSGAKPYGCPHCGKLFRRSSELTKHRRIHTGEKPYACGQCGKAFRQSSSLLEHARIHSGERPYACGECGKAFRGPSDLIKHRRIHSGLKPYECDKCGKAFRRSSGLSRHRRIHSGARRCECSQCGRVFKRRSALQKHQPTHHE

SEQ ID NO: 6397 - protein, 280 aa, Homo sapiens
MCSAFHRAESGTELLARLEGRSSLKEIEPNLFADEDSPVHGDILEFHGPEGTGKTEMLYHLTARCILPKSEGGLEVEVLFIDTDYHFDMLRLVTILEHRLSQSSEEIIKYCLGRFFLVYCSSSTHLLLTLYSLESMFCSHPSLCLLILDSLSAFYWIDRVNGGESVNLQESTLRKCSQCLEKLVNDYRLVLFATTQTIMQKASSSSEEPSHASRRLCDVDIDYRPYLCKAWQQLVKHRMFFSKQDDSQSSNQFSLVSRCLKSNSLKKHFFIIGESGVEFC

SEQ ID NO: 6398 - protein, 732 aa, Homo sapiens
MVRSGNKAAVVLCMDVGFTMSNSIPGIESPFEQAKKVITMFVQRQVFAENKDEIALVLFGTDGTDNPLSGGDQYQNITVHRHLMLPDFDLLEDIESKIQPGSQQADFLDALIVSMDVIQHETIGKKFEKRHIEIFTDLSSRFSKSQLDIIIHSLKKCDISLQFFLPFSLGKEDGSGDRGDGPFRLGGHGPSFPLKGITEQQKEGLEIVKMVMISLEGEDGLDEIYSFSESLRKLCVFKKIERHSIHWPCRLTIGSNLSIRIAAYKSILQERVKKTWTVVDAKTLKKEDIQKETVYCLNDDDETEVLKEDIIQGFRYGSDIVPFSKVDEEQMKYKSEGKCFSVLGFCKSSQVQRRFFMGNQVLKVFAARDDEAAAVALSSLIHALDDLDMVAIVRYAYDKRANPQVGVAFPHIKHNYECLVYVQLPFMEDLRQYMFSSLKNSKKYAPTEAQLNAVDALIDSMSLAKKDEKTDTLEDLFPTTKIPNPRFQRLFQCLLHRALHPREPLPPIQQHIWNMLNPPAEVTTKSQIPLSKIKTLFPLIEAKKKDQVTAQEIFQDNHEDGPTAKKLKTEQGGAHFSVSSLAEGSVTSVGSVNPAENFRVLVKQKKASFEEASNQLINHIEQFLDTNETPYFMKSIDCIRAFREEAIKFSEEQRFNNFLKALQEKVEIKQLNHFWEIVVQDGITLITKEEASGSSVTAEEAKKFLAPKDKPSGDTAAVFEEGGDVDDLLDMI

SEQ ID NO: 6399 - protein, 1124 aa, Homo sapiens
MADGPRCKRRKQANPRRNNVTNYNTVVETNSDSDDEDKLHIVEEESVTDAADCEGVPEDDLPTDQTVLPGRSSEREGNAKNCWEDDRKEGQEILGPEAQADEAGCTVKDDECESDAENEQNHDPNVEEFLQQQDTAVIFPEAPEEDQRQGTPEASGHDENGTPDAFSQLLTCPYCDRGYKRFTSLKEHIKYRHEKNEDNFSCSLCSYTFAYRTQLERHMTSHKSGRDQRHVTQSGCNRKFKCTECGKAFKYKHHLKEHLRIHSGEKPYECPNCKKRFSHSGSYSSHISSKKCISLIPVNGRPRTGLKTSQCSSPSLSASPGSPTRPQIRQKIENKPLQEQLSVNQIKTEPVDYEFKPIVVASGINCSTPLQNGVFTGGGPLQATSSPQGMVQAVVLPTVGLVSPISINLSDIQNVLKVAVDGNVIRQVLENNQANLASKEQETINASPIQQGGHSVISAISLPLVDQDGTTKIIINYSLEQPSQLQVVPQNLKKENPVATNSCKSEKLPEDLTVKSEKDKSFEGGVNDSTCLLCDDCPGDINALPELKHYDLKQPTQPPPLPAAEAEKPESSVSSATGDGNLSPSQPPLKNLLSLLKAYYALNAQPSAEELSKIADSVNLPLDVVKKWFEKMQAGQISVQSSEPSSPEPGKVNIPAKNNDQPQSANANEPQDSTVNLQSPLKMTNSPVLPVGSTTNGSRSSTPSPSPLNLSSSRNTQGYLYTAEGAQEEPQVEPLDLSLPKQQGELLERSTITSVYQNSVYSVQEEPLNLSCAKKEPQKDSCVTDSEPVVNVIPPSANPINIAIPTVTAQLPTIVAIADQNSVPCLRALAANKQTILIPQVAYTYSTTVSPAVQEPPLKVIQPNGNQDERQDTSSEGVSNVEDQNDSDSTPPKKKMRKTENGMYACDLCDKIFQKSSSLLRHKYEHTGKRPHECGICKKAFKHKHHLIEHMRLHSGEKPYQCDKCGKRFSHSGSYSQHMNHRYSYCKREAEERDSTEQEEAGPEILSNEHVGARASPSQGDSDERESLTREEDEDSEKEEEEEDKEMEELQEEKECEKPQGDEEEEEEEEEVEEEEVEEAENEGEEAKTEGLMKDDRAESQASSLGQKVGESSEQVSEEKTNEA

SEQ ID NO: 6400 - protein, 1125 aa, Homo sapiens
MADGPRCKRRKQANPRRNNVTNYNTVVETNSDSDDEDKLHIVEEESVTDAADCEGVPEDDLPTDQTVLPGRSSEREGNAKNCWEDDTGKEGQEILGPEAQADEAGCTVKDDECESDAENEQNHDPNVEEFLQQQDTAVIFPEAPEEDQRQGTPEASGHDENGTPDAFSQLLTCPYCDRGYKRFTSLKEHIKYRHEKNEDNFSCSLCSYTFAYRTQLERHMTSHKSGRDQRHVTQSGCNRKFKCTECGKAFKYKHHLKEHLRIHSGEKPYECPNCKKRFSHSGSYSSHISSKKCISLIPVNGRPRTGLKTSQCSSPSLSASPGSPTRPQIRQKIENKPLQEQLSVNQIKTEPVDYEFKPIVVASGINCSTPLQNGVFTGGGPLQATSSPQGMVQAVVLPTVGLVSPISINLSDIQNVLKVAVDGNVIRQVLENNQANLASKEQETINASPIQQGGHSVISAISLPLVDQDGTTKIIINYSLEQPSQLQVVPQNLKKENPVATNSCKSEKLPEDLTVKSEKDKSFEGGVNDSTCLLCDDCPGDINALPELKHYDLKQPTQPPPLPAAEAEKPESSVSSATGDGNLSPSQPPLKNLLSLLKAYYALNAQPSAEELSKIADSVNLPLDVVKKWFEKMQAGQISVQSSEPSSPEPGKVNIPAKNNDQPQSANANEPQDSTVNLQSPLKMTNSPVLPVGSTTNGSRSSTPSPSPLNLSSSRNTQGYLYTAEGAQEEPQVEPLDLSLPKQQGELLERSTITSVYQNSVYSVQEEPLNLSCAKKEPQKDSCVTDSEPVVNVIPPSANPINIAIPTVTAQLPTIVAIADQNSVPCLRALAANKQTILIPQVAYTYSTTVSPAVQEPPLKVIQPNGNQDERQDTSSEGVSNVEDQNDSDSTPPKKKMRKTENGMYACDLCDKIFQKSSSLLRHKYEHTGKRPHECGICKKAFKHKHHLIEHMRLHSGEKPYQCDKCGKRFSHSGSYSQHMNHRYSYCKREAEERDSTEQEEAGPEILSNEHVGARASPSQGDSDERESLTREEDEDSEKEEEEEDKEMEELQEEKECEKPQGDEEEEEEEEEVEEEEVEEAENEGEEAKTEGLMKDDRAESQASSLGQKVGESSEQVSEEKTNEA

SEQ ID NO: 6401 - protein, 1057 aa, Homo sapiens
MADGPRCKRRKQANPRRNNGKEGQEILGPEAQADEAGCTVKDDECESDAENEQNHDPNVEEFLQQQDTAVIFPEAPEEDQRQGTPEASGHDENGTPDAFSQLLTCPYCDRGYKRFTSLKEHIKYRHEKNEDNFSCSLCSYTFAYRTQLERHMTSHKSGRDQRHVTQSGCNRKFKCTECGKAFKYKHHLKEHLRIHSGEKPYECPNCKKRFSHSGSYSSHISSKKCISLIPVNGRPRTGLKTSQCSSPSLSASPGSPTRPQIRQKIENKPLQEQLSVNQIKTEPVDYEFKPIVVASGINCSTPLQNGVFTGGGPLQATSSPQGMVQAVVLPTVGLVSPISINLSDIQNVLKVAVDGNVIRQVLENNQANLASKEQETINASPIQQGGHSVISAISLPLVDQDGTTKIIINYSLEQPSQLQVVPQNLKKENPVATNSCKSEKLPEDLTVKSEKDKSFEGGVNDSTCLLCDDCPGDINALPELKHYDLKQPTQPPPLPAAEAEKPESSVSSATGDGNLSPSQPPLKNLLSLLKAYYALNAQPSAEELSKIADSVNLPLDVVKKWFEKMQAGQISVQSSEPSSPEPGKVNIPAKNNDQPQSANANEPQDSTVNLQSPLKMTNSPVLPVGSTTNGSRSSTPSPSPLNLSSSRNTQGYLYTAEGAQEEPQVEPLDLSLPKQQGELLERSTITSVYQNSVYSVQEEPLNLSCAKKEPQKDSCVTDSEPVVNVIPPSANPINIAIPTVTAQLPTIVAIADQNSVPCLRALAANKQTILIPQVAYTYSTTVSPAVQEPPLKVIQPNGNQDERQDTSSEGVSNVEDQNDSDSTPPKKKMRKTENGMYACDLCDKIFQKSSSLLRHKYEHTGKRPHECGICKKAFKHKHHLIEHMRLHSGEKPYQCDKCGKRFSHSGSYSQHMNHRYSYCKREAEERDSTEQEEAGPEILSNEHVGARASPSQGDSDERESLTREEDEDSEKEEEEEDKEMEELQEEKECEKPQGDEEEEEEEEEVEEEEVEEAENEGEEAKTEGLMKDDRAESQASSLGQKVGESSEQVSEEKTNEA

SEQ ID NO: 6402 - protein, 1104 aa, Homo sapiens
MADGPRCKRRKQANPRRNNVTNYNTVVETNSDSDDEDKLHIVEEESVTDAADCEGVPEDDLPTDQTVLPGRSSEREGNAKNCWEDDIKDDECESDAENEQNHDPNVEEFLQQQDTAVIFPEAPEEDQRQGTPEASGHDENGTPDAFSQLLTCPYCDRGYKRFTSLKEHIKYRHEKNEDNFSCSLCSYTFAYRTQLERHMTSHKSGRDQRHVTQSGCNRKFKCTECGKAFKYKHHLKEHLRIHSGEKPYECPNCKKRFSHSGSYSSHISSKKCISLIPVNGRPRTGLKTSQCSSPSLSASPGSPTRPQIRQKIENKPLQEQLSVNQIKTEPVDYEFKPIVVASGINCSTPLQNGVFTGGGPLQATSSPQGMVQAVVLPTVGLVSPISINLSDIQNVLKVAVDGNVIRQVLENNQANLASKEQETINASPIQQGGHSVISAISLPLVDQDGTTKIIINYSLEQPSQLQVVPQNLKKENPVATNSCKSEKLPEDLTVKSEKDKSFEGGVNDSTCLLCDDCPGDINALPELKHYDLKQPTQPPPLPAAEAEKPESSVSSATGDGNLSPSQPPLKNLLSLLKAYYALNAQPSAEELSKIADSVNLPLDVVKKWFEKMQAGQISVQSSEPSSPEPGKVNIPAKNNDQPQSANANEPQDSTVNLQSPLKMTNSPVLPVGSTTNGSRSSTPSPSPLNLSSSRNTQGYLYTAEGAQEEPQVEPLDLSLPKQQGELLERSTITSVYQNSVYSVQEEPLNLSCAKKEPQKDSCVTDSEPVVNVIPPSANPINIAIPTVTAQLPTIVAIADQNSVPCLRALAANKQTILIPQVAYTYSTTVSPAVQEPPLKVIQPNGNQDERQDTSSEGVSNVEDQNDSDSTPPKKKMRKTENGMYACDLCDKIFQKSSSLLRHKYEHTGKRPHECGICKKAFKHKHHLIEHMRLHSGEKPYQCDKCGKRFSHSGSYSQHMNHRYSYCKREAEERDSTEQEEAGPEILSNEHVGARASPSQGDSDERESLTREEDEDSEKEEEEEDKEMEELQEEKECEKPQGDEEEEEEEEEVEEEEVEEAENEGEEAKTEGLMKDDRAESQASSLGQKVGESSEQVSEEKTNEA

SEQ ID NO: 6403 - protein, 1108 aa, Homo sapiens
MKVTNYNTVVETNSDSDDEDKLHIVEEESVTDAADCEGVPEDDLPTDQTVLPGRSSEREGNAKNCWEDDTGKEGQEILGPEAQADEAGCTVKDDECESDAENEQNHDPNVEEFLQQQDTAVIFPEAPEEDQRQGTPEASGHDENGTPDAFSQLLTCPYCDRGYKRFTSLKEHIKYRHEKNEDNFSCSLCSYTFAYRTQLERHMTSHKSGRDQRHVTQSGCNRKFKCTECGKAFKYKHHLKEHLRIHSGEKPYECPNCKKRFSHSGSYSSHISSKKCISLIPVNGRPRTGLKTSQCSSPSLSASPGSPTRPQIRQKIENKPLQEQLSVNQIKTEPVDYEFKPIVVASGINCSTPLQNGVFTGGGPLQATSSPQGMVQAVVLPTVGLVSPISINLSDIQNVLKVAVDGNVIRQVLENNQANLASKEQETINASPIQQGGHSVISAISLPLVDQDGTTKIIINYSLEQPSQLQVVPQNLKKENPVATNSCKSEKLPEDLTVKSEKDKSFEGGVNDSTCLLCDDCPGDINALPELKHYDLKQPTQPPPLPAAEAEKPESSVSSATGDGNLSPSQPPLKNLLSLLKAYYALNAQPSAEELSKIADSVNLPLDVVKKWFEKMQAGQISVQSSEPSSPEPGKVNIPAKNNDQPQSANANEPQDSTVNLQSPLKMTNSPVLPVGSTTNGSRSSTPSPSPLNLSSSRNTQGYLYTAEGAQEEPQVEPLDLSLPKQQGELLERSTITSVYQNSVYSVQEEPLNLSCAKKEPQKDSCVTDSEPVVNVIPPSANPINIAIPTVTAQLPTIVAIADQNSVPCLRALAANKQTILIPQVAYTYSTTVSPAVQEPPLKVIQPNGNQDERQDTSSEGVSNVEDQNDSDSTPPKKKMRKTENGMYACDLCDKIFQKSSSLLRHKYEHTGKRPHECGICKKAFKHKHHLIEHMRLHSGEKPYQCDKCGKRFSHSGSYSQHMNHRYSYCKREAEERDSTEQEEAGPEILSNEHVGARASPSQGDSDERESLTREEDEDSEKEEEEEDKEMEELQEEKECEKPQGDEEEEEEEEEVEEEEVEEAENEGEEAKTEGLMKDDRAESQASSLGQKVGESSEQVSEEKTNEA

SEQ ID NO: 6404 - protein, 827 aa, Homo sapiens
MENPQDIFSSNGGCLSDIVIEKYLVESKESVSHVQLACSMQDCAFPLDGTELCIWNTKDPSHQLLILRGHHQPITAMAFGNKVNPLLICSASLDYVIMWNLDECREKVLQGLVPRGTVMGSLLGKVLCLQLSLDDHVVAVCAGNKIFMLDIETQAVRAELQGHLGPVTAVEFCPWRAGTLISASEDRGFKVWDHCTGSLIYSSSVLSAYPLLSLFIDAESRQLVTGCADGQLWIFSLMDGHHYRRVARVDLRKKTETFSTRRVKSGLCSQPEESQLPSTSALGKGEQVEVTFPVLRLAPCDLSLIPNSACGCLSSENTRCVWIGSSVGLFVFNLANLEVEAALYYKDFQSLSILLAGSCALRNRTADQKVLCLLASLFGGKIAVLEINPAALVRAQQCPSMGQSLSVPASSCVLPTSPLYLGIAKEKSTKAASEQRRAARNVMKDQRLVFHSKVRSSGYASAPHVTMFSPKTNIKSEGKGSSRSRSSCAREAYPVECAVPTKPGPQVAAAPTCTRVCCIQYSGDGQWLACGLANHLLLVFDASLTGTPAVFSGHDGAVNAVCWSQDRRWLLSAARDGTLRMWSARGAELALLLGKDMFSKPIQSAQFYYIDAFILLSSGPEFQLLRYHIDTCKDEIKRYKQKSKSKLICRLSTTGAVDMTSLSAVNDFYSHIVLAAGRNRTVEVFDLNAGCSAAVIAEAHSRPVHQICQNKGSSFTTQQPQAYNLFLTTAIGDGMRLWDLRTLRCERHFEGHPTRGYPCGIAFSPCGRFAACGAEDRHAYVYEMGSSTFSHRLAGHTDTVTGVAFNPSAPQLATATLDGKLQLFLAE

SEQ ID NO: 6405 - protein, 730 aa, Homo sapiens
MENPQDIFSSNGGCLSDIVIEKYLVESKESVSHVQLACSMQDCAFPLDGTELCIWNTKDPSHQLLILRGHHQPITAMAFGNKVNPLLICSASLDYVIMWNLDECREKVLQAYPLLSLFIDAESRQLVTGCADGQLWIFSLMDGHHYRRVARVDLRKKTETFSTRRVKSGLCSQPEESQLPSTSALGKGEQVEVTFPVLRLAPCDLSLIPNSACGCLSSENTRCVWIGSSVGLFVFNLANLEVEAALYYKDFQSLSILLAGSCALRNRTADQKVLCLLASLFGGKIAVLEINPAALVRAQQCPSMGQSLSVPASSCVLPTSPLYLGIAKEKSTKAASEQRRAARNVMKDQRLVFHSKVRSSGYASAPHVTMFSPKTNIKSEGKGSSRSRSSCAREAYPVECAVPTKPGPQVAAAPTCTRVCCIQYSGDGQWLACGLANHLLLVFDASLTGTPAVFSGHDGAVNAVCWSQDRRWLLSAARDGTLRMWSARGAELALLLGKDMFSKPIQSAQFYYIDAFILLSSGPEFQLLRYHIDTCKDEIKRYKQKSKSKLICRLSTTGAVDMTSLSAVNDFYSHIVLAAGRNRTVEVFDLNAGCSAAVIAEAHSRPVHQICQNKGSSFTTQQPQAYNLFLTTAIGDGMRLWDLRTLRCERHFEGHPTRGYPCGIAFSPCGRFAACGAEDRHAYVYEMGSSTFSHRLAGHTDTVTGVAFNPSAPQLATATLDGKLQLFLAE

SEQ ID NO: 6406 - protein, 112 aa, Homo sapiens
MENPQDIFSSNGGCLSDIVIEKYLVESKESVSHVQLACSMQDCAFPLDGTELCIWNTKDPSHQLLILRGHHQPITAMAFGNKVNPLLICSASLDYVIMWNLDECREKVLQGK

SEQ ID NO: 6407 - protein, 895 aa, Homo sapiens
MENPQDIFSSNGGCLSDIVIEKYLVESKESVSHVQLACSMQDCAFPLDGTELCIWNTKDPSHQLLILRGHHQPITAMAFGNKVNPLLICSASLDYVIMWNLDECREKVLQGLVPRGTVMGSLLGKVLCLQLSLDDHVVAVCAGNKIFMLDIEQRFSVTYIERPDVNNRHKVPPPTFLHTFSQTQAVRAELQGHLGPVTAVEFCPWRAGTLISASEDRGFKVWDHCTGSLIYSSSVLSAYPLLSLFIDAESRQLVTGCADGQLWIFSLMDGHHYRRVARVDLRKKTETFSTRRVKSGLCSQPEESQLPSTSALGKGEQVEVTFPVLRLAPCDLSLIPNSACGCLSSENTRCVWIGSSVGLFVFNLANLEVEAALYYKDFQSLSILLAGSCALRNRTADQKVLCLLASLFGGKIAVLEINPAALVRAQQCPSMGQSLSVPASSCVLPTSPLYLGIAKEKSTKAASEQRRAARNVMKDQRLVFHSKVRSSGYASAPHVTMFSPKTNIKSEGKGSSRSRSSCAREAYPVECAVPTKPGPQVAAAPTCTRVCCIQYSGDGQWLACGLANHLLLVFDASLTGTPAVFSGHDGAVNAVCWSQDRRWLLSAARDGTLRMWSARGAELALLLGKDMFSKPIQSAQFYYIDAFILLSSGPEFQLLRYHIDTCKDEIKRYKQKSKSKLICRLSTTGAVDMTSLSAVNDFYSHIVLAAGRNRTVEVFDLNAGCSAAVIAEAHSRPVHQICQNKGSSFTTQQPQAYNLFLTTAIGDGMRLWDLRTLRCERHFEGHPTRGYPCGIAFSPCGRFAACGAEDRHAYVYEMGSSTFSHRLAGHTDTVTGVAFNPSAPQMESRSVAHAGVQWHDLGSLQPPPSRFKQFFCLSLPSSWDYSLPQLPWMVNSSSF

SEQ ID NO: 6408 - protein, 1590 aa, Homo sapiens
MPGGACVLVIALMFLAWGEAQECSPGGHQFLRSPYRSVRFDSWHLQQSAVQDLICDHSLSPGWYRFLILDRPAEMPTKCVEMNHCGTQAPIWLSLRDSETLPSPGEIKQLTACATWQFLFSTTKDCCLFQIPVSVRNCGNFSVYLLQPTQGCMGYCAEAISDARLHPCGSDETETGGDCVRQLAASLPPPPAGRPEVLVELIESRLFCRCSFDVPATKNSVGFHIAWSRLSSQEVKEELTQETTVQAFSLLELDGINLRLGDRIFCSASVFFLENPHVQSVAIESQEFFAGFKLQPELSTISEDGKEYYLRIESTVPIICSEFSELDQECKISLKLKTIGQGREHLGLNLALSSCHVDLLQTSSCANGTCSHTFVYYTAVTDFSRDGDRVSNIVVQPIVNEDFLWNNYIPDSIQIKVKDVPTAYCYTFTDPHIITFDGRVYDNFKTGTFVLYKSMSRDFEVHVRQWDCRSLHYPVSCNCGFVAQEGGDIVTFDMCNGQLRESQPYLFIKSQDVTRNIKISESYLGRKVTIWFSSGAFIRADLGEWGMSLTIRAPSVDYRNTLGLCGTFDENPENDFHDKNGMQIDQNFNNYVAFINEWRILPGKSMSDTLPVSMTSPGKPSYCSCSLDTAAYPSSEDLDSVSRSEIALGCKDLNHVSLSSLIPELDVTSEYINSDTLVREINKHTSPEEYNLNLFLQEKKHINLTKLGLNVQKHPGNEKEDSLQYLANKKYTQGRGSHSQEMRYNRQNRWKRQNFHEFPPLFAFPSLSQTDLEELTYFFPEDHAEDVQQEFFPSWPTPSGLTEYSTLTLCQETLANSSIGRLCLAFLGKRLDSVIEMCVKDVLLKDDLSWAEAGVALLENECEKRIVEEGKYNTEEYGTSIEDILSVLKCPNLCSGNGQCMEWGCACSPSFSSYDCSDSYDKAPEITELGNAGFCDVQKYNCMMVRVFGKGFKELPSIKCEVTKLQYNSSEWMPGEPIYTQTVFHNSRAVDCQLPTDVQQFDTMDLVGGKPTGKWQLKVSNDGYKFSNPKITVIYDGACQVCGLYKNDSCTIKENVCIIDGLCYVEGDKNPTSPCLICRPKISRFTWSFLENNQPPVIQALQDKLQTFYGENFEYQFVAFDPEGSDIHFTLDSGPEGASVSSAGLFMWKTDLLTTQQITVRLNDDCDAETRVTIEVTVKSCDCLNGGSCVSDRNFSPGSGVYLCVCLPGFHGSLCEVDISGCQSNPCGLGSYISGFHSYSCDCPPELKVETQFVNQFTTQTVVLTRSDKSVNKEEDDKNAQGRKRHVKPTSGNAFTICKYPCGKSRECVAPNICKCKPGYIGSNCQTALCDPDCKNHGKCIKPNICQCLPGHGGATCDEEHCNPPCQHGGTCLAGNLCTCPYGFVGPRCETMVCNRHCENGGQCLTPDICQCKPGWYGPTCSTALCDPVCLNGGSCNKPNTCLCPNGFFGEHCQNAFCHPPCKNGGHCMRNNVCVCREGYTGRRFQKSICDPTCMNGGKCVGPSTCSCPSGWSGKRCNTPICLQKCKNGGECIAPSICHCPSSWEGVRCQIPICNPKCLYGGRCIFPNVCSCRTEYSGVKCEKKIQIRRH

SEQ ID NO: 6409 - protein, 1044 aa, Homo sapiens
MSLTIRAPSVDYRNTLGLCGTFDENPENDFHDKNGMQIDQNFNNYVAFINEWRILPGKSMSDTLPVSMTSPGKPSYCSCSLDTAAYPSSEDLDSVSRSEIALGCKDLNHVSLSSLIPELDVTSEYINSDTLVREINKHTSPEEYNLNLFLQEKKHINLTKLGLNVQKHPGNEKEDSLQYLANKKYTQGRGSHSQEMRYNRQNRWKRQNFHEFPPLFAFPSLSQTDLEELTYFFPEDHAEDVQQEFFPSWPTPSGLTEYSTLTLCQETLANSSIGRLCLAFLGKRLDSVIEMCVKDVLLKDDLSWAEAGVALLENECEKRIVEEGKYNTEEYGTSIEDILSVLKCPNLCSGNGQCMEWGCACSPSFSSYDCSDSYDKAPEITELGNAGFCDVQKYNCMMVRVFGKGFKELPSIKCEVTKLQYNSSEWMPGEPIYTQTVFHNSRAVDCQLPTDVQQFDTMDLVGGKPTGKWQLKVSNDGYKFSNPKITVIYDGACQVCGLYKNDSCTIKENVCIIDGLCYVEGDKNPTSPCLICRPKISRFTWSFLENNQPPVIQALQDKLQTFYGENFEYQFVAFDPEGSDIHFTLDSGPEGASVSSAGLFMWKTDLLTTQQITVRLNDDCDAETRVTIEVTVKSCDCLNGGSCVSDRNFSPGSGVYLCVCLPGFHGSLCEVDISGCQSNPCGLGSYISGFHSYSCDCPPELKVETQFVNQFTTQTVVLTRSDKSVNKEEDDKNAQGRKRHVKPTSGNAFTICKYPCGKSRECVAPNICKCKPGYIGSNCQTALCDPDCKNHGKCIKPNICQCLPGHGGATCDEEHCNPPCQHGGTCLAGNLCTCPYGFVGPRCETMVCNRHCENGGQCLTPDICQCKPGWYGPTCSTALCDPVCLNGGSCNKPNTCLCPNGFFGEHCQNAFCHPPCKNGGHCMRNNVCVCREGYTGRRFQKSICDPTCMNGGKCVGPSTCSCPSGWSGKRCNTPICLQKCKNGGECIAPSICHCPSSWEGVRCQIPICNPKCLYGGRCIFPNVCSCRTEYSGVKCEKKIQIRRH

SEQ ID NO: 6410 - protein, 307 aa, Homo sapiens
MAALAPLPPLPAQFKSIQHHLRTAQEHDKRDPVVAYYCRLYAMQTGMKIDSKTPECRKFLSKLMDQLEALKKQLGDNEAITQEIVGCAHLENYALKMFLYADNEDRAGRFHKNMIKSFYTASLLIDVITVFGELTDENVKHRKYARWKATYIHNCLKNGETPQAGPVGIEEDNDIEENEDAGAASLPTQPTQPSSSSTYDPSNMPSGNYTGIQIPPGAHAPANTPAEVPHSTGVASNTIQPTPQTIPAIDPALFNTISQGDVRLTPEDFARAQKYCKYAGSALQYEDVSTAVQNLQKALKLLTTGRE

SEQ ID NO: 6411 - protein, 222 aa, Homo sapiens
MTSETLWWLITLKKQLGDNEAITQEIVGCAHLENYALKMFLYADNEDRAGRFHKNMIKSFYTASLLIDVITVFGELTDENVKHRKYARWKATYIHNCLKNGETPQAGPVGIEEDNDIEENEDAGAASLPTQPTQPSSSSTYDPSNMPSGNYTGIQIPPGAHAPANTPAEVPHSTGDVRLTPEDFARAQKYCKYAGSALQYEDVSTAVQNLQKALKLLTTGRE

SEQ ID NO: 6412 - protein, 674 aa, Homo sapiens
MARAHWGCCPWLVLLCACAWGHTKPVDLGGQDVRNCSTNPPYLPVTVVNTTMSLTALRQQMQTQNLSAYIIPGTDAHMNEYIGQHDERRAWITGFTGSAGTAVVTMKKAAVWTDSRYWTQAERQMDCNWELHKEVGTTPIVTWLLTEIPAGGRVGFDPFLLSIDTWESYDLALQGSNRQLVSITTNLVDLVWGSERPPVPNQPIYALQEAFTGSTWQEKVSGVRSQMQKHQKVPTAVLLSALEETAWLFNLRASDIPYNPFFYSYTLLTDSSIRLFANKSRFSSETLSYLNSSCTGPMCVQIEDYSQVRDSIQAYSLGDVRIWIGTSYTMYGIYEMIPKEKLVTDTYSPVMMTKAVKNSKEQALLKASHVRDAVAVIRYLVWLEKNVPKGTVDEFSGAEIVDKFRGEEQFSSGPSFETISASGLNAALAHYSPTKELNRKLSSDEMYLLDSGGQYWDGTTDITRTVHWGTPSAFQKEAYTRVLIGNIDLSRLIFPAATSGRMVEAFARRALWDAGLNYGHGTGHGIGNFLCVHEWPVGFQSNNIAMAKGMFTSIEPGYYKDGEFGIRLEDVALVVEAKTKYPGSYLTFEVVSFVPYDRNLIDVSLLSPEHLQYLNRYYQTIREKVGPELQRRQLLEEFEWLQQHTEPLAARAPDTASWASVLVVSTLAILGWSV

SEQ ID NO: 6413 - protein, 3374 aa, Homo sapiens
MSPESGHSRIFEATAGPNKPESGFAEDSAARGEGVSDLHEVVSLKERMARYQAAVSRGDCRSFSANMMEESEMCAVPGGLAKVKKQFEDEITSSRNTFAQYQYQHQNRSEQEAIHSSQVGTSRSSQEMARNEQEGSKVQKIDVHGTEMVSHLEKHTEEVNQASQFHQYVQETVIDTPEDEEIPKVSTKLLKEQFEKSAQEKILYSDKEMTTPAKQIKTESEYEETFKPSSVVSTSSTSCVSTSQRKETSTTRYSDHSVTSSTLAQINATSSGMTEEFPPPPPDVLQTSVDVTAFSQSPELPSPPRRLPVPKDVYSKQRNLYELNRLYKHIHPELRKNLEKDYISEVSEIVSSQMNSGSSVSADVQQARYVFENTNDSSQKDLNSEREYLEWDEILKGEVQSIRWIFENQPLDSINNGSPDEGDISRGIADQEIIAGGDVKYTTWMFETQPIDTLGAYSSDTVENAEKIPELARGDVCTARWMFETRPLDSMNKMHQSQEESAVTISKDITGGDVKTVRYMFETQHLDQLGQLHSVDEVHLLQLRSELKEIKGNVKRSIKCFETQPLYVIRDGSGQMLEIKTVHREDVEKGDVRTARWMFETQPLDTINKDITEIKVVRGISMEENVKGGVSKAKWLFETQPLEKIKESEEVIIEKEKIIGTDVSRKCWMFETQPLDILKEVPDADSLQREEIIGGDVQTTKHLFETLPIEALKDSPDIGKLQKITASEEEKGDVRHQKWIFETQPLEDIRKDKKEYTRTVKLEEVDRGDVKNYTHIFESNNLIKFDASHKIEVEGVTRGAVELNKSLFETTPLYAIQDPLGKYHQVKTVQQEEIVRGDVRSCRWLFETRPIDQFDESIHKFQIIRGISAQEIQTGNVKSAKWLFETQPLDSIKYFSDVEETESKTEQTRDIVKGDVKTCKWLFETQPMESLYEKVSLMTSSEEIHKGDVKTCTWLFETQPLDTIKDDSETAVKLQTVKQEEIQGGDVRTACFLFETENLDSIQGEEVKEIKPVEMDIQAGDVSSMRYKFENQSLDSISSSSEEVLKKIKTLKTEDIQKGNVLNCRWLFENQPIDKIKESQEGDECVKTVTDIQGGDVRKGCFIFETFSLDEIKEESDYISTKKTITEEVIQGDVKSYRMLFETQPLYAIQDREGSYHEVTTVKKEEVIHGDVRGTRWLFETKPLDSINKSETVYVIKSVTQEDIQKGDVSSVRYRFETQPLDQISEESHNIMPSIDHIQGGNVKTSRQFFESENFDKNNYIRTVSVNEIQKGNVKTSTWLFETHTMDELRGEGLEYENIKTVTQEDVQKGDVKQAVWLFENRTFDSIMEAHKGITKMTKEEIPPSDVKTTTWLFETTPLHEFNETRVEKIEIIGKSIKETLEDLYSQKVIQAPGIIIEADEIGDVRMAKYKLMNQASPEIQKEEIIRADLRNIMVNLLSKRDCTEREILISEEEKGNVNLTKTQLLNRSTEFHAEKEEIVKGDVQQAIKNLFSEERSVKKGILIQEDEKGDINMTIYCLLHENDGDTIEREEVIGGDVKRTIHNLLSSTSNNKISERAKIDASERGNVQFFTTCIEAGALDYLKQLHTESNETLTAKKQEGEKEIIGGDVEGTKLLLKKRQSLVERTVSETDIIPGDVHNTVKVFMTEPQSTFGKIPKEEIIKGDLTSTLNSLSQAVNQKTVTKTEEIIKGNMLATLKSLKESSHRWKESKQPDAIPGDIEKAIECLEKATNTKTEILKKELLKDDLETSLRSLKEAQRSFKEVHKEGVIKKDAKAVMAGSSGEQKTDIHQVAVQRNKNSLLQPKPGPFEPAAKWQGGADTLSQTMGKSCHGNLVEERTEVNLPKAPKGTVKIVIDREQNNDALEKSLRRLSNSHHKSNVLESGDKTGVWTDTTGEQHLRDEYMSRQLTSTVSVKNNLTTKESDRAVRELKKDDVFNSIQSAGKTVGKQQTYELRNDHQKMEGFHIKSPKKTKNIKILTDTQSSKPSPTQHPVSMPVGGTYDLSGDFQKQTLLKQETKYSNKDIKKKNINLQPMWQLLPVEQDTSNVTEMKVSEKSHNTFKATNKKRETDVHLKSQDFLMKTNTSTGLKMAMERSLNPINFNPENNVKESECPLPPPSPPPPPPSNASSEIEFPLPPPPPLMMFPEKNGFLPSLSTEKIKAEFESFPGLPLPPPPVDEKSERESSSMFLPPPPPPTPSQKPAHLLSSSAPEKHSGDFMQQYSQKEASNSQNSQAKIITGKTGVLPPPTLPKPKLPKHIKDNKNDFSPKVELATSLSDMECKITTSKDQKKVMVMTSSEHTETKQNVISKSLDERKQLSIDSANCLSHTVPGTSAPRKKQIAPLIKSHSFPESSGQQNPKPYMRKFKTPLMIAEEKYRQQKEEIEKQKQESSYYNIVKTQSQNQHITEVEKEMPLQKTNEEVSLSGIDSECTVVQPSPGSQSNARILGVCSDNQLSTTSPETVAAKRLHHVLAASEDKDKMKKEVLQSSRDIMQSKSACEIKQSHQECSTQQTQQKKYLEQLHLPQSKPISPNFKVKTIKLPTLDHTLNETDHSYESHKQQSEIDVQTFTKKQYLKTKKTEASTECSHKQSLAERHYQLPKKEKRVTVQLPTESIQKNQEDKLKMVPRKQREFSGSDRGKLPGSEEKNQGPSMIGRKEERLITERKHEHLKNKSAPKVVKQKVIDAHLDSQTQNFQQTQIQTAESKAEHKKLPQPYNSLQEEKCLEVKGIQEKQVFSNTKDSKQEITQNKSFFSSVKESQRDDGKGALNIVEFLRKREELQQILSRVKQFEAEPNKSGLKTFQTLLNTIPGWLISEDKREYAVHIAMENNLEKVKEEITHIKTQAEDMLVSYENIIQTAMMSSKTGKPGNKPTSLDETSSKVSNVHVSNNKNSEQKENKIAKEKTVQHQVAAHHEATVRSHVKTHQEIKLDDSNIPPPSLKTRPPSPTFITIESTARRTENPTKNELSQSPKKDSYVEPPPRRPMSQKSEIHRANTSPSPPRSRSEQLVRLKDTTAKLSKGAIPCPAATPVPIVEKRSEIIMSPATLRRQIKIETRGRDSPPTITIPVNINHAASGSFRESVDAQEEIRKVEKRATYVHKDGLNSTDHMVPDTESYDAVEIIRKVAVPPRLSEHTQRYEAANRTVQMAENFVNDPENEINRWFREFEHGPVSEAKSNRRVYAKGETNHNIQQESRTFCKEEFGLTSLGNTSFTDFSCKHPRELREKIPVKQPRICSETRSLSEHFSGMDAFESQIVESKMKTSSSHSSEAGKSGCDFKHAPPTYEDVIAGHILDISDSPKEVRKNFQKTWQESGRVFKGLGYATADASATEMRTTFQEESAFISEAAAPRQGNMYTLSKDSLSNGVPSGRQAEFS

SEQ ID NO: 6414 - protein, 3327 aa, Homo sapiens
MARYQAAVSRGDCRSFSANMMEESEMCAVPGGLAKVKKQFEDEITSSRNTFAQYQYQHQNRSEQEAIHSSQVGTSRSSQEMARNEQEGSKVQKIDVHGTEMVSHLEKHTEEVNQASQFHQYVQETVIDTPEDEEIPKVSTKLLKEQFEKSAQEKILYSDKEMTTPAKQIKTESEYEETFKPSSVVSTSSTSCVSTSQRKETSTTRYSDHSVTSSTLAQINATSSGMTEEFPPPPPDVLQTSVDVTAFSQSPELPSPPRRLPVPKDVYSKQRNLYELNRLYKHIHPELRKNLEKDYISEVSEIVSSQMNSGSSVSADVQQARYVFENTNDSSQKDLNSEREYLEWDEILKGEVQSIRWIFENQPLDSINNGSPDEGDISRGIADQEIIAGGDVKYTTWMFETQPIDTLGAYSSDTVENAEKIPELARGDVCTARWMFETRPLDSMNKMHQSQEESAVTISKDITGGDVKTVRYMFETQHLDQLGQLHSVDEVHLLQLRSELKEIKGNVKRSIKCFETQPLYVIRDGSGQMLEIKTVHREDVEKGDVRTARWMFETQPLDTINKDITEIKVVRGISMEENVKGGVSKAKWLFETQPLEKIKESEEVIIEKEKIIGTDVSRKCWMFETQPLDILKEVPDADSLQREEIIGGDVQTTKHLFETLPIEALKDSPDIGKLQKITASEEEKGDVRHQKWIFETQPLEDIRKDKKEYTRTVKLEEVDRGDVKNYTHIFESNNLIKFDASHKIEVEGVTRGAVELNKSLFETTPLYAIQDPLGKYHQVKTVQQEEIVRGDVRSCRWLFETRPIDQFDESIHKFQIIRGISAQEIQTGNVKSAKWLFETQPLDSIKYFSDVEETESKTEQTRDIVKGDVKTCKWLFETQPMESLYEKVSLMTSSEEIHKGDVKTCTWLFETQPLDTIKDDSETAVKLQTVKQEEIQGGDVRTACFLFETENLDSIQGEEVKEIKPVEMDIQAGDVSSMRYKFENQSLDSISSSSEEVLKKIKTLKTEDIQKGNVLNCRWLFENQPIDKIKESQEGDECVKTVTDIQGGDVRKGCFIFETFSLDEIKEESDYISTKKTITEEVIQGDVKSYRMLFETQPLYAIQDREGSYHEVTTVKKEEVIHGDVRGTRWLFETKPLDSINKSETVYVIKSVTQEDIQKGDVSSVRYRFETQPLDQISEESHNIMPSIDHIQGGNVKTSRQFFESENFDKNNYIRTVSVNEIQKGNVKTSTWLFETHTMDELRGEGLEYENIKTVTQEDVQKGDVKQAVWLFENRTFDSIMEAHKGITKMTKEEIPPSDVKTTTWLFETTPLHEFNETRVEKIEIIGKSIKETLEDLYSQKVIQAPGIIIEADEIGDVRMAKYKLMNQASPEIQKEEIIRADLRNIMVNLLSKRDCTEREILISEEEKGNVNLTKTQLLNRSTEFHAEKEEIVKGDVQQAIKNLFSEERSVKKGILIQEDEKGDINMTIYCLLHENDGDTIEREEVIGGDVKRTIHNLLSSTSNNKISERAKIDASERGNVQFFTTCIEAGALDYLKQLHTESNETLTAKKQEGEKEIIGGDVEGTKLLLKKRQSLVERTVSETDIIPGDVHNTVKVFMTEPQSTFGKIPKEEIIKGDLTSTLNSLSQAVNQKTVTKTEEIIKGNMLATLKSLKESSHRWKESKQPDAIPGDIEKAIECLEKATNTKTEILKKELLKDDLETSLRSLKEAQRSFKEVHKEGVIKKDAKAVMAGSSGEQKTDIHQVAVQRNKNSLLQPKPGPFEPAAKWQGGADTLSQTMGKSCHGNLVEERTEVNLPKAPKGTVKIVIDREQNNDALEKSLRRLSNSHHKSNVLESGDKTGVWTDTTGEQHLRDEYMSRQLTSTVSVKNNLTTKESDRAVRELKKDDVFNSIQSAGKTVGKQQTYELRNDHQKMEGFHIKSPKKTKNIKILTDTQSSKPSPTQHPVSMPVGGTYDLSGDFQKQTLLKQETKYSNKDIKKKNINLQPMWQLLPVEQDTSNVTEMKVSEKSHNTFKATNKKRETDVHLKSQDFLMKTNTSTGLKMAMERSLNPINFNPENNVKESECPLPPPSPPPPPPSNASSEIEFPLPPPPPLMMFPEKNGFLPSLSTEKIKAEFESFPGLPLPPPPVDEKSERESSSMFLPPPPPPTPSQKPAHLLSSSAPEKHSGDFMQQYSQKEASNSQNSQAKIITGKTGVLPPPTLPKPKLPKHIKDNKNDFSPKVELATSLSDMECKITTSKDQKKVMVMTSSEHTETKQNVISKSLDERKQLSIDSANCLSHTVPGTSAPRKKQIAPLIKSHSFPESSGQQNPKPYMRKFKTPLMIAEEKYRQQKEEIEKQKQESSYYNIVKTQSQNQHITEVEKEMPLQKTNEEVSLSGIDSECTVVQPSPGSQSNARILGVCSDNQLSTTSPETVAAKRLHHVLAASEDKDKMKKEVLQSSRDIMQSKSACEIKQSHQECSTQQTQQKKYLEQLHLPQSKPISPNFKVKTIKLPTLDHTLNETDHSYESHKQQSEIDVQTFTKKQYLKTKKTEASTECSHKQSLAERHYQLPKKEKRVTVQLPTESIQKNQEDKLKMVPRKQREFSGSDRGKLPGSEEKNQGPSMIGRKEERLITERKHEHLKNKSAPKVVKQKVIDAHLDSQTQNFQQTQIQTAESKAEHKKLPQPYNSLQEEKCLEVKGIQEKQVFSNTKDSKQEITQNKSFFSSVKESQRDDGKGALNIVEFLRKREELQQILSRVKQFEAEPNKSGLKTFQTLLNTIPGWLISEDKREYAVHIAMENNLEKVKEEITHIKTQAEDMLVSYENIIQTAMMSSKTGKPGNKPTSLDETSSKVSNVHVSNNKNSEQKENKIAKEKTVQHQVAAHHEATVRSHVKTHQEIKLDDSNIPPPSLKTRPPSPTFITIESTARRTENPTKNELSQSPKKDSYVEPPPRRPMSQKSEIHRANTSPSPPRSRSEQLVRLKDTTAKLSKGAIPCPAATPVPIVEKRSEIIMSPATLRRQIKIETRGRDSPPTITIPVNINHAASGSFRESVDAQEEIRKVEKRATYVHKDGLNSTDHMVPDTESYDAVEIIRKVAVPPRLSEHTQRYEAANRTVQMAENFVNDPENEINRWFREFEHGPVSEAKSNRRVYAKGETNHNIQQESRTFCKEEFGLTSLGNTSFTDFSCKHPRELREKIPVKQPRICSETRSLSEHFSGMDAFESQIVESKMKTSSSHSSEAGKSGCDFKHAPPTYEDVIAGHILDISDSPKEVRKNFQKTWQESGRVFKGLGYATADASATEMRTTFQEESAFISEAAAPRQGNMYTLSKDSLSNGVPSGRQAEFS

SEQ ID NO: 6415 - protein, 3345 aa, Homo sapiens
MSPESGHSRIFEATAGPNKPESGFAEDSAARGEGVSDLHEVVSLKERMARYQAAVSRGDCRSFSANMMEESEMCAVPGGLAKVKKQFEDEITSSRNTFAQYQYQHQNRSEQEAIHSSQVGTSRSSQEMARNEQEGSKVQKIDVHGTEMVSHLEKHTEEVNQASQFHQYVQETVIDTPEDEEIPKVSTKLLKEQFEKSAQEKILYSDKEMTTPAKQIKTESEYEETFKPSSVVSTSSTSCVSTSQRKETSTTRYSDHSVTSSTLAQINATSSGMTEEFPPPPPDVLQTSVDVTAFSQSPELPSPPRRLPVPKDVYSKQRNLYELNRLYKHIHPELRKNLEKDYISEVSEIVSSQMNSGSSVSADVQQARYVFENTNDSSQKDLNSEREYLEWDEILKGEVQSIRWIFENQPLDSINNGSPDEGDISRGIADQEIIAGGDVKYTTWMFETQPIDTLGAYSSDTVENAEKIPELARGDVCTARWMFETRPLDSMNKMHQSQEESAVTISKDITGGDVKTVRYMFETQHLDQLGQLHSVDEVHLLQLRSELKEIKGNVKRSIKCFETQPLYVIRDGSGQMLEIKTVHREDVEKGDVRTARWMFETQPLDTINKDITEIKVVRGISMEENVKGGVSKAKWLFETQPLEKIKESEEVIIEKEKIIGTDVSRKCWMFETQPLDILKEVPDADSLQREEIIGGDVQTTKHLFETLPIEALKDSPDIGKLQKITASEEEKGDVRHQKWIFETQPLEDIRKDKKEYTRTVKLEEVDRGDVKNYTHIFESNNLIKFDASHKIEVEGVTRGAVELNKSLFETTPLYAIQDPLGKYHQVKTVQQEEIVRGDVRSCRWLFETRPIDQFDESIHKFQIIRGISAQEIQTGNVKSAKWLFETQPLDSIKYFSDVEETESKTEQTRDIVKGDVKTCKWLFETQPMESLYEKVSLMTSSEEIHKGDVKTCTWLFETQPLDTIKDDSETAVKLQTVKQEEIQGGDVRTACFLFETENLDSIQGEEVKEIKPVEMDIQAGDVSSMRYKFENQSLDSISSSSEEVLKKIKTLKTEDIQKGNVLNCRWLFENQPIDKIKESQEGDECVKTVTDIQGGDVRKGCFIFETFSLDEIKEESDYISTKKTITEEVIQGDVKSYRMLFETQPLYAIQDREGSYHEVTTVKKEEVIHGDVRGTRWLFETKPLDSINKSETVYVIKSVTQEDIQKGDVSSVRYRFETQPLDQISEESHNIMPSIDHIQGGNVKTSRQFFESENFDKNNYIRTVSVNEIQKGNVKTSTWLFETHTMDELRGEGLEYENIKTVTQEDVQKGDVKQAVWLFENRTFDSIMEAHKGITKMTKEEIPPSDVKTTTWLFETTPLHEFNETRVEKIEIIGKSIKETLEDLYSQKVIQAPGIIIEADEIGDVRMAKYKLMNQASPEIQKEEIIRADLRNIMVNLLSKRDCTEREILISEEEKGNVNLTKTQLLNRSTEFHAEKEEIVKGDVQQAIKNLFSEERSVKKGILIQEDEKGDINMTIYCLLHENDGDTIEREEVIGGDVKRTIHNLLSSTSNNKISERAKIDASERGNVQFFTTCIEAGALDYLKQLHTESNETLTAKKQEGEKEIIGGDVEGTKLLLKKRQSLVERTVSETDIIPGDVHNTVKVFMTEPQSTFGKIPKEEIIKGDLTSTLNSLSQAVNQKTVTKTEEIIKGNMLATLKSLKESSHRWKESKQPDAIPGDIEKAIECLEKATNTKTEILKKELLKDDLETSLRSLKEAQRSFKEVHKEGVIKKDAKAVMAGSSGEQKTDIHQVAVQRNKNSLLQPKPGPFEPAAKWQGGADTLSQTMGKSCHGNLVEERTEVNLPKAPKGTVKIVIDREQNNDALEKSLRRLSNSHHKSNVLESGDKTGVWTDTTGEQHLRDEYMSRQLTSTVSVKNNLTTKESDRAVRELKKDDVFNSIQSAGKTVGKQQTYELRNDHQKMEGFHIKSPKKTKNIKILTDTQSSKPSPTQHPVSMPVGGTYDLSGDFQKQTLLKQETKYSNKDIKKKNINLQPMWQLLPVEQDTSNVTEMKVSEKSHNTFKATNKKRETDVHLKSQDFLMKTNTSTGLKMAMERSLNPINFNPENNVKESECPLPPPSPPPPPPSNASSEIEFPLPPPPPLMMFPEKNGFLPSLSTEKIKAEFESFPGLPLPPPPVDEKSERESSSMFLPPPPPPTPSQKPAHLLSSSAPEKHSGDFMQQYSQKEASNSQNSQAKIITGKTGVLPPPTLPKPKLPKHIKDNKNDFSPKVELATSLSDMECKITTSKDQKKVMVMTSSEHTETKQNVISKSLDERKQLSIDSANCLSHTVPGTSAPRKKQIAPLIKSHSFPESSGQQNPKPYMRKFKTPLMIAEEKYRQQKEEIEKQKQESSYYNIVKTQSQNQHITEVEKEMPLQKTNEEVSLSGIDSECTVVQPSPGSQSNARILGVCSDNQLSTTSPETVAAKRLHHVLAASEDKDKMKKEVLQSSRDIMQSKSACEIKQSHQECSTQQTQQKKYLEQLHLPQSKPISPNFKVKTIKLPTLDHTLNETDHSYESHKQQSEIDVQTFTKKQYLKTKKTEASTECSHKQSLAERHYQLPKKEKRVTVQLPTESIQKNQEDKLKMVPRKQREFSGSDRGKLPGSEEKNQGPSMIGRKEERLITERKHEHLKNKSAPKVVKQKVIDAHLDSQTQNFQQTQIQTAESKAEHKKLPQPYNSLQEEKCLEVKGIQEKQVFSNTKDSKQEITQNKSFFSSVKESQRDDGKGALNIVEFLRKREELQQILSRVKQFEAEPNKSGLKTFQTLLNTIPGWLISEDKREYAVHIAMENNLEKVKEEITHIKTQAEDMLVSYENIIQTAMMSSKTGKPGNKPTSLDETSSKVSNVHVSNNKNSEQKENKIAKEKTVQHQVAAHHEATVRSHVKTHQEIKLDDSNIPPPSLKTRPPSPTFITIESTARRTENPTKNELSQSPKKDSYVEPPPRRPMSQKSEIHRANTSPSPPRSRSEQLVRLKDTTAKLSKGAIPCPAATPVPIVEKRSEIIMSPATLRRQIKIETRGRDSPPTITIPVNINHAASGSFRESVDAQEEIRKVEKRATYVHKDGLNSTDHMVPDTESYDAVEIIRKVAVPPRLSEHTQRYEAANRTVQMAENFVNDPENEINRWFREFEHGPVSEAKSNRRVYAKGETNHNIQQESRTFCKEEFGLTSLGNTSFTDFSCKHPRELREKIPVKQPRICSETRSLSEHFSGMDAFESQIVESKMKTSSSHSSEAGKSGCDFKHAPPTYEDVIAGHILDISDSPKEVRKNFQKTWQESGRVFKGLGYATADASATEMRTTFQEESAFISGK

SEQ ID NO: 6416 - protein, 938 aa, Homo sapiens
MFPMQKGSLNLLRQKWESCDYQRSECHPRDSHCTIFQPQESKLLAPEGEVVSAPQSLDPTSLPYSTGEEMWSSKPEEKDSVDKSNNTREYGRPEVLKEDSLSSRRRIERFSIALDELRSVFEAPKSGNKPAEYGGKEVEIERSLCSPAFKSHPGSQLEDSVKDSDKKGKETSFDKMSPESGHSRIFEATAGPNKPESGFAEDSAARGEGVSDLHEVVSLKERMARYQAAVSRGDCRSFSANMMEESEMCAVPGGLAKVKKQFEDEITSSRNTFAQYQYQHQNRSEQEAIHSSQVGTSRSSQEMARNEQEGSKVQKIDVHGTEMVSHLEKHTEEVNQASQFHQYVQETVIDTPEDEEIPKVSTKLLKEQFEKSAQEKILYSDKEMTTPAKQIKKLLLQDKEICILCQKTVYPMECLVADKQNFHKSCFRCHHCNSKLSLGNYASLHGQIYCKPHFKQLFKSKGNYDEGFGHKQHKDRWNCKNQSRSVDFIPNEEPNMCKNIAENTLVPGDRNEHLDAGNSEGQRNDLRKLGERGKLKVIWPPSKEIPKKTLPFEEELKMSKPKWPPEMTTLLSPEFKSESLLEDVRTPENKGQRQDHFPFLQPYLQSTHVCQKEDVIGIKEMKMPEGRKDEKKEGRKNVQDRPSEAEDTKSNRKSAMDLNDNNNVIVQSAEKEKNEKTNQTNGAEVLQVTNTDDEMMPENHKENLNKNNNNNYVAVSYLNNCRQKTSILEFLDLLPLSSEANDTANEYEIEKLENTSRISELLGIFESEKTYSRNVLAMALKKQTDRAAAGSPVQPAPKPSLSRGLMVKGGSSIISPDTNLLNIKGSHSKSKNLHFFFSNTVKITAFSKKNENIFNCDLIDSVDQIKNMPCLDLREFGKDVKPWHVETTEAARNNENTGFDALSHECTAKPLFPRVEVQSEQLTVEEQIKRNRCYSDTE

SEQ ID NO: 6417 - protein, 763 aa, Homo sapiens
MSPESGHSRIFEATAGPNKPESGFAEDSAARGEGVSDLHEVVSLKERMARYQAAVSRGDCRSFSANMMEESEMCAVPGGLAKVKKQFEDEITSSRNTFAQYQYQHQNRSEQEAIHSSQVGTSRSSQEMARNEQEGSKVQKIDVHGTEMVSHLEKHTEEVNQASQFHQYVQETVIDTPEDEEIPKVSTKLLKEQFEKSAQEKILYSDKEMTTPAKQIKKLLLQDKEICILCQKTVYPMECLVADKQNFHKSCFRCHHCNSKLSLGNYASLHGQIYCKPHFKQLFKSKGNYDEGFGHKQHKDRWNCKNQSRSVDFIPNEEPNMCKNIAENTLVPGDRNEHLDAGNSEGQRNDLRKLGERGKLKVIWPPSKEIPKKTLPFEEELKMSKPKWPPEMTTLLSPEFKSESLLEDVRTPENKGQRQDHFPFLQPYLQSTHVCQKEDVIGIKEMKMPEGRKDEKKEGRKNVQDRPSEAEDTKSNRKSAMDLNDNNNVIVQSAEKEKNEKTNQTNGAEVLQVTNTDDEMMPENHKENLNKNNNNNYVAVSYLNNCRQKTSILEFLDLLPLSSEANDTANEYEIEKLENTSRISELLGIFESEKTYSRNVLAMALKKQTDRAAAGSPVQPAPKPSLSRGLMVKGGSSIISPDTNLLNIKGSHSKSKNLHFFFSNTVKITAFSKKNENIFNCDLIDSVDQIKNMPCLDLREFGKDVKPWHVETTEAARNNENTGFDALSHECTAKPLFPRVEVQSEQLTVEEQIKRNRCYSDTE

SEQ ID NO: 6418 - protein, 971 aa, Homo sapiens
MFPMQKGSLNLLRQKWESCDYQRSECHPRDSHCTIFQPQESKLLAPEGEVVSAPQSLDPTSLPYSTGEEMWSSKPEEKDSVDKSNNTREYGRPEVLKEDSLSSRRRIERFSIALDELRSVFEAPKSGNKPAEYGGKEVEIERSLCSPAFKSHPGSQLEDSVKDSDKKGKETSFDKMSPESGHSRIFEAVFSTDQAQILRLHLHPKLTKTPKNSLKSSTYISTAGPNKPESGFAEDSAARGEGVSDLHEVVSLKERMARYQAAVSRGDCRSFSANMMEESEMCAVPGGLAKVKKQFEDEITSSRNTFAQYQYQHQNRSEQEAIHSSQVGTSRSSQEMARNEQEGSKVQKIDVHGTEMVSHLEKHTEEVNQASQFHQYVQETVIDTPEDEEIPKVSTKLLKEQFEKSAQEKILYSDKEMTTPAKQIKKLLLQDKEICILCQKTVYPMECLVADKQNFHKSCFRCHHCNSKLSLGNYASLHGQIYCKPHFKQLFKSKGNYDEGFGHKQHKDRWNCKNQSRSVDFIPNEEPNMCKNIAENTLVPGDRNEHLDAGNSEGQRNDLRKLGERGKLKVIWPPSKEIPKKTLPFEEELKMSKPKWPPEMTTLLSPEFKSESLLEDVRTPENKGQRQDHFPFLQPYLQSTHVCQKEDVIGIKEMKMPEGRKDEKKEGRKNVQDRPSEAEDTKSNRKSAMDLNDNNNVIVQSAEKEKNEKTNQTNGAEVLQVTNTDDEMMPENHKENLNKNNNNNYVAVSYLNNCRQKTSILEFLDLLPLSSEANDTANEYEIEKLENTSRISELLGIFESEKTYSRNVLAMALKKQTDRAAAGSPVQPAPKPSLSRGLMVKGGSSIISPDTNLLNIKGSHSKSKNLHFFFSNTVKITAFSKKNENIFNCDLIDSVDQIKNMPCLDLREFGKDVKPWHVETTEAARNNENTGFDALSHECTAKPLFPRVEVQSEQLTVEEQIKRNRCYSDTE

SEQ ID NO: 6419 - protein, 716 aa, Homo sapiens
MARYQAAVSRGDCRSFSANMMEESEMCAVPGGLAKVKKQFEDEITSSRNTFAQYQYQHQNRSEQEAIHSSQVGTSRSSQEMARNEQEGSKVQKIDVHGTEMVSHLEKHTEEVNQASQFHQYVQETVIDTPEDEEIPKVSTKLLKEQFEKSAQEKILYSDKEMTTPAKQIKKLLLQDKEICILCQKTVYPMECLVADKQNFHKSCFRCHHCNSKLSLGNYASLHGQIYCKPHFKQLFKSKGNYDEGFGHKQHKDRWNCKNQSRSVDFIPNEEPNMCKNIAENTLVPGDRNEHLDAGNSEGQRNDLRKLGERGKLKVIWPPSKEIPKKTLPFEEELKMSKPKWPPEMTTLLSPEFKSESLLEDVRTPENKGQRQDHFPFLQPYLQSTHVCQKEDVIGIKEMKMPEGRKDEKKEGRKNVQDRPSEAEDTKSNRKSAMDLNDNNNVIVQSAEKEKNEKTNQTNGAEVLQVTNTDDEMMPENHKENLNKNNNNNYVAVSYLNNCRQKTSILEFLDLLPLSSEANDTANEYEIEKLENTSRISELLGIFESEKTYSRNVLAMALKKQTDRAAAGSPVQPAPKPSLSRGLMVKGGSSIISPDTNLLNIKGSHSKSKNLHFFFSNTVKITAFSKKNENIFNCDLIDSVDQIKNMPCLDLREFGKDVKPWHVETTEAARNNENTGFDALSHECTAKPLFPRVEVQSEQLTVEEQIKRNRCYSDTE

SEQ ID NO: 6420 - protein, 3549 aa, Homo sapiens
MFPMQKGSLNLLRQKWESCDYQRSECHPRDSHCTIFQPQESKLLAPEGEVVSAPQSLDPTSLPYSTGEEMWSSKPEEKDSVDKSNNTREYGRPEVLKEDSLSSRRRIERFSIALDELRSVFEAPKSGNKPAEYGGKEVEIERSLCSPAFKSHPGSQLEDSVKDSDKKGKETSFDKMSPESGHSRIFEATAGPNKPESGFAEDSAARGEGVSDLHEVVSLKERMARYQAAVSRGDCRSFSANMMEESEMCAVPGGLAKVKKQFEDEITSSRNTFAQYQYQHQNRSEQEAIHSSQVGTSRSSQEMARNEQEGSKVQKIDVHGTEMVSHLEKHTEEVNQASQFHQYVQETVIDTPEDEEIPKVSTKLLKEQFEKSAQEKILYSDKEMTTPAKQIKTESEYEETFKPSSVVSTSSTSCVSTSQRKETSTTRYSDHSVTSSTLAQINATSSGMTEEFPPPPPDVLQTSVDVTAFSQSPELPSPPRRLPVPKDVYSKQRNLYELNRLYKHIHPELRKNLEKDYISEVSEIVSSQMNSGSSVSADVQQARYVFENTNDSSQKDLNSEREYLEWDEILKGEVQSIRWIFENQPLDSINNGSPDEGDISRGIADQEIIAGGDVKYTTWMFETQPIDTLGAYSSDTVENAEKIPELARGDVCTARWMFETRPLDSMNKMHQSQEESAVTISKDITGGDVKTVRYMFETQHLDQLGQLHSVDEVHLLQLRSELKEIKGNVKRSIKCFETQPLYVIRDGSGQMLEIKTVHREDVEKGDVRTARWMFETQPLDTINKDITEIKVVRGISMEENVKGGVSKAKWLFETQPLEKIKESEEVIIEKEKIIGTDVSRKCWMFETQPLDILKEVPDADSLQREEIIGGDVQTTKHLFETLPIEALKDSPDIGKLQKITASEEEKGDVRHQKWIFETQPLEDIRKDKKEYTRTVKLEEVDRGDVKNYTHIFESNNLIKFDASHKIEVEGVTRGAVELNKSLFETTPLYAIQDPLGKYHQVKTVQQEEIVRGDVRSCRWLFETRPIDQFDESIHKFQIIRGISAQEIQTGNVKSAKWLFETQPLDSIKYFSDVEETESKTEQTRDIVKGDVKTCKWLFETQPMESLYEKVSLMTSSEEIHKGDVKTCTWLFETQPLDTIKDDSETAVKLQTVKQEEIQGGDVRTACFLFETENLDSIQGEEVKEIKPVEMDIQAGDVSSMRYKFENQSLDSISSSSEEVLKKIKTLKTEDIQKGNVLNCRWLFENQPIDKIKESQEGDECVKTVTDIQGGDVRKGCFIFETFSLDEIKEESDYISTKKTITEEVIQGDVKSYRMLFETQPLYAIQDREGSYHEVTTVKKEEVIHGDVRGTRWLFETKPLDSINKSETVYVIKSVTQEDIQKGDVSSVRYRFETQPLDQISEESHNIMPSIDHIQGGNVKTSRQFFESENFDKNNYIRTVSVNEIQKGNVKTSTWLFETHTMDELRGEGLEYENIKTVTQEDVQKGDVKQAVWLFENRTFDSIMEAHKGITKMTKEEIPPSDVKTTTWLFETTPLHEFNETRVEKIEIIGKSIKETLEDLYSQKVIQAPGIIIEADEIGDVRMAKYKLMNQASPEIQKEEIIRADLRNIMVNLLSKRDCTEREILISEEEKGNVNLTKTQLLNRSTEFHAEKEEIVKGDVQQAIKNLFSEERSVKKGILIQEDEKGDINMTIYCLLHENDGDTIEREEVIGGDVKRTIHNLLSSTSNNKISERAKIDASERGNVQFFTTCIEAGALDYLKQLHTESNETLTAKKQEGEKEIIGGDVEGTKLLLKKRQSLVERTVSETDIIPGDVHNTVKVFMTEPQSTFGKIPKEEIIKGDLTSTLNSLSQAVNQKTVTKTEEIIKGNMLATLKSLKESSHRWKESKQPDAIPGDIEKAIECLEKATNTKTEILKKELLKDDLETSLRSLKEAQRSFKEVHKEGVIKKDAKAVMAGSSGEQKTDIHQVAVQRNKNSLLQPKPGPFEPAAKWQGGADTLSQTMGKSCHGNLVEERTEVNLPKAPKGTVKIVIDREQNNDALEKSLRRLSNSHHKSNVLESGDKTGVWTDTTGEQHLRDEYMSRQLTSTVSVKNNLTTKESDRAVRELKKDDVFNSIQSAGKTVGKQQTYELRNDHQKMEGFHIKSPKKTKNIKILTDTQSSKPSPTQHPVSMPVGGTYDLSGDFQKQTLLKQETKYSNKDIKKKNINLQPMWQLLPVEQDTSNVTEMKVSEKSHNTFKATNKKRETDVHLKSQDFLMKTNTSTGLKMAMERSLNPINFNPENNVKESECPLPPPSPPPPPPSNASSEIEFPLPPPPPLMMFPEKNGFLPSLSTEKIKAEFESFPGLPLPPPPVDEKSERESSSMFLPPPPPPTPSQKPAHLLSSSAPEKHSGDFMQQYSQKEASNSQNSQAKIITGKTGVLPPPTLPKPKLPKHIKDNKNDFSPKVELATSLSDMECKITTSKDQKKVMVMTSSEHTETKQNVISKSLDERKQLSIDSANCLSHTVPGTSAPRKKQIAPLIKSHSFPESSGQQNPKPYMRKFKTPLMIAEEKYRQQKEEIEKQKQESSYYNIVKTQSQNQHITEVEKEMPLQKTNEEVSLSGIDSECTVVQPSPGSQSNARILGVCSDNQLSTTSPETVAAKRLHHVLAASEDKDKMKKEVLQSSRDIMQSKSACEIKQSHQECSTQQTQQKKYLEQLHLPQSKPISPNFKVKTIKLPTLDHTLNETDHSYESHKQQSEIDVQTFTKKQYLKTKKTEASTECSHKQSLAERHYQLPKKEKRVTVQLPTESIQKNQEDKLKMVPRKQREFSGSDRGKLPGSEEKNQGPSMIGRKEERLITERKHEHLKNKSAPKVVKQKVIDAHLDSQTQNFQQTQIQTAESKAEHKKLPQPYNSLQEEKCLEVKGIQEKQVFSNTKDSKQEITQNKSFFSSVKESQRDDGKGALNIVEFLRKREELQQILSRVKQFEAEPNKSGLKTFQTLLNTIPGWLISEDKREYAVHIAMENNLEKVKEEITHIKTQAEDMLVSYENIIQTAMMSSKTGKPGNKPTSLDETSSKVSNVHVSNNKNSEQKENKIAKEKTVQHQVAAHHEATVRSHVKTHQEIKLDDSNIPPPSLKTRPPSPTFITIESTARRTENPTKNELSQSPKKDSYVEPPPRRPMSQKSEIHRANTSPSPPRSRSEQLVRLKDTTAKLSKGAIPCPAATPVPIVEKRSEIIMSPATLRRQIKIETRGRDSPPTITIPVNINHAASGSFRESVDAQEEIRKVEKRATYVHKDGLNSTDHMVPDTESYDAVEIIRKVAVPPRLSEHTQRYEAANRTVQMAENFVNDPENEINRWFREFEHGPVSEAKSNRRVYAKGETNHNIQQESRTFCKEEFGLTSLGNTSFTDFSCKHPRELREKIPVKQPRICSETRSLSEHFSGMDAFESQIVESKMKTSSSHSSEAGKSGCDFKHAPPTYEDVIAGHILDISDSPKEVRKNFQKTWQESGRVFKGLGYATADASATEMRTTFQEESAFISEAAAPRQGNMYTLSKDSLSNGVPSGRQAEFS

SEQ ID NO: 6421 - protein, 376 aa, Homo sapiens
MGGGGSALRVCADHRGGINWLSLSPDGQRLLTGSEDGTARLWSTADGQCCALLQGHESYVTFCQLEDEAAFTCSADCTIRRWDVLTGQCLQVYRGHTSIVNRILVANNQLFSSSYDRTARVWSVDKGQMSREFRGHRNCVLTLAYSAPWDLPSTPCAEEAAAGGLLVTGSTDGTAKVWQVASGCCHQTLRGHTGAVLCLVLDTPGHTAFTGSTDATIRAWDILSGEQLRVFREHRGSVICLELVNRLVYSGSADRTVKCWLADTGECVRTFTAHRRNVSALKYHAGTLFTGSGDACARAFDAQSGELRRVFRGHTFIINCIQVHGQVLYTASHDGALRLWDVRGLRGAPRPPPPMRSLSRLFSNKVGCAAAPLQPA

SEQ ID NO: 6422 - protein, 491 aa, Homo sapiens
MGGGGSALRVCADHRGGINWLSLSPDGQRLLTGSEDGTARLWSTADGQCCALLQGRPSHSLPDLFAAAHRPQTADPSSCARRPLSRSPAPAHPGTLAEERLSGPSIWLLSARQGRVPCGLFVANCALLLAFPVDDSHSNNRRLLRASGAEKCAVVTLCYPTYRRGNRLGGHESYVTFCQLEDEAAFTCSADCTIRRWDVLTGQCLQVYRGHTSIVNRILVANNQLFSSSYDRTARVWSVDKGQMSREFRGHRNCVLTLAYSAPWDLPSTPCAEEAAAGGLLVTGSTDGTAKVWQVASGCCHQTLRGHTGAVLCLVLDTPGHTAFTGSTDATIRAWDILSGEQLRVFREHRGSVICLELVNRLVYSGSADRTVKCWLADTGECVRTFTAHRRNVSALKYHAGTLFTGSGDACARAFDAQSGELRRVFRGHTFIINCIQVHGQVLYTASHDGALRLWDVRGLRGAPRPPPPMRSLSRLFSNKVGCAAAPLQPA

SEQ ID NO: 6423 - protein, 277 aa, Homo sapiens
MSREFRGHRNCVLTLAYSAPWDLPSTPCAEEAAAGGLLVTGSTDGTAKVWQVASGCCHQTLRGHTGAVLCLVLDTPGHTAFTGSTDATIRAWDILSGEQLRVFREHRGSVICLECSRAAGTLAPGPSTRSLESCGGCSGATHSSSTASRCTARCSTPPRTTAPCASGTCAGSEVPRGPLRPCAASRGSSATRWAAPPRPCSRPDPAGPLQTPAQTPSGSQSAPPCYPRWWRPMAGEGRGARKPGREESPSQASGFSLVARRRWERECSPWGPPPFPF

SEQ ID NO: 6424 - protein, 482 aa, Homo sapiens
MGGGGSALRVCADHRGGINWLSLSPDGQRLLTGSEDGTARLWSTADGQCCALLQGHESYVTFCQLEDEAAFTCSADCTIRRWDVLTGQCLQVYRGHTSIVNRILVANNQLFSSSYDRTARVWSVDKGQMSREFRGHRNCVLTLAYSAPWDLPSTPCAEEAAAGGLLVTGSTDGTAKVWQVASGCCHQTLRGHTGAVLCLVLDTPGHTAFTGSTDATIRAWDILSGEQLRVFREHRGSVICLERERSGGLQSCPSCRPSLLLLAAGEPTRVLWQRGQDRQVLAGRHRGVCAHVHGPQTQRERPQVPRGHLVHGQRGRLRPGLRRAVWRAAEGVPGPHIHHQLHPGARPGALHRLARRRPAPLGRARAPRCPAAPSAHAQPLAALQQQGGLRRRAPAAGLIPRGPCRRQPRHPAAPRAPRPATRGGGARWPARGEERGSPGGRRARRRRLVFLWWPGGAGSGSARPGDRPLFPFRVAPVLPPHP

SEQ ID NO: 6425 - protein, 572 aa, Homo sapiens
MPVYCKYQFHKTPVHKTKGEPHGTHVYFQDINVIFLGALHPSDLREYLEGPPMVVEVHDRDRKSEECSQKPVLFGEDPLDSYLNFQALISPRETENNPFESQNKMWYPYGIAQVSFADLLLGHKYLNLAVPIHSCEVQPTHCGQDSRRRKVVGLGVPRDGHQHGPMPRGNYLEADSQLKLRVDIAVPLRAGARAADPDLGGSQFGRIIFVFDFKKVSLLHSLLQDITMINAKALGLDSYPVRTLQQILSAFKVRVRVQEQQHLDVLTGFHLLDGKTHLFILEGLADQGLRQLWENHQSWIPRSEHRKYKVLYNSQLLFRSRLYGDLEAILYHVHLFQPTELLLQQAVFFLRDTERRRVFQALARIHDICYNSTTLWDVTVRDLLPSSAMIKDLSQEFGMPLSQEELTDEKLFALPPQPAPNLEDYHSRNSTLTLEIHAHQEPRKRFTYSQDYLSAMVEPLDLKEEEKKAQKKSRQAWLTARGFQVTGLQSDTESSFQDLKLPPIKELNEEWKENSLFANVLEPVLDRDRWSWDRHHVDFDLYKKPPPFLELLPSPAPKPVTVRKKKGNSPIS

SEQ ID NO: 6426 - protein, 147 aa, Homo sapiens
MYWQNWTHNGRLWGAGVHLYLSRKQCALKNTSLSKFQTSHICKGSALQPQQASPGASSFLTCPELGVMYLKLVLGQMVQAVRRDSGLQPFGSLFLLITQKRAVLTPFLTKTWHSLRALVYRVWSLEESRYLQREKGLVDSFGVLWEE

SEQ ID NO: 6427 - protein, 147 aa, Homo sapiens
MQPSWTPAPVQRTACNITAWGGEFGKEGEGRCEQVALSSGPPEGALHASREGPQPPGAENLRPSTGETFVQSGRWDGGWRGAMKGRRHRQASTPPTRPESIFVPTAQDGAQMVCKAHTRTTQYTEQDSVVTARGLLDAKRVGVAGGS

SEQ ID NO: 6428 - protein, 167 aa, Homo sapiens
MAALSSRCPRSAAGPAYLQEAARSAHWASPPLVPLRTFQSSLFSSGSFHSREEEEEGVSLLRTALVGQGPVPLFLGSLFCAGCRQGPSVWSCGEPVPRRIWVTASVTPSPRQALHPCSDSLDILKALHLLPAAFSPFIWVQVFAEPSNKESRGENDGGEERESANIY

SEQ ID NO: 6429 - protein, 158 aa, Homo sapiens
MDFRQISPTTCTTPASSSSAAPPTPASSSSAAPPTPASSSSAAPPTPANCSTAAPPTPANCSTAAPPTPASSGSAAPPTPAPDHWWMEAPHHWLPGLLARCGSRQLPSSVGLACFGTAAVPRKPVNWACQGSHGELEASQVGSGKAGPCTPHPSLLGF

SEQ ID NO: 6430 - protein, 157 aa, Homo sapiens
MLPEQGPQPSTMPLWCLLAACTSLPRQAATMLEEAASPNEAVHASTSGSGALTDQTFTDLSAAEASSEEVPDFMEVPHSVHHKINCFFYLEKQLCQLPSPLCLSSLLTLKLKTTVPAPGRWWSFQPHKAFPLLVGTPGSWQSTIDPAWAAPSQPSPG

SEQ ID NO: 6431 - protein, 1325 aa, Homo sapiens
MKEPLDGECGKAVVPQQELLDKIKEEPDNAQEYGCVQQPKTQESKLKIGGVSSVNERPIAQQLNPGFQLSFASSGPSVLLPSVPAVAIKVFCSGCKKMLYKGQTAYHKTGSTQLFCSTRCITRHSSPACLPPPPKKTCTNCSKDILNPKDVITTRFENSYPSKDFCSQSCLSSYELKKKPVVTIYTKSISTKCSMCQKNADTRFEVKYQNVVHGLCSDACFSKFHSTNNLTMNCCENCGSYCYSSSGPCQSQKVFSSTSVTAYKQNSAQIPPYALGKSLRPSAEMIETTNDSGKTELFCSINCLSAYRVKTVTSSGVQVSCHSCKTSAIPQYHLAMSNGTIYSFCSSSCVVAFQNVFSKPKGTNSSAVPLSQGQVVVSPPSSRSAVSIGGGNTSAVSPSSIRGSAAASLQPLAEQSQQVALTHTVVKLKCQHCNHLFATKPELLFYKGKMFLFCGKNCSDEYKKKNKVVAMCDYCKLQKIIKETVRFSGVDKPFCSEVCKFLSARDFGERWGNYCKMCSYCSQTSPNLVENRLEGKLEEFCCEDCMSKFTVLFYQMAKCDGCKRQGKLSESIKWRGNIKHFCNLFCVLEFCHQQIMNDCLPQNKVNISKAKTAVTELPSARTDTTPVITSVMSLAKIPATLSTGNTNSVLKGAVTKEAAKIIQDESTQEDAMKFPSSQSSQPSRLLKNKGISCKPVTQTKATSCKPHTQHKECQTDLPMPNEKNDAELDSPPSKKKRLGFFQTYDTEYLKVGFIICPGSKESSPRPQCVICGEILSSENMKPANLSHHLKTKHSELENKPVDFFEQKSLEMECQNSSLKKCLLVEKSLVKASYLIAFQTAASKKPFSIAEELIKPYLVEMCSEVLGSSAGDKMKTIPLSNVTIQHRIDELSADIEDQLIQKVRESKWFALQIDESSEISNITLLLCYIRFIDYDCRDVKEELLFCIEMPTQITGFEIFELINKYIDSKSLNWKHCVGLCTDGAASMTGRYSGLKAKIQEVAMNTAAFTHCFIHRERLVAEKLSPCLHKILLQSAQILSFIKSNALNSRMLTILCEEMGSEHVSLPLHAEVRWISRGRMLKRLFELRHEIEIFLSQKHSDLAKYFHDEEWVGKLAYLSDIFSLINELNLSLQGTLTTFFNLCNKIDVFKRKLKMWLKRTQENDYDMFPSFSEFSNSSGLNMTDITRIIFEHLEGLSQVFSDCFPPEQDLRSGNLWIIHPFMNHQNNNLTDFEEEKLTELSSDLGLQALFKSVSVTQFWINAKTSYPELHERAMKFLLPFSTVYLCDAAFSALTESKQKNLLGSGPALRLAVTSLIPRIEKLVKEKE

SEQ ID NO: 6432 - protein, 156 aa, Homo sapiens
MKEPLDGECGKAVVPQQELLDKIKEEPDNAQEYGCVQQPKTQESKLKIGGVSSVNERPIAQQLNPGFQLSFASSGPSVLLPSVPAVAIKVFCSGCKKMLYKGQTAYHKTGSTQLFCSTRCITRHSSPACLPPPPKKTCTNCSKYKILNIPFYFTFF

SEQ ID NO: 6433 - protein, 723 aa, Homo sapiens
MKEPLDGECGKAVVPQQELLDKIKEEPDNAQEYGCVQQPKTQESKLKIGGVSSVNERPIAQQLNPGFQLSFASSGPSVLLPSVPAVAIKVFCSGCKKMLYKGQTAYHKTGSTQLFCSTRCITRHSSPACLPPPPKKTCTNCSKDILNPKDVITTRFENSYPSKDFCSQSCLSSYELKKKPVVTIYTKSISTKCSMCQKNADTRFEVKYQNVVHGLCSDACFSKFHSTNNLTMNCCENCGSYCYSSSGPCQSQKVFSSTSVTAYKQNSAQIPPYALGKSLRPSAEMIETTNDSGKTELFCSINCLSAYRVKTVTSSGVQVSCHSCKTSAIPQYHLAMSNGTIYSFCSSSCVVAFQNVFSKPKGTNSSAVPLSQGQVVVSPPSSRSAVSIGGGNTSAVSPSSIRGSAAASLQPLAEQSQQVALTHTVVKLKCQHCNHLFATKPELLFYKGKMFLFCGKNCSDEYKKKNKVVAMCDYCKLQKIIKETVRFSGVDKPFCSEVCKFLSARDFGERWGNYCKMCSYCSQTSPNLVENRLEGKLEEFCCEDCMSKFTVLFYQMAKCDGCKRQGKLSESIKWRGNIKHFCNLFCVLEFCHQQIMNDCLPQNKVNISKAKTAVTELPSARTDTTPVITSVMSLAKIPATLSTGNTNSVLKGAVTKEAAKIIQDESTQEDAMKFPSSQSSQPSRLLKNKGISCKPVTQTKATSCKPHTQHKECQTECPVRAVC

SEQ ID NO: 6434 - protein, 170 aa, Homo sapiens
MKEPLDGECGKAVVPQQELLDKIKEEPDNAQEYGCVQQPKTQESKLKIGGVSSVNERPIAQQLNPGFQLSFASSGPSVLLPSVPAVAIKVFCSGCKKMLYKGQTAYHKTGSTQLFCSTRCITRHSSPACLPPPPKKTCTNCSKYKILNIPFYFTFFLVCILFSSNILLIL

SEQ ID NO: 6435 - protein, 638 aa, Homo sapiens
MNFKYVGRYIKNIAYLFLKITVIQIFHSDLPMPNEKNDAELDSPPSKKKRLGFFQTYDTEYLKVGFIICPGSKESSPRPQCVICGEILSSENMKPANLSHHLKTKHSELENKPVDFFEQKSLEMECQNSSLKKCLLVEKSLVKASYLIAFQTAASKKPFSIAEELIKPYLVEMCSEVLGSSAGDKMKTIPLSNVTIQHRIDELSADIEDQLIQKVRESKWFALQIDESSEISNITLLLCYIRFIDYDCRDVKEELLFCIEMPTQITGFEIFELINKYIDSKSLNWKHCVGLCTDGAASMTGRYSGLKAKIQEVAMNTAAFTHCFIHRERLVAEKLSPCLHKILLQSAQILSFIKSNALNSRMLTILCEEMGSEHVSLPLHAEVRWISRGRMLKRLFELRHEIEIFLSQKHSDLAKYFHDEEWVGKLAYLSDIFSLINELNLSLQGTLTTFFNLCNKIDVFKRKLKMWLKRTQENDYDMFPSFSEFSNSSGLNMTDITRIIFEHLEGLSQVFSDCFPPEQDLRSGNLWIIHPFMNHQNNNLTDFEEEKLTELSSDLGLQALFKSVSVTQFWINAKTSYPELHERAMKFLLPFSTVYLCDAAFSALTESKQKNLLGSGPALRLAVTSLIPRIEKLVKEKE

SEQ ID NO: 6436 - protein, 533 aa, Homo sapiens
MDSSQHLVTFEDVAVDFTQEEWTLLDQAQRDLYRDVMLENYKNLIILAGSELFKRSLMSGLEQMEELRTGVTGVLQELDLQLKTKGSPLLQDISAERSPNGVQLERSNTAEKLYDSNHSGKVFNEHPFLMTHMITHIGEKTSEDNQSGKALRKNFPHSFYKKSHAEGKMPKCVKHEKAFNQFPNLTRQNKTHTQEKLCECKDCWRTFLNQSSLKLHIRSHNGDKHYVCKECGKAFSNSSHLIGHGRIHSGEKPYVCKECGKAFTQSTGLKLHIRTHSGEKPYKCKECGKAFTHSSYLTDHTRIHSGKKPYVCMECGKAFTRSTGLILHMRIHTGEKPYECKECGKAFIHSSYLTKHVRIHSGEKLYLCKACGKAFTRSSGLVLHMRTHTGEKPYECKECGKAFNNSSMLSQHVRIHTGEKPYECKECGKAFTQSSGLSTHLRTHTGEKACECKECGKAFARSTNLNMHMRTHTGEKPYACKECGKAFRYSTYLNVHTRTHTGAKPYECKKCGKNFTQSSALAKHLRTKACEKT

SEQ ID NO: 6437 - protein, 210 aa, Homo sapiens
MTHMITHIGEKTSEDNQSGKALRKNFPHSFYKKSHAEGKMPKCVKHEKAFNQFPNLTRQNKTHTQEKLCECKDCWRTFLNQSSLKLHIRSHNGDKHYVCKECGKAFSNSSHLIGHGRIHSGEKPYVCKECGKAFTQSTGLKLHIRTHSGEKPYKCKECGKAFTHSSYLTDHTRIHSGKKPYVCMECGKAFTRSTGLILHMRIHTGEKPYE

SEQ ID NO: 6438 - protein, 289 aa, Homo sapiens
MILLQHAVLPPPKQPSPSPPMSVATRSTGTLQLPPQKPFGQEASLPLAGEEELSKGGEQDCALEELCKPLYCKLCNVTLNSAQQAQAHYQGKNHGKKLRNYYAANSCPPPARMSNVVEPAATPVVPVPPQMGSFKPGGRVILATENDYCKLCDASFSSPAVAQAHYQGKNHAKRLRLAEAQSNSFSESSELGQRRARKEGNEFKMMPNRRNMYTVQNNSAGPYFNPRSRQRIPRDLAMCVTPSGQFYCSMCNVGAGEEMEFRQHLESKQHKSKVSEQRYRNEMENLGYV

SEQ ID NO: 6439 - protein, 288 aa, Homo sapiens
MILLQHAVLPPPKQPSPSPPMSVATRSTGTLQLPPQKPFGQEASLPLAGEEELSKGGEQDCALEELCKPLYCKLCNVTLNSAQQAQAHYQGKNHGKKLRNYYAANSCPPPARMSNVVEPAATPVVPVPPQMGSFKPGGRVILATENDYCKLCDASFSSPAVAQAHYQGKNHAKRLRLAEAQSNSFSESSELGQRRARKEGNEFKMMPNRRNMYTVQNNSGPYFNPRSRQRIPRDLAMCVTPSGQFYCSMCNVGAGEEMEFRQHLESKQHKSKVSEQRYRNEMENLGYV

SEQ ID NO: 6440 - protein, 673 aa, Homo sapiens
MMFQDSVAFEDVAVTFTQEEWALLDPSQKNLCRDVMQETFRNLASIGKKWKPQNIYVEYENLRRNLRIVGERLFESKEGHQHGEILTQVPDDMLKKTTTGVKSCESSVYGEVGSAHSSLNRHIRDDTGHKAYEYQEYGQKPYKCKYCKKPFNCLSSVQTHERAHSGRKLYVCEECGKTFISHSNLQRHRIMHRGDGPYKCKFCGKALMFLSLYLIHKRTHTGEKPYQCKQCGKAFSHSSSLRIHERTHTGEKPYKCNECGKAFHSSTCLHAHKRTHTGEKPYECKQCGKAFSSSHSFQIHERTHTGEKPYECKECGKAFKCPSSVRRHERTHSRKKPYECKHCGKVLSYLTSFQNHLGMHTGEISHKCKICGKAFYSPSSLQTHEKTHTGEKPYKCNQCGKAFNSSSSFRYHERTHTGEKPYECKQCGKAFRSASLLQTHGRTHTGEKPYACKECGKPFSNFSFFQIHERMHREEKPYECKGYGKTFSLPSLFHRHERTHTGGKTYECKQCGRSFNCSSSFRYHGRTHTGEKPYECKQCGKAFRSASQLQIHGRTHTGEKPYECKQCGKAFGSASHLQMHGRTHTGEKPYECKQCGKSFGCASRLQMHGRTHTGEKPYKCKQCGKAFGCPSNLRRHGRTHTGEKPYKCNQCGKVFRCSSQLQVHGRAHCIDTP

SEQ ID NO: 6441 - protein, 638 aa, Homo sapiens
MQETFRNLASIGKKWKPQNIYVEYENLRRNLRIVGERLFESKEGHQHGEILTQVPDDMLKKTTTGVKSCESSVYGEVGSAHSSLNRHIRDDTGHKAYEYQEYGQKPYKCKYCKKPFNCLSSVQTHERAHSGRKLYVCEECGKTFISHSNLQRHRIMHRGDGPYKCKFCGKALMFLSLYLIHKRTHTGEKPYQCKQCGKAFSHSSSLRIHERTHTGEKPYKCNECGKAFHSSTCLHAHKRTHTGEKPYECKQCGKAFSSSHSFQIHERTHTGEKPYECKECGKAFKCPSSVRRHERTHSRKKPYECKHCGKVLSYLTSFQNHLGMHTGEISHKCKICGKAFYSPSSLQTHEKTHTGEKPYKCNQCGKAFNSSSSFRYHERTHTGEKPYECKQCGKAFRSASLLQTHGRTHTGEKPYACKECGKPFSNFSFFQIHERMHREEKPYECKGYGKTFSLPSLFHRHERTHTGGKTYECKQCGRSFNCSSSFRYHGRTHTGEKPYECKQCGKAFRSASQLQIHGRTHTGEKPYECKQCGKAFGSASHLQMHGRTHTGEKPYECKQCGKSFGCASRLQMHGRTHTGEKPYKCKQCGKAFGCPSNLRRHGRTHTGEKPYKCNQCGKVFRCSSQLQVHGRAHCIDTP

SEQ ID NO: 6442 - protein, 1031 aa, Homo sapiens
MPPGRWHAAYPAQAQSSRERGRLQTVKKEEEDESYTPVQAARPQTLNRPGQELFRQLFRQLRYHESSGPLETLSRLRELCRWWLRPDVLSKAQILELLVLEQFLSILPGELRVWVQLHNPESGEEAVALLEELQRDLDGTSWRDPGPAQSPDVHWMGTGALRSAQIWSLASPLRSSSALGDHLEPPYEIEARDFLAGQSDTPAAQMPALFPREGCPGDQVTPTRSLTAQLQETMTFKDVEVTFSQDEWGWLDSAQRNLYRDVMLENYRNMASLVGPFTKPALISWLEAREPWGLNMQAAQPKGNPVAAPTGDDLQSKTNKFILNQEPLEEAETLAVSSGCPATSVSEGIGLRESFQQKSRQKDQCENPIQVRVKKEETNFSHRTGKDSEVSGSNSLDLKHVTYLRVSGRKESLKHGCGKHFRMSSHHYDYKKYGKGLRHMIGGFSLHQRIHSGLKGNKKDVCGKDFSLSSHHQRGQSLHTVGVSFKCSDCGRTFSHSSHLAYHQRLHTQEKAFKCRVCGKAFRWSSNCARHEKIHTGVKPYKCDLCEKAFRRLSAYRLHRETHAKKKFLELNQYRAALTYSSGFDHHLGDQSGEKLFDCSQCRKSFHCKSYVLEHQRIHTQEKPYKCTKCRKTFRWRSNFTRHMRLHEEEKFYKQDECREGFRQSPDCSQPQGAPAVEKTFLCQQCGKTFTRKKTLVDHQRIHTGEKPYQCSDCGKDFAYRSAFIVHKKKHAMKRKPEGGPSFSQDTVFQVPQSSHSKEEPYKCSQCGKAFRNHSFLLIHQRVHTGEKPYKCRECGKAFRWSSNLYRHQRIHSLQKQYDCHESEKTPNVEPKILTGEKRFWCQECGKTFTRKRTLLDHKGIHSGEKRYKCNLCGKSYDRNYRLVNHQRIHSTERPFKCQWCGKEFIGRHTLSSHQRKHTRAAQAERSPPARSSSQDTKLRLQKLKPSEEMPLEDCKEACSQSSRLTGLQDISIGKKCHKCSICGKTFNKSSQLISHKRFHTRERPFKCSKCGKTFRWSSNLARHMKNHIRD

SEQ ID NO: 6443 - protein, 163 aa, Homo sapiens
MRIEKCYFCSGPIYPGHGMMFVRNDCKVFRFCKSKCHKNFKKKRNPRKVRWTKAFRKAAGKELTVDNSFEFEKRRNEPIKYQRELWNKTIDAMKRVEEIKQKRQAKFIMNRLKKNKELQKVQDIKEVKQNIHLIRAPLAGKGKQLEEKMVQQLQEDVDMEDAP

SEQ ID NO: 6444 - protein, 612 aa, Homo sapiens
MADFAGPSSAGRKAGAPRCSRKAAGTKQTSTLKQEDASKRKAELEAAVRKKIEFERKALHIVEQLLEENITEEFLMECGRFITPAHYSDVVDERSIVKLCGYPLCQKKLGIVPKQKYKISTKTNKVYDITERKSFCSNFCYQASKFFEAQIPKTPVWVREEERHPDFQLLKEEQSGHSGEEVQLCSKAIKTSDIDNPSHFEKQYESSSSSTHSDSSSDNEQDFVSSILPGNRPNSTNIRPQLHQKSIMKKKAGHKANSKHKDKEQTVVDVTEQLGDCKLDSQEKDATCELPLQKVNTQSSSNSTLPERLKASENSESEYSRSEITLVGISKKSAEHFKRKFAKSNQVSRSVSSSVQVCPEVGKRNLLKVLKETLIEWKTEETLRFLYGQNYASVCLKPEASLVKEELDEDDIISDPDSHFPAWRESQNSLDESLPFRGSGTAIKPLPSYENLKKETEKLNLRIREFYRGRYVLGEETTKSQDSEEHDSTFPLIDSSSQNQIRKRIVLEKLSKVLPGLLVPLQITLGDIYTQLKNLVRTFRLTNRNIIHKPAEWTLIAMVLLSLLTPILGIQKHSQEGMVFTRFLDTLLEELHLKNEDLESLTIIFRTSCLPE

SEQ ID NO: 6445 - protein, 584 aa, Homo sapiens
MADFAGPSSAGRKAGAPRCSRKAAGTKQTSTLKQEDASKRKAELEAAVRKKIEFERKALHIVEQLLEENITEEFLMECGRFITPAHYSDVVDERSIVKLCGYPLCQKKLGIVPKQKYKISTKTNKVYDITERKSFCSNFCYQASKFFEAQIPKTPVWVREEERHPDFQLLKEEQSGHSGEEVQLCSKAIKTSDIDNPSHFEKQYESSSSSTHSDSSSDNEQDFVSSILPGNRPNSTNIRPQLHQKSIMKKKAGHKANSKHKDKEQTVVDVTEQLGDCKLDSQEKDATCELPLQKVNTQSSSNSTLPERLKASENSESEYSRSEITLVGISKKSAEHFKRKFAKSNQVSRSVSSSVQVCPEVGKRNLLKVLKETLIEWKTEETLRFLYGQNYASVCLKPEASLVKEELDEDDIISDPDSHFPAWRESQNSLDESLPFRGSGTAIKPLPSYENLKKETEKLNLRIREFYRGRYVLGEETTKSQDSEEHDSTFPLIDSSSQNQIRKRIVLEKLSKVLPGLLVPLQITLGDIYTQLKNLVRTFRLTNRNIIHKPAEWTLIAMVLLSFLLNVKTRIKTFMMIYFHLMNS

SEQ ID NO: 6446 - protein, 580 aa, Homo sapiens
MGSSRLRVFDPHLERKDSAAALSDRELPLPTFDVPYFKYIDEEDEDDEWSSRSQSSTEDDSVDSLLSDRYVVVSGTPEKILEHLLNDLHLEEVQDKETETLLDDFLLTYTVFMTTDDLCQALLRHYSAKKYQGKEENSDVPRRKRKVLHLVSQWIALYKDWLPEDEHSKMFLKTIYRNVLDDVYEYPILEKELKEFQKILGMHRRHTVDEYSPQKKNKALFHQFSLKENWLQHRGTVTETEEIFCHVYITEHSYVSVKAKVSSIAQEILKVVAEKIQYAEEDLALVAITFSGEKHELQPNDLVISKSLEASGRIYVYRKDLADTLNPFAENEESQQRSMRILGMNTWDLALELMNFDWSLFNSIHEQELIYFTFSRQGSGEHTANLSLLLQRCNEVQLWVATEILLCSQLGKRVQLVKKFIKIAAHCKAQRNLNSFFAIVMGLNTASVSRLSQTWEKIPGKFKKLFSELESLTDPSLNHKAYRDAFKKMKPPKIPFMPLLLKDVTFIHEGNKTFLDNLVNFEKLHMIADTVRTLRHCRTNQFGDLSPKEHQELKSYVNHLYVIDSQQALFELSHRIEPRV

SEQ ID NO: 6447 - protein, 444 aa, Homo sapiens
MGSSRLRVFDPHLERKDSAAALSDRELPLPTFDVPYFKYIDEEDEDDEWSSRSQSSTEDDSVDSLLSDRYVVVSGTPEKILEHLLNDLHLEEVQDKETETLLDDFLLTYTVFMTTDDLCQALLRHYSAKKYQGKEENSDVPRRKRKVLHLVSQWIALYKDWLPEDEHSKMFLKTIYRNVLDDVYEYPILEKELKEFQKILGMHRRHTVDEYSPQKKNKALFHQFSLKENWLQHRGTVTETEEIFCHVYITEHSYVSVKAKVSSIAQEILLCSQLGKRVQLVKKFIKIAAHCKAQRNLNSFFAIVMGLNTASVSRLSQTWEKIPGKFKKLFSELESLTDPSLNHKAYRDAFKKMKPPKIPFMPLLLKDVTFIHEGNKTFLDNLVNFEKLHMIADTVRTLRHCRTNQFGDLSPKEHQELKSYVNHLYVIDSQQALFELSHRIEPRV

SEQ ID NO: 6448 - protein, 264 aa, Homo sapiens
MRTLWMALCALSRLWPGAQAGCAEAGRCCPGRDPACFARGWRLDRVYGTCFCDQACRFTGDCCFDYDRACPARPCFVGEWSPWSGCADQCKPTTRVRRRSVQQEPQNGGAPCPPLEERAGCLEYSTPQGQDCGHTYVPAFITTSAFNKERTRQATSPHWSTHTEDAGYCMEFKTESLTPHCALENWPLTRWMQYLREGYTVCVDCQPPAMNSVSLRCSGDGLDSDGNQTLHWQAIGNPRCQGTWKKVRRVDQCSCPAVHSFIFI

SEQ ID NO: 6449 - protein, 549 aa, Homo sapiens
MSLVACECLPSPGLEPEPCSRARSQAHVYLEQIRNRVALGVPDMTKRDYLVDAATQIRLALERDVSEDYEAAFNHYQNGVDVLLRGIHVDPNKERREAVKLKITKYLRRAEEIFNCHLQRPLSSGASPSAGFSSLRLRPIRTLSSAVEQLRGCRVVGVIEKVQLVQDPATGGTFVVKSLPRCHMVSRERLTIIPHGVPYMTKLLRYFVSEDSIFLHLEHVQGGTLWSHLLSQAHSRHSGLSSGSTQERMKAQLNPHLNLLTPARLPSGHAPGQDRIALEPPRTSPNLLLAGEAPSTRPQREAEGEPTARTSTSGSSDLPKAPGGHLHLQARRAGQNSDAGPPRGLTWVPEGAGPVLGGCGRGMDQSCLSADGAGRGCGRATWSVREEQVKQWAAEMLVALEALHEQGVLCRDLHPGNLLLDQAGHIRLTYFGQWSEVEPQCCGEAVDNLYSAPEVGGISELTEACDWWSFGSLLYELLTGMALSQSHPSGIQAHTQLQLPEWLSRPAASLLTELLQFEPTRRLGMGEGGVSKLKSHPFFSTIQWSKLVG

SEQ ID NO: 6450 - protein, 541 aa, Homo sapiens
MSLVACECLPSPGLEPEPCSRARSQAHVYLEQIRNRVALGVPDMTKRDYLVDAATQIRLALERDVSEDYEAAFNHYQNGVDVLLRGIHVDPNKERREAVKLKITKYLRRAEEIFNCHLQRPLSSGASPSAVQLVQDPATGGTFVVKSLPRCHMVSRERLTIIPHGVPYMTKLLRYFVSEDSIFLHLEHVQGGTLWSHLLSQAHSRHSGLSSGSTQERMKAQLNPHLNLLTPARLPSGHAPGQDRIALEPPRTSPNLLLAGEAPSTRPQREAEGEPTARTSTSGSSDLPKAPGGHLHLQARRAGQNSDAGPPRGLTWVPEGAGPVLGGCGRGMDQSCLSADGAGRGCGRATWSVREEQVKQWAAEMLVALEALHEQGVLCRDLHPGNLLLDQAGHIRLTYFGQWSEVEPQCCGEAVDNLYSAPEVGGISELTEACDWWSFGSLLYELLTGMALSQSHPSGIQAHTQLQLPEWLSRPAASLLTELLQFEPTRRLGMGEGGVSKLKSHPFFSTIQWSKLVGTSLETHLRTLIHWLSGPKPDCPG

SEQ ID NO: 6451 - protein, 255 aa, Homo sapiens
MSLVACECLPSPGLEPEPCSRARSQAHVYLEQIRNRVALGVPDMTKRDYLVDAATQIRLALERDVSEDYEAAFNHYQNGVDVLLRGIHVDPNKERREAVKLKITKYLRRAEEIFNCHLQRPLSSGASPSAGFSSLRLRPIRTLSSAVEQLRGCRVVGVIEKVQLVQDPATGGTFVVKSLPRCHMVSRERLTIIPHGVPYMTKLLRYFVSEDSIFLHLEHVQGEQAWGPLSAPQAFGVCRQPLKCGALAGRGGSRL

SEQ ID NO: 6452 - protein, 156 aa, Homo sapiens
MALEKSLVRLLLLVLILLVLGWVQPSLGKESRAKKFQRQHMDSDSSPSSSSTYCNQMMRRRNMTQGRCKPVNTFVHEPLVDVQNVCFQEKVTCKNGQGNCYKSNSSMHITDCRLTNGSRYPNCAYRTSPKERHIIVACEGSPYVPVHFDASVEDST

SEQ ID NO: 6453 - protein, 328 aa, Homo sapiens
MMSGEPLHVKTPIRDSMALSKMAGTSVYLKMDSAQPSGSFKIRGIGHFCKRWAKQGCAHFVCSSAGNAGMAAAYAARQLGVPATIVVPSTTPALTIERLKNEGATVKVVGELLDEAFELAKALAKNNPGWVYIPPFDDPLIWEGHASIVKELKETLWEKPGAIALSVGGGGLLCGVVQGLQEVGWGDVPVIAMETFGAHSFHAATTAGKLVSLPKITSVAKALGVKTVGAQALKLFQEHPIFSEVISDQEAVAAIEKFVDDEKILVEPACGAALAAVYSHVIQKLQLEGNLRTPLPSLVVIVCGGSNISLAQLRALKEQLGMTNRLPK

SEQ ID NO: 6454 - protein, 245 aa, Homo sapiens
MGGGYDLNLFASPPDSNFVCSVCHGVLKRPARLPCSHIFCKKCILRWLARQKTCPCCRKEVKRKKVVHMNKLRKTIGRLEVKCKNADAGCIVTCPLAHRKGHQDSCPFELTACPNEGCTSQVPRGTLAEHRQHCQQGSQQRCPLGCGATLDPAERARHNCYRELHNAWSVRQERRRPLLLSLLRRVRWLDQATSVVRRELAELSNFLEEDTALLEGAPQEEAEAAPEGNVGAEVVGEPRANIPCK

SEQ ID NO: 6455 - protein, 230 aa, Homo sapiens
MPLPDTMFCAQQIHIPPELPDILKQFTKAAIRTQPADVLRWSAGYFSALSRGDPLPVKDRMEMPTATQKTDTGLTQGLLKVLHKQCHHKRYVELTDLEQKWKNLCLPKEKFKALLQLDPCENKIKWINFLALGCSMLGGSLNTALKHLCEILTDDPEGGPARIPFKTFSYVYRYLARLDSDVSPLETESYLASLKENIDARKNGMIGLSDFFFPKRKLLESIENSEDVGH

SEQ ID NO: 6456 - protein, 943 aa, Homo sapiens
MARGSALPRRPLLCIPAVWAAAALLLSVSRTSGEVEVLDPNDPLGPLDGQDGPIPTLKGYFLNFLEPVNNITIVQGQTAILHCKVAGNPPPNVRWLKNDAPVVQEPRRIIIRKTEYGSRLRIQDLDTTDTGYYQCVATNGMKTITATGVLFVRLGPTHSPNHNFQDDYHEDGFCQPYRGIACARFIGNRTIYVDSLQMQGEIENRITAAFTMIGTSTHLSDQCSQFAIPSFCHFVFPLCDARSRTPKPRELCRDECEVLESDLCRQEYTIARSNPLILMRLQLPKCEALPMPESPDAANCMRIGIPAERLGRYHQCYNGSGMDYRGTASTTKSGHQCQPWALQHPHSHHLSSTDFPELGGGHAYCRNPGGQMEGPWCFTQNKNVRMELCDVPSCSPRDSSKMGILYILVPSIAIPLVIACLFFLVCMCRNKQKASASTPQRRQLMASPSQDMEMPLINQHKQAKLKEISLSAVRFMEELGEDRFGKVYKGHLFGPAPGEQTQAVAIKTLKDKAEGPLREEFRHEAMLRARLQHPNVVCLLGVVTKDQPLSMIFSYCSHGDLHEFLVMRSPHSDVGSTDDDRTVKSALEPPDFVHLVAQIAAGMEYLSSHHVVHKDLATRNVLVYDKLNVKISDLGLFREVYAADYYKLLGNSLLPIRWMAPEAIMYGKFSIDSDIWSYGVVLWEVFSYGLQPYCGYSNQDVVEMIRNRQVLPCPDDCPAWVYALMIECWNEFPSRRPRFKDIHSRLRAWGNLSNYNSSAQTSGASNTTQTSSLSTSPVSNVSNARYVGPKQKAPPFPQPQFIPMKGQIRPMVPPPQLYVPVNGYQPVPAYGAYLPNFYPVQIPMQMAPQQVPPQMVPKPSSHHSGSGSTSTGYVTTAPSNTSMADRAALLSEGADDTQNAPEDGAQSTVQEAEEEEEGSVPETELLGDCDTLQVDEAQVQLEA

SEQ ID NO: 6457 - protein, 249 aa, Homo sapiens
MSSGQQVWHTAVPPPRRSSSIASMPRSPSSAGSPRSPGTPGSERVASPLECSICFSGYDNIFKTPKELSCTHVFCLECLARLAAAQPVGRPGGEAVPCPFCRQPTAVPPAGAPALCTSRQLQARMPAHLRREEPVWLEGTKLCCQPLPTTPGREPGFVCVDVGLSKPAEPPAPARDPAPRRGRLARCWARCRDWRRMALVSALLLMLFCVALWPVQCALKTGNLRCLPLPPRPPATSTAASPLGPLTDN

SEQ ID NO: 6458 - protein, 1410 aa, Homo sapiens
MDIYDTQTLGVVVFGGFMVVSAIGIFLVSTFSMKETSYEEALANQRKEMAKTHHQKVEKKKKEKTVEKKGKTKKKEEKPNGKIPDHDPAPNVTVLLREPVRAPAVAVAPTPVQPPIIVAPVATVPAMPQEKLASSPKDKKKKEKKVAKVEPAVSSVVNSIQVLTSKAAILETAPKEVPMVVVPPVGAKGNTPATGTTQGKKAEGTQNQSKKAEGAPNQGRKAEGTPNQGKKTEGTPNQGKKAEGTPNQGKKAEGTPNQGKKAEGAQNQGKKVDTTPNQGKKVEGAPTQGRKAEGAQNQAKKVEGAQNQGKKAEGAQNQGKKGEGAQNQGKKAEGAQNQGKKAEGAQNQGKKAEGAQNQGKKAEGAQNQGKKAEGAQNQGKKAEGAQNQGKKVEGAQNQGKKAEGAQNQGKKAEGAQNQGKKAEGAQNQGKKAEGAQNQGKKAEGAQNQGKKAEGAQNQGKKAEGAQNQGKKVEGAQNQGKKAEGAQNQGKKAEGAQNQGKKAEGAQNQGQKGEGAQNQGKKTEGAQGKKAERSPNQGKKGEGAPIQGKKADSVANQGTKVEGITNQGKKAEGSPSEGKKAEGSPNQGKKADAAANQGKKTESASVQGRNTDVAQSPEAPKQEAPAKKKSGSKKKGEPGPPDADGPLYLPYKTLVSTVGSMVFNEGEAQRLIEILSEKAGIIQDTWHKATQKGDPVAILKRQLEEKEKLLATEQEDAAVAKSKLRELNKEMAAEKAKAAAGEAKVKKQLVAREQEITAVQARMQASYREHVKEVQQLQGKIRTLQEQLENGPNTQLARLQQENSILRDALNQATSQVESKQNAELAKLRQELSKVSKELVEKSEAVRQDEQQRKALEAKAAAFEKQVLQLQASHRESEEALQKRLDEVSRELCHTQSSHASLRADAEKAQEQQQQMAELHSKLQSSEAEVRSKCEELSGLHGQLQEARAENSQLTERIRSIEALLEAGQARDAQDVQASQAEADQQQTRLKELESQVSGLEKEAIELREAVEQQKVKNNDLREKNWKAMEALATAEQACKEKLLSLTQAKEESEKQLCLIEAQTMEALLALLPELSVLAQQNYTEWLQDLKEKGPTLLKHPPAPAEPSSDLASKLREAEETQSTLQAECDQYRSILAETEGMLRDLQKSVEEEEQVWRAKVGAAEEELQKSRVTVKHLEEIVEKLKGELESSDQVREHTSHLEAELEKHMAAASAECQNYAKEVAGLRQLLLESQSQLDAAKSEAQKQSDELALVRQQLSEMKSHVEDGDIAGAPASSPEAPPAEQDPVQLKTQLEWTEAILEDEQTQRQKLTAEFEEAQTSACRLQEELEKLRTAGPLESSETEEASQLKERLEKEKKLTSDLGRAATRLQELLKTTQEQLAREKDTVKKLQEQLEKAEDGSSSKEGTSV

SEQ ID NO: 6459 - protein, 977 aa, Homo sapiens
MDIYDTQTLGVVVFGGFMVVSAIGIFLVSTFSMKETSYEEALANQRKEMAKTHHQKVEKKKKEKTVEKKGKTKKKEEKPNGKIPDHDPAPNVTVLLREPVRAPAVAVAPTPVQPPIIVAPVATVPAMPQEKLASSPKDKKKKEKKVAKVEPAVSSVVNSIQVLTSKAAILETAPKEGRNTDVAQSPEAPKQEAPAKKKSGSKKKGPPDADGPLYLPYKTLVSTVGSMVFNEGEAQRLIEILSEKAGIIQDTWHKATQKGDPVAILKRQLEEKEKLLATEQEDAAVAKSKLRELNKEMAAEKAKAAAGEAKVKKQLVAREQEITAVQARMQASYREHVKEVQQLQGKIRTLQEQLENGPNTQLARLQQENSILRDALNQATSQVESKQNAELAKLRQELSKVSKELVEKSEAVRQDEQQRKALEAKAAAFEKQVLQLQASHRESEEALQKRLDEVSRELCHTQSSHASLRADAEKAQEQQQQMAELHSKLQSSEAEVRSKCEELSGLHGQLQEARAENSQLTERIRSIEALLEAGQARDAQDVQASQAEADQQQTRLKELESQVSGLEKEAIELREAVEQQKVKNNDLREKNWKAMEALATAEQACKEKLLSLTQAKEESEKQLCLIEAQTMEALLALLPELSVLAQQNYTEWLQDLKEKGPTLLKHPPAPAEPSSDLASKLREAEETQSTLQAECDQYRSILAETEGMLRDLQKSVEEEEQVWRAKVGAAEEELQKSRVTVKHLEEIVEKLKGELESSDQVREHTSHLEAELEKHMAAASAECQNYAKEVAGLRQLLLESQSQLDAAKSEAQKQSDELALVRQQLSEMKSHVEDGDIAGAPASSPEAPPAEQDPVQLKTQLEWTEAILEDEQTQRQKLTAEFEEAQTSACRLQEELEKLRTAGPLESSETEEASQLKERLEKEKKLTSDLGRAATRLQELLKTTQEQLAREKDTVKKLQEQLEKAEDGSSSKEGTSV

SEQ ID NO: 6460 - protein, 145 aa, Homo sapiens [sequence omitted]

SEQ ID NO: 6461 - protein, 146 aa, Homo sapiens [sequence omitted]

SEQ ID NO: 6462 - protein, 69 aa, Homo sapiens [sequence omitted]

SEQ ID NO: 6463 - protein, 509 aa, Homo sapiens
MNLLDPFMKMTDEQEKGLSGAPSPTMSEDSAGSPCPSGSGSDTENTRPQENTFPKGEPDLKKESEEDKFPVCIREAVSQVLKGYDWTLVPMPVRVNGSSKNKPHVKRPMNAFMVWAQAARRKLADQYPHLHNAELSKTLGKLWRLLNESEKRPFVEEAERLRVQHKKDHPDYKYQPRRRKSVKNGQAEAEEATEQTHISPNAIFKALQADSPHSSSGMSEVHSPGEHSGQSQGPPTPPTTPKTDVQPGKADLKREGRPLPEGGRQPPIDFRDVDIGELSSDVISNIETFDVNEFDQYLPPNGHPGVPATHGQVTYTGSYGISSTAATPASAGHVWMSKQQAPPPPPQQPPQAPPAPQAPPQPQAAPPQQPAAPPQQPQAHTLTTLSSEPGQSQRTHIKTEQLSPSHYSEQQQHSPQQIAYSPFNLPHYSPSYPPITRSQYDYTDHQNSSSYYSHAAGQGTGLYSTFTYMNPAQRPMYTPIADTSGVPSIPQTHSPQHWEQPVYTQLTRP

SEQ ID NO: 6464 - protein, 1470 aa, Homo sapiens
MKSLLNAFTKKEVPFREAPAYSNRRRRPPNTLAAPRVLLRSNSDNNLNASAPDWAVCSTATSHRSLSPQLLQQMPSKPEGAAKTIGSYVPGPRSRSPSLNRLGGAGEDGKRPQPLWHVGSPFALGANKDSLSAFEYPGPKRKLYSAVPGRLFVAVKPYQPQVDGEIPLHRGDRVKVLSIGEGGFWEGSARGHIGWFPAECVEEVQCKPRDSQAETRADRSKKLFRHYTVGSYDSFDTSSDCIIEEKTVVLQKKDNEGFGFVLRGAKADTPIEEFTPTPAFPALQYLESVDEGGVAWQAGLRTGDFLIEVNNENVVKVGHRQVVNMIRQGGNHLVLKVVTVTRNLDPDDTARKKAPPPPKRAPTTALTLRSKSMTSELEELVDKASVRKKKDKPEEIVPASKPSRAAENMAVEPRVATIKQRPSSRCFPAGSDMNSVYERQGIAVMTPTVPGSPKAPFLGIPRGTMRRQKSIDSRIFLSGITEEERQFLAPPMLKFTRSLSMPDTSEDIPPPPQSVPPSPPPPSPTTYNCPKSPTPRVYGTIKPAFNQNSAAKVSPATRSDTVATMMREKGMYFRRELDRYSLDSEDLYSRNAGPQANFRNKRGQMPENPYSEVGKIASKAVYVPAKPARRKGMLVKQSNVEDSPEKTCSIPIPTIIVKEPSTSSSGKSSQGSSMEIDPQAPEPPSQLRPDESLTVSSPFAAAIAGAVRDREKRLEARRNSPAFLSTDLGDEDVGLGPPAPRTRPSMFPEEGDFADEDSAEQLSSPMPSATPREPENHFVGGAEASAPGEAGRPLNSTSKAQGPESSPAVPSASSGTAGPGNYVHPLTGRLLDPSSPLALALSARDRAMKESQQGPKGEAPKADLNKPLYIDTKMRPSLDAGFPTVTRQNTRGPLRRQETENKYETDLGRDRKGDDKKNMLIDIMDTSQQKSAGLLMVHTVDATKLDNALQEEDEKAEVEMKPDSSPSEVPEGVSETEGALQISAAPEPTTVPGRTIVAVGSMEEAVILPFRIPPPPLASVDLDEDFIFTEPLPPPLEFANSFDIPDDRAASVPALSDLVKQKKSDTPQSPSLNSSQPTNSADSKKPASLSNCLPASFLPPPESFDAVADSGIEEVDSRSSSDHHLETTSTISTVSSISTLSSEGGENVDTCTVYADGQAFMVDKPPVPPKPKMKPIIHKSNALYQDALVEEDVDSFVIPPPAPPPPPGSAQPGMAKVLQPRTSKLWGDVTEIKSPILSGPKANVISELNSILQQMNREKLAKPGEGLDSPMGAKSASLAPRSPEIMSTISGTRSTTVTFTVRPGTSQPITLQSRPPDYESRTSGTRRAPSPVVSPTEMNKETLPAPLSAATASPSPALSDVFSLPSQPPSGDLFGLNPAGRSRSPSPSILQQPISNKPFTTKPVHLWTKPDVADWLESLNLGEHKEAFMDNEIDGSHLPNLQKEDLIDLGVTRVGHRMNIERALKQLLDR

SEQ ID NO: 6465 - protein, 281 aa, Homo sapiens
MMMNVPGGGAAAVMMTGYNNGRCPRNSLYSDCIIEEKTVVLQKKDNEGFGFVLRGAKADTPIEEFTPTPAFPALQYLESVDEGGVAWQAGLRTGDFLIEVNNENVVKVGHRQVVNMIRQGGNHLVLKVVTVTRNLDPDDTARKKAPPPPKRAPTTALTLRSKSMTSELEELVDKASVRKKKDKPEEIVPASKPSRAAENMAVEPRVATIKQRPSSRCFPAGSDMNSVYERQGIAVMTPTVPGSPKAPFLGIPRGTMRRQKSIGKKCGTPPQKLPLGFQTQP

SEQ ID NO: 6466 - protein, 1849 aa, Homo sapiens
MPRSPTSSEDEMAQSFSDYSVGSESDSSKEETIYDTIRATAEKPGGARTEESQGNTLVIRVVIHDLQQTKCIRFNPDATVWVAKQRILCTLTQSLKDVLNYGLFQPASNGRDGKFLDEERLLREYPQPVGEGVPSLEFRYKKRVYKQASLDEKQLAKLHTKTNLKKCMDHIQHRLVEKITKMLDRGLDPNFHDPETGETPLTLAAQLDDSVEVIKALKNGGAHLDFRAKDGMTALHKAARARNQVALKTLLELGASPDYKDSYGLTPLYHTAIVGGDPYCCELLLHEHATVCCKDENGWHEIHQACRYGHVQHLEHLLFYGADMSAQNASGNTALHICALYNQDSCARVLLFRGGNKELKNYNSQTPFQVAIIAGNFELAEYIKNHKETDIVPFREAPAYSNRRRRPPNTLAAPRVLLRSNSDNNLNASAPDWAVCSTATSHRSLSPQLLQQMPSKPEGAAKTIGSYVPGPRSRSPSLNRLGGAGEDGKRPQPLWHVGSPFALGANKDSLSAFEYPGPKRKLYSAVPGRLFVAVKPYQPQVDGEIPLHRGDRVKVLSIGEGGFWEGSARGHIGWFPAECVEEVQCKPRDSQAETRADRSKKLFRHYTVGSYDSFDTSSDCIIEEKTVVLQKKDNEGFGFVLRGAKADTPIEEFTPTPAFPALQYLESVDEGGVAWQAGLRTGDFLIEVNNENVVKVGHRQVVNMIRQGGNHLVLKVVTVTRNLDPDDTARKKAPPPPKRAPTTALTLRSKSMTSELEELVDKASVRKKKDKPEEIVPASKPSRAAENMAVEPRVATIKQRPSSRCFPAGSDMNSVYERQGIAVMTPTVPGSPKAPFLGIPRGTMRRQKSIDSRIFLSGITEEERQFLAPPMLKFTRSLSMPDTSEDIPPPPQSVPPSPPPPSPTTYNCPKSPTPRVYGTIKPAFNQNSAAKVSPATRSDTVATMMREKGMYFRRELDRYSLDSEDLYSRNAGPQANFRNKRGQMPENPYSEVGKIASKAVYVPAKPARRKGMLVKQSNVEDSPEKTCSIPIPTIIVKEPSTSSSGKSSQGSSMEIDPQAPEPPSQLRPDESLTVSSPFAAAIAGAVRDREKRLEARRNSPAFLSTDLGDEDVGLGPPAPRTRPSMFPEEGDFADEDSAEQLSSPMPSATPREPENHFVGGAEASAPGEAGRPLNSTSKAQGPESSPAVPSASSGTAGPGNYVHPLTGRLLDPSSPLALALSARDRAMKESQQGPKGEAPKADLNKPLYIDTKMRPSLDAGFPTVTRQNTRGPLRRQETENKYETDLGRDRKGDDKKNMLIDIMDTSQQKSAGLLMVHTVDATKLDNALQEEDEKAEVEMKPDSSPSEVPEGVSETEGALQISAAPEPTTVPGRTIVAVGSMEEAVILPFRIPPPPLASVDLDEDFIFTEPLPPPLEFANSFDIPDDRAASVPALSDLVKQKKSDTPQSPSLNSSQPTNSADSKKPASLSNCLPASFLPPPESFDAVADSGIEEVDSRSSSDHHLETTSTISTVSSISTLSSEGGENVDTCTVYADGQAFMVDKPPVPPKPKMKPIIHKSNALYQDALVEEDVDSFVIPPPAPPPPPGSAQPGMAKVLQPRTSKLWGDVTEIKSPILSGPKANVISELNSILQQMNREKLAKPGEGLDSPMGAKSASLAPRSPEIMSTISGTRSTTVTFTVRPGTSQPITLQSRPPDYESRTSGTRRAPSPVVSPTEMNKETLPAPLSAATASPSPALSDVFSLPSQPPSGDLFGLNPAGRSRSPSPSILQQPISNKPFTTKPVHLWTKPDVADWLESLNLGEHKEAFMDNEIDGSHLPNLQKEDLIDLGVTRVGHRMNIERALKQLLDR

SEQ ID NO: 6467 - protein, 1254 aa, Homo sapiens
MMMNVPGGGAAAVMMTGYNNGRCPRNSLYSDCIIEEKTVVLQKKDNEGFGFVLRGAKADTPIEEFTPTPAFPALQYLESVDEGGVAWQAGLRTGDFLIEVNNENVVKVGHRQVVNMIRQGGNHLVLKVVTVTRNLDPDDTARKKAPPPPKRAPTTALTLRSKSMTSELEELVDKDKPEEIVPASKPSRAAENMAVEPRVATIKQRPSSRCFPAGSDMNSVYERQGIAVMTPTVPGSPKAPFLGIPRGTMRRQKSIDSRIFLSGITEEERQFLAPPMLKFTRSLSMPDTSEDIPPPPQSVPPSPPPPSPTTYNCPKSPTPRVYGTIKPAFNQNSAAKVSPATRSDTVATMMREKGMYFRRELDRYSLDSEDLYSRNAGPQANFRNKRGQMPENPYSEVGKIASKAVYVPAKPARRKGMLVKQSNVEDSPEKTCSIPIPTIIVKEPSTSSSGKSSQGSSMEIDPQAPEPPSQLRPDESLTVSSPFAAAIAGAVRDREKRLEARRNSPAFLSTDLGDEDVGLGPPAPRTRPSMFPEEGDFADEDSAEQLSSPMPSATPREPENHFVGGAEASAPGEAGRPLNSTSKAQGPESSPAVPSASSGTAGPGNYVHPLTGRLLDPSSPLALALSARDRAMKESQQGPKGEAPKADLNKPLYIDTKMRPSLDAGFPTVTRQNTRGPLRRQETENKYETDLGRDRKGDDKKNMLIDIMDTSQQKSAGLLMVHTVDATKLDNALQEEDEKAEVEMKPDSSPSEVPEGVSETEGALQISAAPEPTTVPGRTIVAVGSMEEAVILPFRIPPPPLASVDLDEDFIFTEPLPPPLEFANSFDIPDDRAASVPALSDLVKQKKSDTPQSPSLNSSQPTNSADSKKPASLSNCLPASFLPPPESFDAVADSGIEEVDSRSSSDHHLETTSTISTVSSISTLSSEGGENVDTCTVYADGQAFMVDKPPVPPKPKMKPIIHKSNALYQDALVEEDVDSFVIPPPAPPPPPGSAQPGMAKVLQPRTSKLWGDVTEIKSPILSGPKANVISELNSILQQMNREKLAKPGEGLDSPMGAKSASLAPRSPEIMSTISGTRSTTVTFTVRPGTSQPITLQSRPPDYESRTSGTRRAPSPVVSPTEMNKETLPAPLSAATASPSPALSDVFSLPSQPPSGDLFGLNPAGRSRSPSPSILQQPISNKPFTTKPVHLWTKPDVADWLESLNLGEHKEAFMDNEIDGSHLPNLQKEDLIDLGVTRVGHRMNIERALKQLLDR

SEQ ID NO: 6468 - protein, 531 aa, Homo sapiens
MSGRGAGGFPLPPLSPGGGAVAAALGAPPPPAGPGMLPGPALRGPGPAGGVGGPGAAAFRPMGPAGPAAQYQRPGMSPGNRMPMAGLQVGPPAGSPFGAAAPLRPGMPPTMMDPFRKRLLVPQAQPPMPAQRRGLKRRKMADKVLPQRIRELVPESQAYMDLLAFERKLDQTIARKRMEIQEAIKKPLTQKRKLRIYISNTFSPSKAEGDSAGTAGTPGGTPAGDKVASWELRVEGKLLDDPSKQKRKFSSFFKSLVIELDKELYGPDNHLVEWHRMPTTQETDGFQVKRPGDLNVKCTLLLMLDHQPPQYKLDPRLARLLGVHTQTRAAIMQALWLYIKHNQLQDGHEREYINCNRYFRQIFSCGRLRFSEIPMKLAGLLQHPDPIVINHVISVDPNDQKKTACYDIDVEVDDPLKAQMSNFLASTTNQQEIASLDVKIHETIESINQLKTQRDFMLSFSTDPQDFIQEWLRSQRRDLKIITDVIGNPEEERRAAFYHQPWAQEAVGRHIFAKVQQRRQELEQVLGIRLT

SEQ ID NO: 6469 - protein, 510 aa, Homo sapiens
MSGRGAGGFPLPPLSPGGGAVAAALGAPPPPAGPGMLPGPALRGPGPAQYQRPGMSPGNRMPMARLAGGTPCWLPIWCSSSASTWHPTHHDGSIPKTPACAPAQPPMPAQRRGLKRRKMADKVLPQRIRELVPESQAYMDLLAFERKLDQTIARKRMEIQEAIKKPLTQKRKLRIYISNTFSPSKAEGDSAGTAGTPGGTPAGDKVASWELRVEGKLLDDPSKQKRKFSSFFKSLVIELDKELYGPDNHLVEWHRMPTTQETDGFQVKRPGDLNVKCTLLLMLDHQPPQYKLDPRLARLLGVHTQTRAAIMQALWLYIKHNQLQDGHEREYINCNRYFRQIFSCGRLRFSEIPMKLAGLLQHPDPIVINHVISVDPNDQKKTACYDIDVEVDDPLKAQMSNFLASTTNQQEIASLDVKIHETIESINQLKTQRDFMLSFSTDPQDFIQEWLRSQRRDLKIITDVIGNPEEERRAAFYHQPWAQEAVGRHIFAKVQQRRQELEQVLGIRLT

SEQ ID NO: 6470 - protein, 483 aa, Homo sapiens
MGRRVGVEVTPRWAPQKCQGARPQRPGMSPGNRMPMAGLQVGPPAGSPFGAAAPLRPGMPPTMMDPFRKRLLVPQAQPPMPAQRRGLKRRKMADKVLPQRIRELVPESQAYMDLLAFERKLDQTIARKRMEIQEAIKKPLTQKRKLRIYISNTFSPSKAEGDSAGTAGTPGGTPAGDKVASWELRVEGKLLDDPSKQKRKFSSFFKSLVIELDKELYGPDNHLVEWHRMPTTQETDGFQVKRPGDLNVKCTLLLMLDHQPPQYKLDPRLARLLGVHTQTRAAIMQALWLYIKHNQLQDGHEREYINCNRYFRQIFSCGRLRFSEIPMKLAGLLQHPDPIVINHVISVDPNDQKKTACYDIDVEVDDPLKAQMSNFLASTTNQQEIASLDVKIHETIESINQLKTQRDFMLSFSTDPQDFIQEWLRSQRRDLKIITDVIGNPEEERRAAFYHQPWAQEAVGRHIFAKVQQRRQELEQVLGIRLT

SEQ ID NO: 6471 - protein, 785 aa, Homo sapiens
MSDQDHSMDEMTAVVKIEKGVGGNNGGNGNGGGAFSQARSSSTGSSSSTGGGGQESQPSPLALLAATCSRIESPNENSNNSQGPSQSGGTGELDLTATQLSQGANGWQIISSSSGATPTSKEQSGSSTNGSNGSESSKNRTVSGGQYVVAAAPNLQNQQVLTGLPGVMPNIQYQVIPQFQTVDGQQLQFAATGAQVQQDGSGQIQIIPGANQQIITNRGSGGNIIAAMPNLLQQAVPLQGLANNVLSGQTQYVTNVPVALNGNITLLPVNSVSAATLTPSSQAVTISSSGSQESGSQPVTSGTTISSASLVSSQASSSSFFTNANSYSTTTTTSNMGIMNFTTSGSSGTNSQGQTPQRVSGLQGSDALNIQQNQTSGGSLQAGQQKEGEQNQQTQQQQILIQPQLVQGGQALQALQAAPLSGQTFTTQAISQETLQNLQLQAVPNSGPIIIRTPTVGPNGQVSWQTLQLQNLQVQNPQAQTITLAPMQGVSLGQTSSSNTTLTPIASAASIPAGTVTVNAAQLSSMPGLQTINLSALGTSGIQVHPIQGLPLAIANAPGDHGAQLGLHGAGGDGIHDDTAGGEEGENSPDAQPQAGRRTRREACTCPYCKDSEGRGSGDPGKKKQHICHIQGCGKVYGKTSHLRAHLRWHTGERPFMCTWSYCGKRFTRSDELQRHKRTHTGEKKFACPECPKRFMRSDHLSKHIKTHQNKKGGPGVALSVGTLPLDSGAGSEGSGTATPSALITTNMVAMEAICPEGIARLANSGINVMQVADLQSINISGNGF

SEQ ID NO: 6472 - protein, 778 aa, Homo sapiens
MDEMTAVVKIEKGVGGNNGGNGNGGGAFSQARSSSTGSSSSTGGGGQESQPSPLALLAATCSRIESPNENSNNSQGPSQSGGTGELDLTATQLSQGANGWQIISSSSGATPTSKEQSGSSTNGSNGSESSKNRTVSGGQYVVAAAPNLQNQQVLTGLPGVMPNIQYQVIPQFQTVDGQQLQFAATGAQVQQDGSGQIQIIPGANQQIITNRGSGGNIIAAMPNLLQQAVPLQGLANNVLSGQTQYVTNVPVALNGNITLLPVNSVSAATLTPSSQAVTISSSGSQESGSQPVTSGTTISSASLVSSQASSSSFFTNANSYSTTTTTSNMGIMNFTTSGSSGTNSQGQTPQRVSGLQGSDALNIQQNQTSGGSLQAGQQKEGEQNQQTQQQQILIQPQLVQGGQALQALQAAPLSGQTFTTQAISQETLQNLQLQAVPNSGPIIIRTPTVGPNGQVSWQTLQLQNLQVQNPQAQTITLAPMQGVSLGQTSSSNTTLTPIASAASIPAGTVTVNAAQLSSMPGLQTINLSALGTSGIQVHPIQGLPLAIANAPGDHGAQLGLHGAGGDGIHDDTAGGEEGENSPDAQPQAGRRTRREACTCPYCKDSEGRGSGDPGKKKQHICHIQGCGKVYGKTSHLRAHLRWHTGERPFMCTWSYCGKRFTRSDELQRHKRTHTGEKKFACPECPKRFMRSDHLSKHIKTHQNKKGGPGVALSVGTLPLDSGAGSEGSGTATPSALITTNMVAMEAICPEGIARLANSGINVMQVADLQSINISGNGF

SEQ ID NO: 6473 - protein, 737 aa, Homo sapiens
MSDQDHSMDEMTAVVKIEKGVGGNNGGNGNGGGAFSQARSSSTGSSSSTGGGGQGANGWQIISSSSGATPTSKEQSGSSTNGSNGSESSKNRTVSGGQYVVAAAPNLQNQQVLTGLPGVMPNIQYQVIPQFQTVDGQQLQFAATGAQVQQDGSGQIQIIPGANQQIITNRGSGGNIIAAMPNLLQQAVPLQGLANNVLSGQTQYVTNVPVALNGNITLLPVNSVSAATLTPSSQAVTISSSGSQESGSQPVTSGTTISSASLVSSQASSSSFFTNANSYSTTTTTSNMGIMNFTTSGSSGTNSQGQTPQRVSGLQGSDALNIQQNQTSGGSLQAGQQKEGEQNQQTQQQQILIQPQLVQGGQALQALQAAPLSGQTFTTQAISQETLQNLQLQAVPNSGPIIIRTPTVGPNGQVSWQTLQLQNLQVQNPQAQTITLAPMQGVSLGQTSSSNTTLTPIASAASIPAGTVTVNAAQLSSMPGLQTINLSALGTSGIQVHPIQGLPLAIANAPGDHGAQLGLHGAGGDGIHDDTAGGEEGENSPDAQPQAGRRTRREACTCPYCKDSEGRGSGDPGKKKQHICHIQGCGKVYGKTSHLRAHLRWHTGERPFMCTWSYCGKRFTRSDELQRHKRTHTGEKKFACPECPKRFMRSDHLSKHIKTHQNKKGGPGVALSVGTLPLDSGAGSEGSGTATPSALITTNMVAMEAICPEGIARLANSGINVMQVADLQSINISGNGF

SEQ ID NO: 6474 - protein, 582 aa, Homo sapiens
MTQGPGGRAPPAPPAPPEPEAPTTFCALLPRMPQWKFAAPGGFLGRGPAAARAAGASGGADPQPEPAGPGGVPALAAAVLGACEPRCAAPCPLPALSRCRGAGSRGSRGGRGAAGSGDAAAAAEWIRKGSFIHKPAHGWLHPDARVLGPGVSYVVRYMGCIEVLRSMRSLDFNTRTQVTREAINRLHEAVPGVRGSWKKKAPNKALASVLGKSNLRFAGMSISIHISTDGLSLSVPATRQVIANHHMPSISFASGGDTDMTDYVAYVAKDPINQRACHILECCEGLAQSIISTVGQAFELRFKQYLHSPPKVALPPERLAGPEESAWGDEEDSLEHNYYNSIPGKEPPLGGLVDSRLALTQPCALTALDQGPSPSLRDACSLPWDVGSTGTAPPGDGYVQADARGPPDHEEHLYVNTQGLDAPEPEDSPKKDLFDMRPFEDALKLHECSVAAGVTAAPLPLEDQWPSPPTRRAPVAPTEEQLRQEPWYHGRMSRRAAERMLRADGDFLVRDSVTNPGQYVLTGMHAGQPKHLLLVDPEGVVRTKDVLFESISHLIDHHLQNGQPIVAAESELHLRGVVSREP

SEQ ID NO: 6475 - protein, 840 aa, Homo sapiens
MDKALKEVFDYSYRDYILSWYGNLSRDEGQLYHLLLEDFWEIARQLHHRLSHVDVVKVVCNDVVRTLLTHFCDLKAANARHEEQPRPFVLHACLRNSDDEVRFLQTCSRVLVFCLLPSKDVQSLSLRIMLAEILTTKVLKPVVELLSNPDYINQMLLAQLAYREQMNEHHKRAYTYAPSYEDFIKLINSNSDVEFLKQLRYQIVVEIIQATTISSFPQLKRHKGKETAAMKADLLRARNMKRYINQLTVAKKQCEKRIRILGGPAYDQQEDGALDEGEGPQSQKILQFEDILANTFYREHFGMYMERMDKRALISFWESVEHLKNANKNEIPQLVGEIYQNFFVESKEISVEKSLYKEIQQCLVGNKGIEVFYKIQEDVYETLKDRYYPSFIVSDLYEKLLIKEEEKHASQMISNKDEMGPRDEAGEEAVDDGTNQINEQASFAVNKLRELNEKLEYKRQALNSIQNAPKPDKKIVSKLKDEIILIEKERTDLQLHMARTDWWCENLGMWKASITSGEVTEENGEQLPCYFVMVSLQEVGGVETKNWTVPRRLSEFQNLHRKLSECVPSLKKVQLPSLSKLPFKSIDQKFMEKSKNQLNKFLQNLLSDERLCQSEALYAFLSPSPDYLKVIDVQGKKNSFSLSSFLERLPRDFFSHQEEETEEDSDLSDYGDDVDGRKDALAEPCFMLIGEIFELRGMFKWVRRTLIALVQVTFGRTINKQIRDTVSWIFSEQMLVYYINIFRDAFWPNGKLAPPTTIRSKEQSQETKQRAQQKLLENIPDMLQSLVGQQNARHGIIKIFNALQETRANKHLLYALMELLLIELCPELRVHLDQLKAGQV

SEQ ID NO: 6476 - protein, 556 aa, Homo sapiens
MKADLLRARNMKRYINQLTVAKKQCEKRIRILGGPAYDQQEDGALDEGEGPQSQKILQFEDILANTFYREHFGMYMERMDKRALISFWESVEHLKNANKNEIPQLVGEIYQNFFVESKEISVEKSLYKEIQQCLVGNKGIEVFYKIQEDVYETLKDRYYPSFIVSDLYEKLLIKEEEKHASQMISNKDEMGPRDEAGEEAVDDGTNQINEQASFAVNKLRELNEKLEYKRQALNSIQNAPKPDKKIVSKLKDEIILIEKERTDLQLHMARTDWWCENLGMWKASITSGEVTEENGEQLPCYFVMVSLQEVGGVETKNWTVPRRLSEFQNLHRKLSECVPSLKKVQLPSLSKLPFKSIDQKFMEKSKNQLNKFLQEETEEDSDLSDYGDDVDGRKDALAEPCFMLIGEIFELRGMFKWVRRTLIALVQVTFGRTINKQIRDTVSWIFSEQMLVYYINIFRDAFWPNGKLAPPTTIRSKEQSQETKQRAQQKLLENIPDMLQSLVGQQNARHGIIKIFNALQETRANKHLLYALMELLLIELCPELRVHLDQLKAGQV

SEQ ID NO: 6477 - protein, 1233 aa, Homo sapiens
MGFLKLIEIENFKSYKGRQIIGPFQRFTAIIGPNGSGKSNLMDAISFVLGEKTSNLRVKTLRDLIHGAPVGKPAANRAFVSMVYSEEGAEDRTFARVIVGGSSEYKINNKVVQLHEYSEELEKLGILIKARNFLVFQGAVESIAMKNPKERTALFEEISRSGELAQEYDKRKKEMVKAEEDTQFNYHRKKNIAAERKEAKQEKEEADRYQRLKDEVVRAQVQLQLFKLYHNEVEIEKLNKELASKNKEIEKDKKRMDKVEDELKEKKKELGKMMREQQQIEKEIKEKDSELNQKRPQYIKAKENTSHKIKKLEAAKKSLQNAQKHYKKRKGDMDELEKEMLSVEKARQEFEERMEEESQSQGRDLTLEENQVKKYHRLKEEASKRAATLAQELEKFNRDQKADQDRLDLEERKKVETEAKIKQKLREIEENQKRIEKLEEYITTSKQSLEEQKKLEGELTEEVEMAKRRIDEINKELNQVMEQLGDARIDRQESSRQQRKAEIMESIKRLYPGSVYGRLIDLCQPTQKKYQIAVTKVLGKNMDAIIVDSEKTGRDCIQYIKEQRGEPETFLPLDYLEVKPTDEKLRELKGAKLVIDVIRYEPPHIKKALQYACGNALVCDNVEDARRIAFGGHQRHKTVALDGTLFQKSGVISGGASDLKAKARRWDEKAVDKLKEKKERLTEELKEQMKAKRKEAELRQVQSQAHGLQMRLKYSQSDLEQTKTRHLALNLQEKSKLESELANFGPRINDIKRIIQSREREMKDLKEKMNQVEDEVFEEFCREIGVRNIREFEEEKVKRQNEIAKKRLEFENQKTRLGIQLDFEKNQLKEDQDKVHMWEQTVKKDENEIEKLKKEEQRHMKIIDETMAQLQDLKNQHLAKKSEVNDKNHEMEEIRKKLGGANKEMTHLQKEVTAIETKLEQKRSDRHNLLQACKMQDIKLPLSKGTMDDISQEEGSSQGEDSVSGSQRISSIYAREALIEIDYGDLCEDLKDAQAEEEIKQEMNTLQQKLNEQQSVLQRIAAPNMKAMEKLESVRDKFQETSDEFEAARKRAKKAKQAFEQIKKERFDRFNACFESVATNIDEIYKALSRNSSAQAFLGPENPEEPYLDGINYNCVAPGKRFRPMDNLSGGEKTVAALALLFAIHSYKPAPFFVLDEIDAALDNTNIGKVANYIKEQSTCNFQAIVISLKEEFYTKAESLIGVYPEQGDCVISKVLTFDLTKYPDANPNPNEQ

SEQ ID NO: 6478 - protein, 671 aa, Homo sapiens
MASGGSGGVSVPALWSEVNRYGQNGDFTRALKTVNKILQINKDDVTALHCKVVCLIQNGSFKEALNVINTHTKVLANNSLSFEKAYCEYRLNRIENALKTIESANQQTDKLKELYGQVLYRLERYDECLAVYRDLVRNSQDDYDEERKTNLSAVVAAQSNWEKVVPENLGLQEGTHELCYNTACALIGQGQLNQAMKILQKAEDLCRRSLSEDTDGTEEDPQAELAIIHGQMAYILQLQGRTEEALQLYNQIIKLKPTDVGLLAVIANNIITINKDQNVFDSKKKVKLTNAEGVEFKLSKKQLQAIEFNKALLAMYTNQAEQCRKISASLQSQSPEHLLPVLIQAAQLCREKQHTKAIELLQEFSDQHPENAAEIKLTMAQLKISQGNISKACLILRSIEELKHKPGMVSALVTMYSHEEDIDSAIEVFTQAIQWYQNHQPKSPAHLSLIREAANFKLKYGRKKEAISDLQQLWKQNPKDIHTLAQLISAYSLVDPEKAKALSKHLPSSDSMSLKVDVEALENSAGATYIRKKGGKVTGDSQPKEQGQGDLKKKKKKKKGKLPKNYDPKVTPDPERWLPMRERSYYRGRKKGKKKDQIGKGTQGATAGASSELDASKTVSSPPTSPRPGSAATVSASTSNIIPPRHQKPAGAPATKKKQQQKKKKGGKGGW

SEQ ID NO: 6479 - protein, 610 aa, Homo sapiens
MASGGSGGVSVPALWSEVNRYGQNGDFTRALKTVNKILQINKDDVTALHCKVVCLIQNGSFKEALNVINTHTKVLANNSLSFEKAYCEYRLNRIENALKTIESANQQTDKLKELYGQVLYRLERYDECLAVYRDLVRNSQDDYDEERKTNLSAVVAAQSNWEKVVPENLGLQEGTHELCYNTACALIGQGQLNQAMKILQKAEDLCRRSLSEDTDQNVFDSKKKVKLTNAEGVEFKLSKKQLQAIEFNKALLAMYTNQAEQCRKISASLQSQSPEHLLPVLIQAAQLCREKQHTKAIELLQEFSDQHPENAAEIKLTMAQLKISQGNISKACLILRSIEELKHKPGMVSALVTMYSHEEDIDSAIEVFTQAIQWYQNHQPKSPAHLSLIREAANFKLKYGRKKEAISDLQQLWKQNPKDIHTLAQLISAYSLVDPEKAKALSKHLPSSDSMSLKVDVEALENSAGATYIRKKGGKVTGDSQPKEQGQGDLKKKKKKKKGKLPKNYDPKVTPDPERWLPMRERSYYRGRKKGKKKDQIGKGTQGATAGASSELDASKTVSSPPTSPRPGSAATVSASTSNIIPPRHQKPAGAPATKKKQQQKKKKGGKGGW

SEQ ID NO: 6480 - protein, 442 aa, Homo sapiens
MRRTRRPRFVLMNKMDDLNLHYRFLNWRRRIREIREVRAFRYQERFKHILVDGDTLSYHGNSGEVGCYVASRPLTKDSNYFEVSIVDSGVRGTIAVGLVPQYYSLDHQPGWLPDSVAYHADDGKLYNGRAKGRQFGSKCNSGDRIGCGIEPVSFDVQTAQIFFTKNGKRVGSTIMPMSPDGLFPAVGMHSLGEEVRLHLNAELGREDDSVMMVDSYEDEWGRLHDVRVCGTLLEYLGKGKSIVDVGLAQARHPLSTRSHYFEVEIVDPGEKCYIALGLARKDYPKNRHPGWSRGSVAYHADDGKIFHGSGVGDPFGPRCYKGDIMGCGIMFPRDYILDSEGDSDDSCDTVILSPTARAVRNVRNVMYLHQEGEEEEEEEEEEEDGEEIEPEHEGRKVVVFFTRNGKIIGKKDAVVPSGGFFPTIGMLSCGEKVKVDLHPLSG

SEQ ID NO: 6481 - protein, 207 aa, Homo sapiens
MALLFARSLRLCRWGAKRLGVASTEAQRGVSFKLEEKTAHSSLALFRDDMGVKYGLVGLEPTKVALNVERFREWAVVLADTAVTSGRHYWEVTVKRSQQFRIGVADVDMSRDSCIGVDDRSWVFTYAQRKWYTMLANEKAPVEGIGQPEKVGLLLEYEAQKLSLVDVSQVSVVHTLQTDFRGPVVPAFALWDGELLTHSGLEVPEGL

SEQ ID NO: 6482 - protein, 89 aa, Homo sapiens
MNSQQQKQPCTPPPQPQQQQVKQPCQPPPQEPCIPKTKEPCHPKVPEPCHPKVPEPCQPKVPEPCQPKVPEPCPSTVTPAPAQQKTKQK

SEQ ID NO: 6483 - protein, 315 aa, Homo sapiens
MEARAQSGNGSQPLLQTPRDGGRQRGEPDPRDALTQQVHVLSLDQIRAIRNTNEYTEGPTVVPRPGLKPAPRPSTQHKHERLHGLPEHRQPPRLQHSQVHSSARAPLSRSISTVSSGSRSSTRTSTSSSSSEQRLLGSSFSSGPVADGIIRVQPKSELKPGELKPLSKEDLGLHAYRCEDCGKCKCKECTYPRPLPSDWICDKQCLCSAQNVIDYGTCVCCVKGLFYHCSNDDEDNCADNPCSCSQSHCCTRWSAMGVMSLFLPCLWCYLPAKGCLKLCQGCYDRVNRPGCRCKNSNTVCCKVPTVPPRNFEKPT

SEQ ID NO: 6484 - protein, 3230 aa, Homo sapiens
MQSSPSPAHPQLPVLQTQMVSDGMTGSNPVSPASSSSPASSGAGGISPQHIAQDSSLDGPPGPPDGATVPLEGFSLSQAADLANKGPKWEKSHAEIAEQAKHEAEIETRIAELRKEGFWSLKRLPKVPEPPRPKGHWDYLCEEMQWLSADFAQERRWKRGVARKVVRMVIRHHEEQRQKEERARREEQAKLRRIASTMAKDVRQFWSNVEKVVQFKQQSRLEEKRKKALDLHLDFIVGQTEKYSDLLSQSLNQPLTSSKAGSSPCLGSSSAASSPPPPASRLDDEDGDFQPQEDEEEDDEETIEVEEQQEGNDAEAQRREIELLRREGELPLEELLRSLPPQLLEGPSSPSQTPSSHDSDTRDGPEEGAEEEPPQVLEIKPPPSAVTQRNKQPWHPDEDDEEFTANEEEAEDEEDTIAAEEQLEGEVDHAMELSELAREGELSMEELLQQYAGAYAPGSGSSEDEDEDEVDANSSDCEPEGPVEAEEPPQEDSSSQSDSVEDRSEDEEDEHSEEEETSGSSASEESESEESEDAQSQSQADEEEEDDDFGVEYLLARDEEQSEADAGSGPPTPGPTTLGPKKEITDIAAAAESLQPKGYTLATTQVKTPIPLLLRGQLREYQHIGLDWLVTMYEKKLNGILADEMGLGKTIQTISLLAHLACEKGNWGPHLIIVPTSVMLNWEMELKRWCPSFKILTYYGAQKERKLKRQGWTKPNAFHVCITSYKLVLQDHQAFRRKNWRYLILDEAQNIKNFKSQRWQSLLNFNSQRRLLLTGTPLQNSLMELWSLMHFLMPHVFQSHREFKEWFSNPLTGMIEGSQEYNEGLVKRLHKVLRPFLLRRVKVDVEKQMPKKYEHVIRCRLSKRQRCLYDDFMAQTTTKETLATGHFMSVINILMQLRKVCNHPNLFDPRPVTSPFITPGICFSTASLVLRATDVHPLQRIDMGRFDLIGLEGRVSRYEADTFLPRHRLSRRVLLEVATAPDPPPRPKPVKMKVNRMLQPVPKQEGRTVVVVNNPRAPLGPVPVRPPPGPELSAQPTPGPVPQVLPASLMVSASPAGPPLIPASRPPGPVLLPPLQPNSGSLPQVLPSPLGVLSGTSRPPTPTLSLKPTPPAPVRLSPAPPPGSSSLLKPLTVPPGYTFPPAAATTTSTTTATATTTAVPAPTPAPQRLILSPDMQARLPSGEVVSIGQLASLAQRPVANAGGSKPLTFQIQGNKLTLTGAQVRQLAVGQPRPLQRNVVHLVSAGGQHHLISQPAHVALIQAVAPTPGPTPVSVLPSSTPSTTPAPTGLSLPLAANQVPPTMVNNTGVVKIVVRQAPRDGLTPVPPLAPAPRPPSSGLPAVLNPRPTLTPGRLPTPTLGTARAPMPTPTLVRPLLKLVHSPSPEVSASAPGAAPLTISSPLHVPSSLPGPASSPMPIPNSSPLASPVSSTVSVPLSSSLPISVPTTLPAPASAPLTIPISAPLTVSASGPALLTSVTPPLAPVVPAAPGPPSLAPSGASPSASALTLGLATAPSLSSSQTPGHPLLLAPTSSHVPGLNSTVAPACSPVLVPASALASPFPSAPNPAPAQASLLAPASSASQALATPLAPMAAPQTAILAPSPAPPLAPLPVLAPSPGAAPVLASSQTPVPVMAPSSTPGTSLASASPVPAPTPVLAPSSTQTMLPAPVPSPLPSPASTQTLALAPALAPTLGGSSPSQTLSLGTGNPQGPFPTQTLSLTPASSLVPTPAQTLSLAPGPPLGPTQTLSLAPAPPLAPASPVGPAPAHTLTLAPASSSASLLAPASVQTLTLSPAPVPTLGPAAAQTLALAPASTQSPASQASSLVVSASGAAPLPVTMVSRLPVSKDEPDTLTLRSGPPSPPSTATSFGGPRPRRQPPPPPRSPFYLDSLEEKRKRQRSERLERIFQLSEAHGALAPVYGTEVLDFCTLPQPVASPIGPRSPGPSHPTFWTYTEAAHRAVLFPQQRLDQLSEIIERFIFVMPPVEAPPPSLHACHPPPWLAPRQAAFQEQLASELWPRARPLHRIVCNMRTQFPDLRLIQYDCGKLQTLAVLLRQLKAEGHRVLIFTQMTRMLDVLEQFLTYHGHLYLRLDGSTRVEQRQALMERFNADKRIFCFILSTRSGGVGVNLTGADTVVFYDSDWNPTMDAQAQDRCHRIGQTRDVHIYRLISERTVEENILKKANQKRMLGDMAIEGGNFTTAYFKQQTIRELFDMPLEEPSSSSVPSAPEEEEETVASKQTHILEQALCRAEDEEDIRAATQAKAEQVAELAEFNENDGFPAGEGEEAGRPGAEDEEMSRAEQEIAALVEQLTPIERYAMKFLEASLEEVSREELKQAEEQVEAARKDLDQAKEEVFRLPQEEEEGPGAGDESSCGTGGGTHRRSKKAKAPERPGTRVSERLRGARAETQGANHTPVISAHQTRSTTTPPRCSPARERVPRPAPRPRPTPASAPAAIPALVPVPVSAPVPISAPNPITILPVHILPSPPPPSQIPPCSSPACTPPPACTPPPAHTPPPAQTCLVTPSSPLLLGPPSVPISASVTNLPLGLRPEAELCAQALASPESLELASVASSETSSLSLVPPKDLLPVAVEILPVSEKNLSLTPSAPSLTLEAGSIPNGQEQEAPDSAEGTTLTVLPEGEELPLCVSESNGLELPPSAASDEPLQEPLEADRTSEELTEAKTPTSSPEKPQELVTAEVAAPSTSSSATSSPEGPSPARPPRRRTSADVEIRGQGTGRPGQPPGPKVLRKLPGRLVTVVEEKELVRRRRQQRGAASTLVPGVSETSASPGSPSVRSMSGPESSPPIGGPCEAAPSSSLPTPPQQPFIARRHIELGVTGGGSPENGDGALLAITPPAVKRRRGRPPKKNRSPADAGRGVDEAPSSTLKGKTNGADPVPGPETLIVADPVLEPQLIPGPQPLGPQPVHRPNPLLSPVEKRRRGRPPKARDLPIPGTISSAGDGNSESRTQPPPHPSPLTPLPPLLVCPTATVANTVTTVTISTSPPKRKRGRPPKNPPSPRPSQLPVLDRDSTSVLESCGLGRRRQPQGQGESEGSSSDEDGSRPLTRLARLRLEAEGMRGRKSGGSMVVAVIQDDLDLADSGPGGLELTPPVVSLTPKLRSTRLRPGSLVPPLETEKLPRKRAGAPVGGSPGLAKRGRLQPPSPLGPEGSVEESEAEASGEEEEGDGTPRRRPGPRRLVGTTNQGDQRILRSSAPPSLAGPAVSHRGRKAKT

SEQ ID NO: 6485 - protein, 3168 aa, Homo sapiens
MQSSPSPAHPQLPVLQTQMVSDGMTGSNPVSPASSSSPASSGAGGISPQHIAQDSSLDGPPGPPDGATVPLEGFSLSQAADLANKGPKWEKSHAEIAEQAKHEAEIETRIAELRKEGFWSLKRLPKVPEPPRPKGHWDYLCEEMQWLSADFAQERRWKRGVARKVVRMVIRHHEEQRQKEERARREEQAKLRRIASTMAKDVRQFWSNVEKVVQFKQQSRLEEKRKKALDLHLDFIVGQTEKYSDLLSQSLNQPLTSSKAGSSPCLGSSSAASSPPPPASRLDDEDGDFQPQEDEEEDDEETIEVEEQQEGNDAEAQRREIELLRREGELPLEELLRSLPPQLLEGPSSPSQTPSSHDSDTRDGPEEGAEEEPPQVLEIKPPPSAVTQRNKQPWHPDEDDEEFTANEEEAEDEEDTIAAEEQLEGEVDHAMELSELAREGELSMEELLQQYAGAYAPGSGSSEDEDEDEVDANSSDCEPEGPVEAEEPPQEDSSSQSDSVEDRSEDEEDEHSEEEETSGSSASEESESEESEDAQSQSQADEEEEDDDFGVEYLLARDEEQSEADAGSGPPTPGPTTLGPKKEITDIAAAAESLQPKGYTLATTQVKTPIPLLLRGQLREYQHIGLDWLVTMYEKKLNGILADEMGLGKTIQTISLLAHLACEKGNWGPHLIIVPTSVMLNWEMELKRWCPSFKILTYYGAQKERKLKRQGWTKPNAFHVCITSYKLVLQDHQAFRRKNWRYLILDEAQNIKNFKSQRWQSLLNFNSQRRLLLTGTPLQNSLMELWSLMHFLMPHVFQSHREFKEWFSNPLTGMIEGSQEYNEGLVKRLHKVLRPFLLRRVKVDVEKQMPKKYEHVIRCRLSKRQRCLYDDFMAQTTTKETLATGHFMSVINILMQLRKVCNHPNLFDPRPVTSPFITPGICFSTASLVLRATDVHPLQRIDMGRFDLIGLEGRVSRYEADTFLPRHRLSRRVLLEVATAPDPPPRPKPVKMKVNRMLQPVPKQEGRTVVVVNNPRAPLGPVPVRPPPGPELSAQPTPGPVPQVLPASLMVSASPAGPPLIPASRPPGPVLLPPLQPNSGSLPQVLPSPLGVLSGTSRPPTPTLSLKPTPPAPVRLSPAPPPGSSSLLKPLTVPPGYTFPPAAATTTSTTTATATTTAVPAPTPAPQRLILSPDMQARLPSGEVVSIGQLASLAQRPVANAGGSKPLTFQIQGNKLTLTGAQVRQLAVGQPRPLQMPPTMVNNTGVVKIVVRQAPRDGLTPVPPLAPAPRPPSSGLPAVLNPRPTLTPGRLPTPTLGTARAPMPTPTLVRPLLKLVHSPSPEVSASAPGAAPLTISSPLHVPSSLPGPASSPMPIPNSSPLASPVSSTVSVPLSSSLPISVPTTLPAPASAPLTIPISAPLTVSASGPALLTSVTPPLAPVVPAAPGPPSLAPSGASPSASALTLGLATAPSLSSSQTPGHPLLLAPTSSHVPGLNSTVAPACSPVLVPASALASPFPSAPNPAPAQASLLAPASSASQALATPLAPMAAPQTAILAPSPAPPLAPLPVLAPSPGAAPVLASSQTPVPVMAPSSTPGTSLASASPVPAPTPVLAPSSTQTMLPAPVPSPLPSPASTQTLALAPALAPTLGGSSPSQTLSLGTGNPQGPFPTQTLSLTPASSLVPTPAQTLSLAPGPPLGPTQTLSLAPAPPLAPASPVGPAPAHTLTLAPASSSASLLAPASVQTLTLSPAPVPTLGPAAAQTLALAPASTQSPASQASSLVVSASGAAPLPVTMVSRLPVSKDEPDTLTLRSGPPSPPSTATSFGGPRPRRQPPPPPRSPFYLDSLEEKRKRQRSERLERIFQLSEAHGALAPVYGTEVLDFCTLPQPVASPIGPRSPGPSHPTFWTYTEAAHRAVLFPQQRLDQLSEIIERFIFVMPPVEAPPPSLHACHPPPWLAPRQAAFQEQLASELWPRARPLHRIVCNMRTQFPDLRLIQYDCGKLQTLAVLLRQLKAEGHRVLIFTQMTRMLDVLEQFLTYHGHLYLRLDGSTRVEQRQALMERFNADKRIFCFILSTRSGGVGVNLTGADTVVFYDSDWNPTMDAQAQDRCHRIGQTRDVHIYRLISERTVEENILKKANQKRMLGDMAIEGGNFTTAYFKQQTIRELFDMPLEEPSSSSVPSAPEEEEETVASKQTHILEQALCRAEDEEDIRAATQAKAEQVAELAEFNENDGFPAGEGEEAGRPGAEDEEMSRAEQEIAALVEQLTPIERYAMKFLEASLEEVSREELKQAEEQVEAARKDLDQAKEEVFRLPQEEEEGPGAGDESSCGTGGGTHRRSKKAKAPERPGTRVSERLRGARAETQGANHTPVISAHQTRSTTTPPRCSPARERVPRPAPRPRPTPASAPAAIPALVPVPVSAPVPISAPNPITILPVHILPSPPPPSQIPPCSSPACTPPPACTPPPAHTPPPAQTCLVTPSSPLLLGPPSVPISASVTNLPLGLRPEAELCAQALASPESLELASVASSETSSLSLVPPKDLLPVAVEILPVSEKNLSLTPSAPSLTLEAGSIPNGQEQEAPDSAEGTTLTVLPEGEELPLCVSESNGLELPPSAASDEPLQEPLEADRTSEELTEAKTPTSSPEKPQELVTAEVAAPSTSSSATSSPEGPSPARPPRRRTSADVEIRGQGTGRPGQPPGPKVLRKLPGRLVTVVEEKELVRRRRQQRGAASTLVPGVSETSASPGSPSVRSMSGPESSPPIGGPCEAAPSSSLPTPPQQPFIARRHIELGVTGGGSPENGDGALLAITPPAVKRRRGRPPKKNRSPADAGRGVDEAPSSTLKGKTNGADPVPGPETLIVADPVLEPQLIPGPQPLGPQPVHRPNPLLSPVEKRRRGRPPKARDLPIPGTISSAGDGNSESRTQPPPHPSPLTPLPPLLVCPTATVANTVTTVTISTSPPKRKRGRPPKNPPSPRPSQLPVLDRDSTSVLESCGLGRRRQPQGQGESEGSSSDEDGSRPLTRLARLRLEAEGMRGRKSGGSMVVAVIQDDLDLADSGPGGLELTPPVVSLTPKLRSTRLRPGSLVPPLETEKLPRKRAGAPVGGSPGLAKRGRLQPPSPLGPEGSVEESEAEASGEEEEGDGTPRRRPGPRRLVGTTNQGDQRILRSSAPPSLAGPAVSHRGRKAKT

SEQ ID NO: 6486 - protein, 3072 aa, Homo sapiens
MQSSPSPAHPQLPVLQTQMVSDGMTGSNPVSPASSSSPASSGAGGISPQHIAQDSSLDGPPGPPDGATVPLEGFSLSQAADLANKGPKWEKSHAEIAEQAKHEAEIETRIAELRKEGFWSLKRLPKVPEPPRPKGHWDYLCEEMQWLSADFAQERRWKRGVARKVVRMVIRHHEEQRQKEERARREEQAKLRRIASTMAKDVRQFWSNVEKVVQFKQQSRLEEKRKKALDLHLDFIVGQTEKYSDLLSQSLNQPLTSSKAGSSPCLGSSSAASSPPPPASRLDDEDGDFQPQEDEEEDDEETIEVEEQQEGNDAEAQRREIELLRREGELPLEELLRSLPPQLLEGPSSPSQTPSSHDSDTRDGPEEGAEEEPPQVLEIKPPPSAVTQRNKQPWHPDEDDEEFTANEEEAEDEEDTIAAEEQLEGEVDHAMELSELAREGELSMEELLQQYAGAYAPGSGSSEDEDEDEVDANSSDCEPEGPVEAEEPPQEDSSSQSDSVEDRSEDEEDEHSEEEETSGSSASEESESEESEDAQSQSQADEEEEDDDFGVEYLLARDEEQSEADAGSGPPTPGPTTLGPKKEITDIAAAAESLQPKGYTLATTQVKTPIPLLLRGQLREYQHIGLDWLVTMYEKKLNGILADEMGLGKTIQTISLLAHLACEKGNWGPHLIIVPTSVMLNWEMELKRWCPSFKILTYYGAQKERKLKRQGWTKPNAFHVCITSYKLVLQDHQAFRRKNWRYLILDEAQNIKNFKSQRWQSLLNFNSQRRLLLTGTPLQNSLMELWSLMHFLMPHVFQSHREFKEWFSNPLTGMIEGSQEYNEGLVKRLHKVLRPFLLRRVKVDVEKQMPKKYEHVIRCRLSKRQRCLYDDFMAQTTTKETLATGHFMSVINILMQLRKVCNHPNLFDPRPVTSPFITPGICFSTASLVLRATDVHPLQRIDMGRFDLIGLEGRVSRYEADTFLPRHRLSRRVLLEVATAPDPPPRPKPVKMKVNRMLQPVPKQEGRTVVVVNNPRAPLGPVPVRPPPGPELSAQPTPGPVPQVLPASLMVSASPAGPPLIPASRPPGPVLLPPLQPNSGSLPQAGEVVSIGQLASLAQRPVANAGGSKPLTFQIQGNKLTLTGAQVRQLAVGQPRPLQMPPTMVNNTGVVKIVVRQAPRDGLTPVPPLAPAPRPPSSGLPAVLNPRPTLTPGRLPTPTLGTARAPMPTPTLVRPLLKLVHSPSPEVSASAPGAAPLTISSPLHVPSSLPGPASSPMPIPNSSPLASPVSSTVSVPLSSSLPISVPTTLPAPASAPLTIPISAPLTVSASGPALLTSVTPPLAPVVPAAPGPPSLAPSGASPSASALTLGLATAPSLSSSQTPGHPLLLAPTSSHVPGLNSTVAPACSPVLVPASALASPFPSAPNPAPAQASLLAPASSASQALATPLAPMAAPQTAILAPSPAPPLAPLPVLAPSPGAAPVLASSQTPVPVMAPSSTPGTSLASASPVPAPTPVLAPSSTQTMLPAPVPSPLPSPASTQTLALAPALAPTLGGSSPSQTLSLGTGNPQGPFPTQTLSLTPASSLVPTPAQTLSLAPGPPLGPTQTLSLAPAPPLAPASPVGPAPAHTLTLAPASSSASLLAPASVQTLTLSPAPVPTLGPAAAQTLALAPASTQSPASQASSLVVSASGAAPLPVTMVSRLPVSKDEPDTLTLRSGPPSPPSTATSFGGPRPRRQPPPPPRSPFYLDSLEEKRKRQRSERLERIFQLSEAHGALAPVYGTEVLDFCTLPQPVASPIGPRSPGPSHPTFWTYTEAAHRAVLFPQQRLDQLSEIIERFIFVMPPVEAPPPSLHACHPPPWLAPRQAAFQEQLASELWPRARPLHRIVCNMRTQFPDLRLIQYDCGKLQTLAVLLRQLKAEGHRVLIFTQMTRMLDVLEQFLTYHGHLYLRLDGSTRVEQRQALMERFNADKRIFCFILSTRSGGVGVNLTGADTVVFYDSDWNPTMDAQAQDRCHRIGQTRDVHIYRLISERTVEENILKKANQKRMLGDMAIEGGNFTTAYFKQQTIRELFDMPLEEPSSSSVPSAPEEEEETVASKQTHILEQALCRAEDEEDIRAATQAKAEQVAELAEFNENDGFPAGEGEEAGRPGAEDEEMSRAEQEIAALVEQLTPIERYAMKFLEASLEEVSREELKQAEEQVEAARKDLDQAKEEVFRLPQEEEEGPGAGDESSCGTGGGTHRRSKKAKAPERPGTRVSERLRGARAETQGANHTPVISAHQTRSTTTPPRCSPARERVPRPAPRPRPTPASAPAAIPALVPVPVSAPVPISAPNPITILPVHILPSPPPPSQIPPCSSPACTPPPACTPPPAHTPPPAQTCLVTPSSPLLLGPPSVPISASVTNLPLGLRPEAELCAQALASPESLELASVASSETSSLSLVPPKDLLPVAVEILPVSEKNLSLTPSAPSLTLEAGSIPNGQEQEAPDSAEGTTLTVLPEGEELPLCVSESNGLELPPSAASDEPLQEPLEADRTSEELTEAKTPTSSPEKPQELVTAEVAAPSTSSSATSSPEGPSPARPPRRRTSADVEIRGQGTGRPGQPPGPKVLRKLPGRLVTVVEEKELVRRRRQQRGAASTLVPGVSETSASPGSPSVRSMSGPESSPPIGGPCEAAPSSSLPTPPQQPFIARRHIELGVTGGGSPENGDGALLAITPPAVKRRRGRPPKKNRSPADAGRGVDEAPSSTLKGKTNGADPVPGPETLIVADPVLEPQLIPGPQPLGPQPVHRPNPLLSPVEKRRRGRPPKARDLPIPGTISSAGDGNSESRTQPPPHPSPLTPLPPLLVCPTATVANTVTTVTISTSPPKRKRGRPPKNPPSPRPSQLPVLDRDSTSVLESCGLGRRRQPQGQGESEGSSSDEDGSRPLTRLARLRLEAEGMRGRKSGGSMVVAVIQDDLDLADSGPGGLELTPPVVSLTPKLRSTRLRPGSLVPPLETEKLPRKRAGAPVGGSPGLAKRGRLQPPSPLGPEGSVEESEAEASGEEEEGDGTPRRRPGPRRLVGTTNQGDQRILRSSAPPSLAGPAVSHRGRKAKT

SEQ ID NO: 6487 - protein, 490 aa, Homo sapiens
MESISMMGSPKSLSETFLPNGINGIKDARKVTVGVIGSGDFAKSLTIRLIRCGYHVVIGSRNPKFASEFFPHVVDVTHHEDALTKTNIIFVAIHREHYTSLWDLRHLLVGKILIDVSNNMRINQYPESNAEYLASLFPDSLIVKGFNVVSAWALQLGPKDASRQVYICSNNIQARQQVIELARQLNFIPIDLGSLSSAREIENLPLRLFTLWRGPVVVAISLATFFFLYSFVRDVIHPYARNQQSDFYKIPIEIVNKTLPIVAITLLSLVYLAGLLAAAYQLYYGTKYRRFPPWLETWLQCRKQLGLLSFFFAMVHVAYSLCLPMRRSERYLFLNMAYQQVHANIENSWNEEEVWRIEMYISFGIMSLGLLSLLAVTSIPSVSNALNWREFSFIQSTLGYVALLISTFHVLIYGWKRAFEEEYYRFYTPPNFVLALVLPSIVILGKIILFLPCISRKLKRIKKGWEKSQFLEEGMGGTIPHVSPERVTVM

SEQ ID NO: 6488 - protein, 454 aa, Homo sapiens
MESISMMGSPKSLSETFLPNGINGIKDARKVTVGVIGSGDFAKSLTIRLIRCGYHVVIGSRNPKFASEFFPHVVDVTHHEDALTKTNIIFVAIHREHYTSLWDLRHLLVGKILIDVSNNMRINQYPESNAEYLASLFPDSLIVKGFNVVSAWALQLGPKDASRQVYICSNNIQARQQVIELARQLNFIPIDLGSLSSAREIENLPLRLFTLWRGPVVVAISLATFFFLYSFVRDVIHPYARNQQSDFYKIPIEIVNKTLPIVAITLLSLVYLAGLLAAAYQLYYGTKYRRFPPWLETWLQCRKQLGLLSFFFAMVHVAYSLCLPMRRSERYLFLNMAYQQVHANIENSWNEEEVWRIEMYISFGIMSLGLLSLLAVTSIPSVSNALNWREFSFIQSTLGYVALLISTFHVLIYGWKRAFEEEYYRFYTPPNFVLALVLPSIVILDLLQLCRYPD

SEQ ID NO: 6489 - protein, 419 aa, Homo sapiens
MESISMMGSPKSLSETFLPNGINGIKDARKVTVGVIGSGDFAKSLTIRLIRCGYHVVIGSRNPKFASEFFPHVVDVTHHEDALTKTNIIFVAIHREHYTSLWDLRHLLVGKILIDVSNNMRINQYPESNAEYLASLFPDSLIVKGFNVVSAWALQLGPKDASRQVYICSNNIQARQQVIELARQLNFIPIDLGSLSSAREIENLPLRLFTLWRGPVVVAISLATFFFLYSFVRDVIHPYARNQQSDFYKIPIEIVNKTLPIVAITLLSLVYLAGLLAAAYQLYYGTKYRRFPPWLETWLQCRKQLGLLSFFFAMVHVAYSLCLPMRRSERYLFLNMAYQQVHANIENSWNEEEVWRIEMYISFGIMSLGLLSLLAVTSIPSVSNALNWREFSFIQIFCSFADTQTELELEFVFLLTLLL

SEQ ID NO: 6490 - protein, 418 aa, Homo sapiens
MTEETHPDDDSYIVRVKAVVMTRDDSSGGWFPQEGGGISRVGVCKVMHPEGNGRSGFLIHGERQKDKLVVLECYVRKDLVYTKANPTFHHWKVDNRKFGLTFQSPADARAFDRGVRKAIEDLIEGSTTSSSTIHNEAELGDDDVFTTATDSSSNSSQKREQPTRTISSPTSCEHRRIYTLGHLHDSYPTDHYHLDQPMPRPYRQVSFPDDDEEIVRINPREKIWMTGYEDYRHAPVRGKYPDPSEDADSSYVRFAKGEVPKHDYNYPYVDSSDFGLGEDPKGRGGSVIKTQPSRGKSRRRKEDGERSRCVYCRDMFNHEENRRGHCQDAPDSVRTCIRRVSCMWCADSMLYHCMSDPEGDYTDPCSCDTSDEKFCLRWMALIALSFLAPCMCCYLPLRACYHCGVMCRCCGGKHKAAA

SEQ ID NO: 6491 - protein, 415 aa, Homo sapiens
MASPGSDSYIVRVKAVVMTRDDSSGGWFPQEGGGISRVGVCKVMHPEGNGRSGFLIHGERQKDKLVVLECYVRKDLVYTKANPTFHHWKVDNRKFGLTFQSPADARAFDRGVRKAIEDLIEGSTTSSSTIHNEAELGDDDVFTTATDSSSNSSQKREQPTRTISSPTSCEHRRIYTLGHLHDSYPTDHYHLDQPMPRPYRQVSFPDDDEEIVRINPREKIWMTGYEDYRHAPVRGKYPDPSEDADSSYVRFAKGEVPKHDYNYPYVDSSDFGLGEDPKGRGGSVIKTQPSRGKSRRRKEDGERSRCVYCRDMFNHEENRRGHCQDAPDSVRTCIRRVSCMWCADSMLYHCMSDPEGDYTDPCSCDTSDEKFCLRWMALIALSFLAPCMCCYLPLRACYHCGVMCRCCGGKHKAAA

SEQ ID NO: 6492 - protein, 473 aa, Homo sapiens
MRALVLLGCLLASLLFSGQAEETEDANEEAPLRDRSHIEKTLMLNEDKPSDDYSAVLQRLRKIYHSSIKPLEQSYKYNELRQHEITDGEITSKPMVLFLGPWSVGKSTMINYLLGLENTRYQLYTGAEPTTSEFTVLMHGPKLKTIEGIVMAADSARSFSPLEKFGQNFLEKLIGIEVPHKLLERVTFVDTPGIIENRKQQERGYPFNDVCQWFIDRADLIFVVFDPTKLDVGLELEMLFRQLKGRESQIRIILNKADNLATQMLMRVYGALFWSLAPLINVTEPPRVYVSSFWPQEYKPDTHQELFLQEEISLLEDLNQVIENRLENKIAFIRQHAIRVRIHALLVDRYLQTYKDKMTFFSDGELVFKDIVEDPDKFYIFKTILAKTNVSKFDLPNREAYKDFFGINPISSFKLLSQQCSYMGGCFLEKIERAITQELPGLLGSLGLGKNPGALNCDKTGCSETPKNRYRKH

SEQ ID NO: 6493 - protein, 932 aa, Homo sapiens
MRALVLLGCLLASLLFSGQAELQVSASGGTEDVGNLLENHFSAGDASLEEKERALYADTAPQDKKLLLHYPDGREAESPKKTPASAASAGPDPEASLSNASATESPPPGERDDRDAAGPGEEKNGPPVASALPPGGAKGPVEEEWPEPSSGEGQGEEETGFGLPTEGTASGEAGGQAGGHELPEEVQEVQGDSLVQGAVAGTAEPKAEGASPHSEGDGVGPLNAEAEGSPGPGEEPAVPEGAPDVAAVGGESEPDIDTQASEGTEDQGEPGPAAEASAEPGGAQSVKAGDTEESQAPEMTEEDADEASSEEESGDGSGSEEEGGVPSEEESEEDSGDGASSEEAEGASEEATEPQEAGEPQEAREPQEGGDLQEAEESQEGGDPQEAEEPQEGGAPQEGGEPQEGGDPQEAREPQEAREPQEGAELPEATGTTSHRDRGAQPGPEELNTESMGSETLDMKAEEPEEGHQGRESPIIVAQEETEDANEEAPLRDRSHIEKTLMLNEDKPSDDYSAVLQRLRKIYHSSIKPLEQSYKYNELRQHEITDGEITSKPMVLFLGPWSVGKSTMINYLLGLENTRYQLYTGAEPTTSEFTVLMHGPKLKTIEGIVMAADSARSFSPLEKFGQNFLEKLIGIEVPHKLLERVTFVDTPGIIENRKQQERGYPFNDVCQWFIDRADLIFVVFDPTKLDVGLELEMLFRQLKGRESQIRIILNKADNLATQMLMRVYGALFWSLAPLINVTEPPRVYVSSFWPQEYKPDTHQELFLQEEISLLEDLNQVIENRLENKIAFIRQHAIRVRIHALLVDRYLQTYKDKMTFFSDGELVFKDIVEDPDKFYIFKTILAKTNVSKFDLPNREAYKDFFGINPISSFKLLSQQCSYMGGCFLEKIERAITQELPGLLGSLGLGKNPGALNCDKTGCSETPKNRYRKH

SEQ ID NO: 6494 - protein, 431 aa, Homo sapiens
MLNEDKPSDDYSAVLQRLRKIYHSSIKPLEQSYKYNELRQHEITDGEITSKPMVLFLGPWSVGKSTMINYLLGLENTRYQLYTGAEPTTSEFTVLMHGPKLKTIEGIVMAADSARSFSPLEKFGQNFLEKLIGIEVPHKLLERVTFVDTPGIIENRKQQERGYPFNDVCQWFIDRADLIFVVFDPTKLDVGLELEMLFRQLKGRESQIRIILNKADNLATQMLMRVYGALFWSLAPLINVTEPPRVYVSSFWPQEYKPDTHQELFLQEEISLLEDLNQVIENRLENKIAFIRQHAIRVRIHALLVDRYLQTYKDKMTFFSDGELVFKDIVEDPDKFYIFKTILAKTNVSKFDLPNREAYKDFFGINPISSFKLLSQQCSYMGGCFLEKIERAITQELPGLLGSLGLGKNPGALNCDKTGCSETPKNRYRKH

SEQ ID NO: 6495 - protein, 136 aa, Homo sapiens
MVLLESEQFLTELTRLFQKCRTSGSVYITLKKYDGRTKPIPKKGTVEGFEPADNKCLLRATDGKKKISTVVSSKEVNKFQMAYSNLLRANMDGLKKRDKKNKTKKTKAAAAAAAAAPAAAATAPTTAATTAATAAQ

SEQ ID NO: 6496 - protein, 3267 aa, Homo sapiens
MQKARGTRGEDAGTRAPPSPGVPPKRAKVGAGGGAPVAVAGAPVFLRPLKNAAVCAGSDVRLRVVVSGTPQPSLRWFRDGQLLPAPAPEPSCLWLRRCGAQDAGVYSCMAQNERGRASCEAVLTVLEVGDSETAEDDISDVQGTQRLELRDDGAFSTPTGGSDTLVGTSLDTPPTSVTGTSEEQVSWWGSGQTVLEQEAGSGGGTRRLPGSPRQAQATGAGPRHLGVEPLVRASRANLVGASWGSEDSLSVASDLYGSAFSLYRGRALSIHVSVPQSGLRREEPDLQPQLASEAPRRPAQPPPSKSALLPPPSPRVGKRSPPGPPAQPAATPTSPHRRTQEPVLPEDTTTEEKRGKKSKSSGPSLAGTAESRPQTPLSEASGRLSALGRSPRLVRAGSRILDKLQFFEERRRSLERSDSPPAPLRPWVPLRKARSLEQPKSERGAPWGTPGASQEELRAPGSVAERRRLFQQKAASLDERTRQRSPASDLELRFAQELGRIRRSTSREELVRSHESLRATLQRAPSPREPGEPPLFSRPSTPKTSRAVSPAAAQPPSPSSAEKPGDEPGRPRSRGPAGRTEPGEGPQQEVRRRDQFPLTRSRAIQECRSPVPPPAADPPEARTKAPPGRKREPPAQAVRFLPWATPGLEGAAVPQTLEKNRAGPEAEKRLRRGPEEDGPWGPWDRRGARSQGKGRRARPTSPELESSDDSYVSAGEEPLEAPVFEIPLQNVVVAPGADVLLKCIITANPPPQVSWHKDGSALRSEGRLLLRAEGERHTLLLREARAADAGSYMATATNELGQATCAASLTVRPGGSTSPFSSPITSDEEYLSPPEEFPEPGETWPRTPTMKPSPSQNRRSSDTGSKAPPTFKVSLMDQSVREGQDVIMSIRVQGEPKPVVSWLRNRQPVRPDQRRFAEEAEGGLCRLRILAAERGDAGFYTCKAVNEYGARQCEARLEVRAHPESRSLAVLAPLQDVDVGAGEMALFECLVAGPTDVEVDWLCRGRLLQPALLKCKMHFDGRKCKLLLTSVHEDDSGVYTCKLSTAKDELTCSARLTVRPSLAPLFTRLLEDVEVLEGRAARFDCKISGTPPPVVTWTHFGCPMEESENLRLRQDGGLHSLHIAHVGSEDEGLYAVSAVNTHGQAHCSAQLYVEEPRTAASGPSSKLEKMPSIPEEPEQGELERLSIPDFLRPLQDLEVGLAKEAMLECQVTGLPYPTISWFHNGHRIQSSDDRRMTQYRDVHRLVFPAVGPQHAGVYKSVIANKLGKAACYAHLYVTDVVPGPPDGAPQVVAVTGRMVTLTWNPPRSLDMAIDPDSLTYTVQHQVLGSDQWTALVTGLREPGWAATGLRKGVQHIFRVLSTTVKSSSKPSPPSEPVQLLEHGPTLEEAPAMLDKPDIVYVVEGQPASVTVTFNHVEAQVVWRSCRGALLEARAGVYELSQPDDDQYCLRICRVSRRDMGALTCTARNRHGTQTCSVTLELAEAPRFESIMEDVEVGAGETARFAVVVEGKPLPDIMWYKDEVLLTESSHVSFVYEENECSLVVLSTGAQDGGVYTCTAQNLAGEVSCKAELAVHSAQTAMEVEGVGEDEDHRGRRLSDFYDIHQEIGRGAFSYLRRIVERSSGLEFAAKFIPSQAKPKASARREARLLARLQHDCVLYFHEAFERRRGLVIVTELCTEELLERIARKPTVCESEIRAYMRQVLEGIHYLHQSHVLHLDVKPENLLVWDGAAGEQQVRICDFGNAQELTPGEPQYCQYGTPEFVAPEIVNQSPVSGVTDIWPVGVVAFLCLTGISPFVGENDRTTLMNIRNYNVAFEETTFLSLSREARGFLIKVLVQDRLRPTAEETLEHPWFKTQAKGAEVSTDHLKLFLSRRRWQRSQISYKCHLVLRPIPELLRAPPERVWVTMPRRPPPSGGLSSSSDSEEEELEELPSVPRPLQPEFSGSRVSLTDIPTEDEALGTPETGAATPMDWQEQGRAPSQDQEAPSPEALPSPGQEPAAGASPRRGELRRGSSAESALPRAGPRELGRGLHKAASVELPQRRSPSPGATRLARGGLGEGEYAQRLQALRQRLLRGGPEDGKVSGLRGPLLESLGGRARDPRMARAASSEAAPHHQPPLENRGLQKSSSFSQGEAEPRGRHRRAGAPLEIPVARLGARRLQESPSLSALSEAQPSSPARPSAPKPSTPKSAEPSATTPSDAPQPPAPQPAQDKAPEPRPEPVRASKPAPPPQALQTLALPLTPYAQIIQSLQLSGHAQGPSQGPAAPPSEPKPHAAVFARVASPPPGAPEKRVPSAGGPPVLAEKARVPTVPPRPGSSLSSSIENLESEAVFEAKFKRSRESPLSLGLRLLSRSRSEERGPFRGAEEEDGIYRPSPAGTPLELVRRPERSRSVQDLRAVGEPGLVRRLSLSLSQRLRRTPPAQRHPAWEARGGDGESSEGGSSARGSPVLAMRRRLSFTLERLSSRLQRSGSSEDSGGASGRSTPLFGRLRRATSEGESLRRLGLPHNQLAAQAGATTPSAESLGSEASATSGSSAPGESRSRLRWGFSRPRKDKGLSPPNLSASVQEELGHQYVRSESDFPPVFHIKLKDQVLLEGEAATLLCLPAACPAPHISWMKDKKSLRSEPSVIIVSCKDGRQLLSIPRAGKRHAGLYECSATNVLGSITSSCTVAVARVPGKLAPPEVPQTYQDTALVLWKPGDSRAPCTYTLERRVDGESVWHPVSSGIPDCYYNVTHLPVGVTVRFRVACANRAGQGPFSNSSEKVFVRGTQDSSAVPSAAHQEAPVTSRPARARPPDSPTSLAPPLAPAAPTPPSVTVSPSSPPTPPSQALSSLKAVGPPPQTPPRRHRGLQAARPAEPTLPSTHVTPSEPKPFVLDTGTPIPASTPQGVKPVSSSTPVYVVTSFVSAPPAPEPPAPEPPPEPTKVTVQSLSPAKEVVSSPGSSPRSSPRPEGTTLRQGPPQKPYTFLEEKARGRFGVVRACRENATGRTFVAKIVPYAAEGKRRVLQEYEVLRTLHHERIMSLHEAYITPRYLVLIAESCGNRELLCGLSDRFRYSEDDVATYMVQLLQGLDYLHGHHVLHLDIKPDNLLLAPDNALKIVDFGSAQPYNPQALRPLGHRTGTLEFMAPEMVKGEPIGSATDIWGAGVLTYIMLSGRSPFYEPDPQETEARIVGGRFDAFQLYPNTSQSATLFLRKVLSVHPWSRPSLQDCLAHPWLQDAYLMKLRRQTLTFTTNRLKEFLGEQRRRRAEAATRHKVLLRSYPGGP

SEQ ID NO: 6497 - protein, 170 aa, Homo sapiens
MATATNELGQATCAASLTVRPGGSTSPFSSPITSDEEYLSPPEEFPEPGETWPRTPTMKPSPSQNRRSSDTGSKAPPTFKVSLMDQSVREGQDVIMSIRVQGEPKPVVSWLRNRQPVRPDQRRFAEEAEGGLCRLRILAAERGDAGFYTCKAVNEYGARQCEARLEVRGE

SEQ ID NO: 6498 - protein, 113 aa, Homo sapiens
MKPSPSQNRRSSDTGSKAPPTFKVSLMDQSVREGQDVIMSIRVQGEPKPVVSWLRNRQPVRPDQRRFAEEAEGGLCRLRILAAERGDAGFYTCKAVNEYGARQCEARLEVRGE

SEQ ID NO: 6499 - protein, 3223 aa, Homo sapiens
MQKARGTRGEDAGTRAPPSPGVPPKRAKVGAGGGAPVAVAGAPVFLRPLKNAAVCAGSDVRLRVVVSGTPQPSLRWFRDGQLLPAPAPEPSCLWLRRCGAQDAGVYSCMAQNERGRASCEAVLTVLEVGDSETAEDDISDVQGTQRLELRDDGAFSTPTGGSDTLVGTSLDTPPTSVTGTSEEQVSWWGSGQTVLEQEAGSGGGTRRLPGSPRQAQATGAGPRHLGVEPLVRASRANLVGASWGSEDSLSVASDLYGSAFSLYRGRALSIHVSVPQSGLRREEPDLQPQLASEAPRRPAQPPPSKSALLPPPSPRVGKRSPPGPPAQPAATPTSPHRRTQEPVLPEDTTTEEKRGKKSKSSGPSLAGTAESRPQTPLSEASGRLSALGRSPRLVRAGSRILDKLQFFEERRRSLERSDSPPAPLRPWVPLRKARSLEQPKSERGAPWGTPGASQEELRAPGSVAERRRLFQQKAASLDERTRQRSPASDLELRFAQELGRIRRSTSREELVRSHESLRATLQRAPSPREPGEPPLFSRPSTPKTSRAVSPAAAQPPSPSSAEKPGDEPGRPRSRGPAGRTEPGEGPQQEVRRRDQFPLTRSRAIQECRSPVPPPAADPPEARTKAPPGRKREPPAQAVRFLPWATPGLEGAAVPQTLEKNRAGPEAEKRLRRGPEEDGPWGPWDRRGARSQGKGRRARPTSPELESSDDSYVSAGEEPLEAPVFEIPLQNVVVAPGADVLLKCIITANPPPQVSWHKDGSALRSEGRLLLRAEGERHTLLLREARAADAGSYMATATNELGQATCAASLTVRPGGSTSPFSSPITSDEEYLSPPEEFPEPGETWPRTPTMKPSPSQNRRSSDTGSKAPPTFKVSLMDQSVREGQDVIMSIRVQGEPKPVVSWLRNRQPVRPDQRRFAEEAEGGLCRLRILAAERGDAGFYTCKAVNEYGARQCEARLEVRAHPESRSLAVLAPLQDVDVGAGEMALFECLVAGPTDVEVDWLCRGRLLQPALLKCKMHFDGRKCKLLLTSVHEDDSGVYTCKLSTAKDELTCSARLTVRPSLAPLFTRLLEDVEVLEGRAARFDCKISGTPPPVVTWTHFGCPMEESENLRLRQDGGLHSLHIAHVGSEDEGLYAVSAVNTHGQAHCSAQLYVEEPRTAASGPSSKLEKMPSIPEEPEQGELERLSIPDFLRPLQDLEVGLAKEAMLECQVTGLPYPTISWFHNGHRIQSSDDRRMTQYRDVHRLVFPAVGPQHAGVYKSVIANKLGKAACYAHLYVTDVVPGPPDGAPQVVAVTGRMVTLTWNPPRSLDMAIDPDSLTYTVQHQVLGSDQWTALVTGLREPGWAATGLRKGVQHIFRVLSTTVKSSSKPSPPSEPVQLLEHGPTLEEAPAMLDKPDIVYVVEGQPASVTVTFNHVEAQVVWRSCRGALLEARAGVYELSQPDDDQYCLRICRVSRRDMGALTCTARNRHGTQTCSVTLELAEAPRFESIMEDVEVGAGETARFAVVVEGKPLPDIMWYKDEVLLTESSHVSFVYEENECSLVVLSTGAQDGGVYTCTAQNLAGEVSCKAELAVHSAQTAMEVEGVGEDEDHRGRRLSDFYDIHQEIGRGAFSYLRRIVERSSGLEFAAKFIPSQAKPKASARREARLLARLQHDCVLYFHEAFERRRGLVIVTELCTEELLERIARKPTVCESEIRAYMRQVLEGIHYLHQSHVLHLDVKPENLLVWDGAAGEQQVRICDFGNAQELTPGEPQYCQYGTPEFVAPEIVNQSPVSGVTDIWPVGVVAFLCLTGISPFVGENDRTTLMNIRNYNVAFEETTFLSLSREARGFLIKVLVQDRLRPTAEETLEHPWFKTQAKGAEVSTDHLKLFLSRRRWQRSQISYKCHLVLRPIPELLRAPPERVWVTMPRRPPPSGGLSSSSDSEEEELEELPSVPRPLQPEFSGSRVSLTDIPTEDEALGTPETGAATPMDWQEQGRAPSQDQEAPSPEALPSPGQEPAAGASPRRGELRRGSSAESALPRAGPRELGRGLHKAASVELPQRRSPSPGATRLARGGLGEGEYAQRLQALRQRLLRGGPEDGKVSGLRGPLLESLGGRARDPRMARAASSEAAPHHQPPLENRGLQKSSSFSQGEAEPRGRHRRAGAPLEIPVARLGARRLQESPSLSALSEAQPSSPARPSAPKPSTPKSAEPSATTPSDAPQPPAPQPAQDKAPEPRPEPVRASKPAPPPQALQTLALPLTPYAQIIQSLQLSGHAQGPSQGPAAPPSEPKPHAAVFARVASPPPGAPEKRVPSAGGPPVLAEKARVPTVPPRPGSSLSSSIENLESEAVFEAKFKRSRESPLSLGLRLLSRSRSEERGPFRGAEEEDGIYRPSPAGTPLELVRRPERSRSVQDLRAVGEPGLVRRLSLSLSQRLRRTPPAQRHPAWEARGGDGESSEGGSSARGSPVLAMRRRLSFTLERLSSRLQRSGSSEDSGGASGRSTPLFGRLRRATSEGESLRRLGLPHNQLAAQAGATTPSAESLGSEASATSGSSAPGESRSRLRWGFSRPRKDKGLSPPNLSASVQEELGHQYVRSESDFPPVFHIKLKDQVLLEGEAATLLCLPAACPAPHISWMKDKKSLRSEPSVIIVSCKDGRQLLSIPRAGKRHAGLYECSATNVLGSITSSCTVAVARVPGKLAPPEVPQTYQDTALVLWKPGDSRAPCTYTLERRVDGESVWHPVSSGIPDCYYNVTHLPVGVTVRFRVACANRAGQGPFSNSSEKVFVRGTQDSSAVPSAAHQEAPVTSRPARARPPDSPTSLAPPLAPAAPTPPSVTVSPSSPPTPPSQALSSLKAVGPPPQTPPRRHRGLQAARPAEPTLPSTHVTPSEPKPFVLDTGTPIPASTPQGVKPVSSSTPVYVVTSFVSAPPAPEPPAPEPPPEPTKVTVQSLSPAKEVVSSPGSSPRSSPRPEGTTLRQGPPQKPYTFLEEKARGRFGVVRACRENATGRTFVAKIVPYAAEGKRRVLQEYEVLRTLHHERIMSLHEAYITPRYLVLIAESCGNRELLCGLSDRFRYSEDDVATYMVQLLQGLDYLHGHHVLHLDIKPDNLLLAPDNALKIVDFGSAQPYNPQALRPLGHRTGTLEFMAPEMVKGEPIGSATDIWGAGVLTYIMLSGRSPFYEPDPQETEARIVGGRFDAFQLYPNTSQSATLFLRKVLSVHPWSRPSSCLSVCHKEIKMASS

SEQ ID NO: 6500 - protein, 1093 aa, Homo sapiens
MGTGDFICISMTGGAPWGFRLQGGKEQKQPLQVAKIRNQSKASGSGLCEGDEVVSINGNPCADLTYPEVIKLMESITDSLQMLIKRPSSGISEALISENENKNLEHLTHGGYVESTTLQIRPATKTQCTEFFLAPVKTEVPLAENQRSGPDCAGSLKEETGPSYQRAPQMPDSQRGRVAEELILREKVEAVQPGPVVELQLSLSQERHKGASGPLVALPGAEKSKSPDPDPNLSHDRIVHINSIPTNEKADPFLRSSKIIQISSGRELRVIQESEAGDAGLPRVEVILDCSDRQKTEGCRLQAGKECVDSPVEGGQSEAPPSLVSFAVSSEGTEQGEDPRSEKDHSRPHKHRARHARLRRSESLSEKQVKEAKSKCKSIALLLTDAPNPNSKGVLMFKKRRRRARKYTLVSYGTGELEREADEEEEGDKEDTCEVAFLGASESEVDEELLSDVDDNTQVVNFDWDSGLVDIEKKLNRGDKMEMLPDTTGKGALMFAKRRERMDQITAQKEEDKVGGTPSREQDAAQTDGLRTTTSYQRKEEESVRTQSSVSKSYIEVSHGLGHVPQQNGFSGTSETANIQRMVPMNRTAKPFPGSVNQPATPFSPTRNMTSPIADFPAPPPYSAVTPPPDAFSRGVSSPIAGPAQPPPWPQPAPWSQPAFYDSSERIASRDERISVPAKRTGILQEAKRRSTTKPMFTFKEPKVSPNPELLSLLQNSEGKRGTGAGGDSGPEEDYLSLGAEACNFMQSSSAKQKTPPPVAPKPAVKSSSSQPVTPVSPVWSPGVAPTQPPAFPTSNPSKGTVVSSIKIAQPSYPPARPASTLNVAGPFKGPQAAVASQNYTPKPTVSTPTVNAVQPGAVGPSNELPGMSGRGAQLFAKRQSRMEKYVVDSDTVQAHAARAQSPTPSLPASWKYSSNVRAPPPVAYNPIHSPSYPLAALKSQPSAAQPSKMGKKKGKKPLNALDVMKHQPYQLNASLFTFQPPDAKDGLPQKSSVKVNSALAMKQALPPRPVNAASPTNVQASSVYSVPAYTSPPSFFAEASSPVSASPVPVGIPTSPKQESASSSYFVAPRPKFSAKKSGVTIQVWKPSVVEE

SEQ ID NO: 6501 - protein, 1261 aa, Homo sapiens
MGTGDFICISMTGGAPWGFRLQGGKEQKQPLQVAKIRNQSKASGSGLCEGDEVVSINGNPCADLTYPEVIKLMESITDSLQMLIKRPSSGISEALISENENKNLEHLTHGGYVESTTLQIRPATKTQCTEFFLAPVKTEVPLAENQRSGPDCAGSLKEETGPSYQRAPQMPDSQRGRVAEELILREKVEAVQPGPVVELQLSLSQERHKGASGPLVALPGAEKSKSPDPDPNLSHDRIVHINSIPTNEKADPFLRSSKIIQISSGRELRVIQESEAGDAGLPRVEVILDCSDRQKTEGCRLQAGKECVDSPVEGGQSEAPPSLVSFAVSSEGTEQGEDPRSEKDHSRPHKHRARHARLRRSESLSEKQVKEAKSKCKSIALLLTDAPNPNSKGVLMFKKRRRRARKYTLVSYGTGELEREADEEEEGDKEDTCEVAFLGASESEVDEELLSDVDDNTQVVNFDWDSGLVDIEKKLNRGDKMEMLPDTTGKGALMFAKRRERMDQITAQKEEDKVGGTPSREQDAAQTDGLRTTTSYQRKEEESVRTQSSVSKSYIEVSHGLGHVPQQNGFSGTSETANIQRMVPMNRTAKPFPGSVNQPATPFSPTRNMTSPIADFPAPPPYSAVTPPPDAFSRGVSSPIAGPAQPPPWPQPAPWSQPAFYDSSERIASRDERISVPAKRTGILQEAKRRSTTKPMFTFKEPKVSPNPELLSLLQNSEGKRGTGAGGDSGPEEDYLSLGAEACNFMQSSSAKQKTPPPVAPKPAVKSSSSQPVTPVSPVWSPGVAPTQPPAFPTSNPSKGTVVSSIKIAQPSYPPARPASTLNVAGPFKGPQAAVASQNYTPKPTVSTPTVNAVQPGAVGPSNELPGMSGRGAQLFAKRQSRMEKYVVDSDTVQAHAARAQSPTPSLPASWKYSSNVRAPPPVAYNPIHSPSYPLAALKSQPSAAQPSKMGKKKGKKPLNALDVMKHQPYQLNASLFTFQPPDAKDGLPQKSSVKVNSALAMKQALPPRPVNAASPTNVQASSVYSVPAYTSPPSFFAEASSPVSASPVPVGIPTSPKQESASSSYFVAPRPKFSAKKSGVTIQESGRSLSLPGRSVPPPISTSPWVYQPTYSYSSKPTDGLEKANKRPTPWEAAAKSPLGLVDDAFQPRNIQESIVANVVSAARRKVLPGPPEDWNERLSYIPQTQKAYMGSCGRQEYNVTANNNMSTTSQYGSQLPYAYYRQASRNDSAIMSMETRSDYCLPVADYNYNPHPRGWRRQT

SEQ ID NO: 6502 - protein, 1109 aa, Homo sapiens
MGTGDFICISMTGGAPWGFRLQGGKEQKQPLQVAKIRNQSKASGSGLCEGDEVVSINGNPCADLTYPEVIKLMESITDSLQMLIKRPSSGISEALISENENKNLEHLTHGGYVESTTLQIRPATKTQCTEFFLAPVKTEVPLAENQRSGPDCAGSLKEETGPSYQRAPQMPDSQRGRVAEELILREKVEAVQPGPVVELQLSLSQERHKGASGPLVALPGAEKSKSPDPDPNLSHDRIVHINSIPTNEKADPFLRSSKIIQISSGRELRVIQESEAGDAGLPRVEVILDCSDRQKTEGCRLQAGKECVDSPVEGGQSEAPPSLVSFAVSSEGTEQGEDPRSEKDHSRPHKHRARHARLRRSESLSEKQVKEAKSKCKSIALLLTDAPNPNSKGVLMFKKRRRRARKYTLVSYGTGELEREADEEEEGDKEDTCEVAFLGASESEVDEELLSDVDDNTQVVNFDWDSGLVDIEKKLNRGDKMEMLPDTTGKGALMFAKRRERMDQITAQKEEDKVGGTPSREQDAAQTDGLRTTTSYQRKEEESVRTQSSVSKSYIEVSHGLGHVPQQNGFSGTSETANIQRMVPMNRTAKPFPGSVNQPATPFSPTRNMTSPIADFPAPPPYSAVTPPPDAFSRGVSSPIAGPAQPPPWPQPAPWSQPAFYDSSERIASRDERISVPAKRTGILQEAKRRSTTKPMFTFKEPKVSPNPELLSLLQNSEGKRGTGAGGDSGPEEDYLSLGAEACNFMQSSSAKQKTPPPVAPKPAVKSSSSQPVTPVSPVWSPGVAPTQPPAFPTSNPSKGTVVSSIKIAQPSYPPARPASTLNVAGPFKGPQAAVASQNYTPKPTVSTPTVNAVQPGAVGPSNELPGMSGRGAQLFAKRQSRMEKYVVDSDTVQAHAARAQSPTPSLPASWKYSSNVRAPPPVAYNPIHSPSYPLAALKSQPSAAQPSKMGKKKGKKPLNALDVMKHQPYQLNASLFTFQPPDAKDGLPQKSSVKVNSALAMKQALPPRPVNAASPTNVQASSVYSVPAYTSPPSFFAEASSPVSASPVPVGIPTSPKQESASSSYFVAPRPKFSAKKSGVTIQVKCKSGIHSQDIIRTYFPAYLSSST

SEQ ID NO: 6503 - protein, 1230 aa, Homo sapiens
MVTQIRNQSKASGSGLCEGDEVVSINGNPCADLTYPEVIKLMESITDSLQMLIKRPSSGISEALISENENKNLEHLTHGGYVESTTLQIRPATKTQCTEFFLAPVKTEVPLAENQRSGPDCAGSLKEETGPSYQRAPQMPDSQRGRVAEELILREKVEAVQPGPVVELQLSLSQERHKGASGPLVALPGAEKSKSPDPDPNLSHDRIVHINSIPTNEKADPFLRSSKIIQISSGRELRVIQESEAGDAGLPRVEVILDCSDRQKTEGCRLQAGKECVDSPVEGGQSEAPPSLVSFAVSSEGTEQGEDPRSEKDHSRPHKHRARHARLRRSESLSEKQVKEAKSKCKSIALLLTDAPNPNSKGVLMFKKRRRRARKYTLVSYGTGELEREADEEEEGDKEDTCEVAFLGASESEVDEELLSDVDDNTQVVNFDWDSGLVDIEKKLNRGDKMEMLPDTTGKGALMFAKRRERMDQITAQKEEDKVGGTPSREQDAAQTDGLRTTTSYQRKEEESVRTQSSVSKSYIEVSHGLGHVPQQNGFSGTSETANIQRMVPMNRTAKPFPGSVNQPATPFSPTRNMTSPIADFPAPPPYSAVTPPPDAFSRGVSSPIAGPAQPPPWPQPAPWSQPAFYDSSERIASRDERISVPAKRTGILQEAKRRSTTKPMFTFKEPKVSPNPELLSLLQNSEGKRGTGAGGDSGPEEDYLSLGAEACNFMQSSSAKQKTPPPVAPKPAVKSSSSQPVTPVSPVWSPGVAPTQPPAFPTSNPSKGTVVSSIKIAQPSYPPARPASTLNVAGPFKGPQAAVASQNYTPKPTVSTPTVNAVQPGAVGPSNELPGMSGRGAQLFAKRQSRMEKYVVDSDTVQAHAARAQSPTPSLPASWKYSSNVRAPPPVAYNPIHSPSYPLAALKSQPSAAQPSKMGKKKGKKPLNALDVMKHQPYQLNASLFTFQPPDAKDGLPQKSSVKVNSALAMKQALPPRPVNAASPTNVQASSVYSVPAYTSPPSFFAEASSPVSASPVPVGIPTSPKQESASSSYFVAPRPKFSAKKSGVTIQESGRSLSLPGRSVPPPISTSPWVYQPTYSYSSKPTDGLEKANKRPTPWEAAAKSPLGLVDDAFQPRNIQESIVANVVSAARRKVLPGPPEDWNERLSYIPQTQKAYMGSCGRQEYNVTANNNMSTTSQYGSQLPYAYYRQASRNDSAIMSMETRSDYCLPVADYNYNPHPRGWRRQT

SEQ ID NO: 6504 - protein, 698 aa, Homo sapiens
MFKKRRRRARKYTLVSYGTGELEREADEEEEGDKEDTCEVAFLGASESEVDEELLSDVDDNTQVVNFDWDSGLVDIEKKLNRGDKMEMLPDTTGKGALMFAKRRERMDQITAQKEEDKVGGTPSREQDAAQTDGLRTTTSYQRKEEESVRTQSSVSKSYIEVSHGLGHVPQQNGFSGTSETANIQRMVPMNRTAKPFPGSVNQPATPFSPTRNMTSPIADFPAPPPYSAVTPPPDAFSRGVSSPIAGPAQPPPWPQPAPWSQPAFYDSSERIASRDERISVPAKRTGILQEAKRRSTTKPMFTFKEPKVSPNPELLSLLQNSEGKRGTGAGGDSGPEEDYLSLGAEACNFMQSSSAKQKTPPPVAPKPAVKSSSSQPVTPVSPVWSPGVAPTQPPAFPTSNPSKGTVVSSIKIAQPSYPPARPASTLNVAGPFKGPQAAVASQNYTPKPTVSTPTVNAVQPGAVGPSNELPGMSGRGAQLFAKRQSRMEKYVVDSDTVQAHAARAQSPTPSLPASWKYSSNVRAPPPVAYNPIHSPSYPLAALKSQPSAAQPSKMGKKKGKKPLNALDVMKHQPYQLNASLFTFQPPDAKDGLPQKSSVKVNSALAMKQALPPRPVNAASPTNVQASSVYSVPAYTSPPSFFAEASSPVSASPVPVGIPTSPKQESASSSYFVAPRPKFSAKKSGVTIQVWKPSVVEE

SEQ ID NO: 6505 - protein, 124 aa, Homo sapiens
MADEEEDPTFEEENEEIGGGAEGGQGKRKRLFSKELRCMMYGFGDDQNPYTESVDILEDLVIEFITEMTHKAMSIGRQGRVQVEDIVFLIRKDPRKFARVKDLLTMNEELKRARKAFDEANYGS

SEQ ID NO: 6506 - protein, 103 aa, Homo sapiens
MERQQQQQQQLRNLRDFLLVYNRMTELCFQRCVPSLHHRALDAEEEACLHSCAGKLIHSNHRLMAAYVQLMPALVQRRIADYEAASAVPGVAAEQPGVSPSGS

SEQ ID NO: 6507 - protein, 852 aa, Homo sapiens
MKPMLKDFSNLLLVVLCDYVLGEAEYLLLREPGHVALSNDTVYVDFQYFDGANGTLRNVSVLLLEANTNQTVTTKYLLTNQSQGTLKFECFYFKEAGDYWFTMTPEATDNSTPFPWWEKSAFLKVEWPVFHVDLNRSAKAAEGTFQVGLFTSQPLCPFPVDKPNIVVDVIFTNSLPEARRNSRQPLEIRTSKRTELAQGQWVEFGCAPLGPEAYVTVVLKLLGRDSVITSTGPIDLAQKFGYKLVMVPELTCESGVEVTVLPPPCTFVQGVVTVFKEAPRYPGKRTIHLAENSLPLGERRTIFNCTLFDMGKNKYCFDFGISSRSHFSAKEECMLIQRNTETWGLWQPWSQCSATCGDGVRERRRVCLTSFPSSPVCPGMSLEASLCSLEECAAFQPSSPSPLQPQGPVKSNNIVTVTGISLCLFIIIATVLITLWRRFGRPAKCSTPARHNSIHSPSFRKNSDEENICELSEQRGSFSDGGDGPTGSPGDTGIPLTYRRSGPVPPEDDASGSESFQSNAQKIIPPLFSYRLAQQQLKEMKKKGLTETTKVYHVSQSPLTDTAIDAAPSAPLDLESPEEAAANKFRIKSPFPEQPAVSAGERPPSRLDLNVTQASCAISPSQTLIRKSQARHVGSRGGPSERSHARNAHFRRTASFHEARQARPFRERSMSTLTPRQAPAYSSRTRTCEQAEDRFRPQSRGAHLFPEKLEHFQEASGTRGPLNPLPKSYTLGQPLRKPDLGDHQAGLVAGIERTEPHRARRGPSPSHKSVSRKQSSPISPKDNYQRVSSLSPSQCRKDKCQSFPTHPEFAFYDNTSFGLTEAEQRMLDLPGYFGSNEEDETTSTLSVEKLVI

SEQ ID NO: 6508 - protein, 799 aa, Homo sapiens
MKPMLKDFSNLLLVVLCDYVLGEAEYLLLREPGHVALSNDTVYVDFQYFDGANGTLRNVSVLLLEANTNQTVTTKYLLTNQSQGTLKFECFYFKEAGDYWFTMTPEATDNSTPFPWWEKSAFLKVEWPVFHVDLNRSAKAAEGTFQVGLFTSQPLCPFPVDKPNIVVDVIFTNSLPEARRNSRQPLEIRTSKRTELAQGQWVEFGCAPLGPEAYVTVVLKLLGRDSVITSTGPIDLAQKFGYKLVMVPELTCESGVEVTVLPPPCTFVQGVVTVFKEAPRYPGKRTIHLAENSLPLGERRTIFNCTLFDMGKNKYCFDFGISSRSHFSAKEECMLIQRNTAFQPSSPSPLQPQGPVKSNNIVTVTGISLCLFIIIATVLITLWRRFGRPAKCSTPARHNSIHSPSFRKNSDEENICELSEQRGSFSDGGDGPTGSPGDTGIPLTYRRSGPVPPEDDASGSESFQSNAQKIIPPLFSYRLAQQQLKEMKKKGLTETTKVYHVSQSPLTDTAIDAAPSAPLDLESPEEAAANKFRIKSPFPEQPAVSAGERPPSRLDLNVTQASCAISPSQTLIRKSQARHVGSRGGPSERSHARNAHFRRTASFHEARQARPFRERSMSTLTPRQAPAYSSRTRTCEQAEDRFRPQSRGAHLFPEKLEHFQEASGTRGPLNPLPKSYTLGQPLRKPDLGDHQAGLVAGIERTEPHRARRGPSPSHKSVSRKQSSPISPKDNYQRVSSLSPSQCRKDKCQSFPTHPEFAFYDNTSFGLTEAEQRMLDLPGYFGSNEEDETTSTLSVEKLVI

SEQ ID NO: 6509 - protein, 429 aa, Homo sapiens
MKPMLKDFSNLLLVVLCDYVLGEAEYLLLREPGHVALSNDTVYVDFQYFDGANGTLRNVSVLLLEANTNQTVTTKYLLTNQSQGTLKFECFYFKEAGDYWFTMTPEATDNSTPFPWWEKSAFLKVEWPVFHVDLNRSAKAAEGTFQVGLFTSQPLCPFPVDKPNIVVDVIFTNSLPEARRNSRQPLEIRTSKRTELAQGQWVEFGCAPLGPEAYVTVVLKLLGRDSVITSTGPIDLAQKFGYKLVMVPELTCESGVEVTVLPPPCTFVQGVVTVFKEAPRYPGKRTIHLAENSLPLGERRTIFNCTLFDMGKNKYCFDFGISSRSHFSAKEECMLIQRNTETWGLWQPWSQCSATCGDGVRERRRVCLTSFPSSPVCPGMSLEASLCSLEECAGGFSLCCPGWSAVARSWLTTSSASRVHAILLPQPPE

SEQ ID NO: 6510 - protein, 448 aa, Homo sapiens
MAMSELGTRKPSDGTVSHLLNVVESELQAGREKGDPTEKQLQIILEDAPLWQRFKEVTNEMIVTKNGRRMFPVLKISVTGLDPNAMYSLLLDFVPTDSHRWKYVNGEWVPAGKPEVSSHSCVYIHPDSPNFGAHWMKAPISFSKVKLTNKLNGGGQIMLNSLHKYEPQVHIVRVGSAHRMVTNCSFPETQFIAVTAYQNEEITALKIKYNPFAKAFLDAKERNHLRDVPEAISESQHVTYSHLGGWIFSNPDGVCTAGNSNYQYAAPLPLPAPHTHHGCEHYSGLRGHRQAPYPSAYMHRNHSPSVNLIESSSNNLQVFSGPDSWTSLSSTPHASILSVPHTNGPINPGPSPYPCLWTISNGAGGPSGPGPEVHASTPGAFLLGNPAVTSPPSVLSTQAPTSAGVEVLGEPSLTSIAVSTWTAVASHPFAGWGGPGAGGHHSPSSLDG

SEQ ID NO: 6511 - protein, 535 aa, Homo sapiens
MGIVEPGCGDMLTGTEPMPGSDEGRAPGADPQHRYFYPEPGAQDADERRGGGSLGSPYPGGALVPAPPSRFLGAYAYPPRPQAAGFPGAGESFPPPADAEGYQPGEGYAAPDPRAGLYPGPREDYALPAGLEVSGKLRVALNNHLLWSKFNQHQTEMIITKQGRRMFPFLSFTVAGLEPTSHYRMFVDVVLVDQHHWRYQSGKWVQCGKAEGSMPGNRLYVHPDSPNTGAHWMRQEVSFGKLKLTNNKGASNNVTQMIVLQSLHKYQPRLHIVEVNDGEPEAACNASNTHIFTFQETQFIAVTAYQNAEITQLKIDNNPFAKGFRENFESMYTSVDTSIPSPPGPNCQFLGGDHYSPLLPNQYPVPSRFYPDLPGQAKDVVPQAYWLGAPRDHSYEAEFRAVSMKPAFLPSAPGPTMSYYRGQEVLAPGAGWPVAPQYPPKMGPASWFRPMRTLPMEPGPGGSEGRGPEDQGPPLVWTEIAPIRPESSDSGLGEGDSKRRRVSPYPSSGDSSSPAGAPSPFDKEAEGQFYNYFPN

SEQ ID NO: 6512 - protein, 120 aa, Homo sapiens
MAAHQNLILKIFCLCCRDCQEPYAINDSKVPSQTQEHKPSTQNLLLQKDELDRQNPKRINAVSHLPSRTPLIQTKKSTSSSSSEFEDLNAYASQRNFYKRNLNRYCQEHWPFQPCLTGRP

SEQ ID NO: 6513 - protein, 100 aa, Homo sapiens
MQKPCKENEGKPKCSVPKREEKRPYGEFERQQTEGNFRQRLLQSLEEFKEDIDYRHFKDEEMTREGDEMERCLEEIRGLRKKFRALHSNHRHSRDRPYPI

SEQ ID NO: 6514 - protein, 496 aa, Homo sapiens
MFCHLRPMRRLCLEKIFPHWFPFSRALSGAEAVNALRPFYFAVHPDFFGQHPVEREINENSLKRLSVYLENLQKPGFKSLKPTQLTFYVRETDQSSSDGQEPFSTSGFRAVKFTLHTRDLLSTVLYILNSCSLSVEHIQSLNTNMHTQPLKEAKRMPDRPIKWDKSYYSFTGFKDPDEDLEQVSRVETTLTSWLDNNGKSAVKKLKNSLPLRKELDRLKDELSHQLQLSDIRWQRSWGIAHRCSQLHSLSRLAQQNLETLKKAKGCTIIFTDRSGMSAVGHVMLGTMDVHHHWTKLFERLPSYFDLQRRLMILEDQISYLLGGIQVVYIEELQPVLTLEEYYSLLDVFYNRLLKSRILFHPRSLRGLQMILNSDRYAPSLHELGHFNIPTLCDPANLQWFILTKAQQARENMKRKEELKVIENELIQASTKKFSLEKLYKEPSISSIQMVDCCKRLLEQSLPYLHGMHLCISHFYSVMQDGDLCIPWNWKNGEAIK

SEQ ID NO: 6515 - protein, 115 aa, Homo sapiens
MFCHLRPMRRLCLEKIFPHWFPFSRALSGAEAVNALRPFYFAVHPDFFGQHPVEREINENSLKRLSVYLENLQKPGFKSLKPTQLTFYVRETDQSSSDGQEPFSTSVYLLNISKA

SEQ ID NO: 6516 - protein, 70 aa, Homo sapiens
MFCHLRPMRRLCLEKIFPHWFPFSRALSGAEAVNALRPFYFAVHPDFFGQHPVERDDTWKSFQCPSDFSL

SEQ ID NO: 6517 - protein, 352 aa, Homo sapiens
MHTQPLKEAKRMPDRPIKWDKSYYSFTGFKDPDEDLEQVSRVETTLTSWLDNNGKSAVKKLKNSLPLRKELDRLKDELSHQLQLSDIRWQRSWGIAHRCSQLHSLSRLAQQNLETLKKAKGCTIIFTDRSGMSAVGHVMLGTMDVHHHWTKLFERLPSYFDLQRRLMILEDQISYLLGGIQVVYIEELQPVLTLEEYYSLLDVFYNRLLKSRILFHPRSLRGLQMILNSDRYAPSLHELGHFNIPTLCDPANLQWFILTKAQQARENMKRKEELKVIENELIQASTKKFSLEKLYKEPSISSIQMVDCCKRLLEQSLPYLHGMHLCISHFYSVMQDGDLCIPWNWKNGEAIK

SEQ ID NO: 6518 - protein, 134 aa, Homo sapiens
MASGKDTCPTLPKLTNNCSDESLYKSANKYEEIHLPRFSLKQGMIPRRYVMPWKENMIFRNVNLKQAEVCGIHTGPLEDSLFLNHSERLCHGEDRKVVFQKGPPEIKIADMPLHSPLSRYQSTVISHGFRRRLV

SEQ ID NO: 6519 - protein, 891 aa, Homo sapiens
MLPTEVPQSHPGPSALLLLQLLLPPTSAFFPNIWSLLAAPGSITHQDLTEEAALNVTLQLFLEQPPPGRPPLRLEDFLGRTLLADDLFAAYFGPGSSRRFRAALGEVSRANAAQDFLPTSRNDPDLHFDAERLGQGRARLVGALRETVVAARALDHTLARQRLGAALHALQDFYSHSNWVELGEQQPHPHLLWPRQELQNLAQVADPTCSDCEELSCPRNWLGFTLLTSGYFGTHPPKPPGKCSHGGHFDRSSSQPPRGGINKDSTSPGFSPHHMLHLQAAKLALLASIQAFSLLRSRLGDRDFSRLLDITPASSLSFVLDTTGSMGEEINAAKIQARHLVEQRRGSPMEPVHYVLVPFHDPGFGPVFTTSDPDSFWQQLNEIHALGGGDEPEMCLSALQLALLHTPPLSDIFVFTDASPKDAFLTNQVESLTQERRCRVTFLVTEDTSRVQGRARREILSPLRFEPYKAVALASGGEVIFTKDQHIRDVAAIVGESMAALVTLPLDPPVVVPGQPLVFSVDGLLQKITVRIHGDISSFWIKNPAGVSQGQEEGGGPLGHTRRFGQFWMVTMDDPPQTGTWEIQVTAEDTPGVRVQAQTSLDFLFHFGIPMEDGPHPGLYPLTQPVAGLQTQLLVEVTGLGSRANPGDPQPHFSHVILRGVPEGAELGQVPLEPVGPPERGLLAASLSPTLLSTPRPFSLELIGQDAAGRRLHRAAPQPSTVVPVLLELSGPSGFLAPGSKVPLSLRIASFSGPQDLDLRTFVNPSFSLTSNLSRAHLELNESAWGRLWLEVPDSAAPDSVVMVTVTAGGREANPVPPTHAFLRLLVSAPAPQDRHTTPTGSSDPILTTATPAFSPFTLVTQGRAGAGLAAGSPWWGTVGGVLLLLGLASW

SEQ ID NO: 6520 - protein, 852 aa, Homo sapiens
MLPTEVPQSHPGPSALLLLQLLLPPTSAFFPNIWSLLAAPGSITHQDLTEEAALNVTLQLFLEQPPPGRPPLRLEDFLGRTLLADDLFAAYFGPGSSRRFRAALGEVSRANAAQDFLPTSRNDPDLHFDAERLGQGRARLVGALRETVVAARALDHTLARQRLGAALHALQDFYSHSNWVELGEQQPHPHLLWPRQELQNLAQVADPTCSDCEELSCPRNWLGFTLLTSGYFGTHPPKPPGKCSHGGHFDRSSSQPPRGGINKDSTSPGFSPHHMLHLQAAKLALLASIQAFSLLRSRLGDRDFSRLLDITPASSLSFVLDTTGSMGEEINAAKIQARHLVEQRRGSPMEPVHYVLVPFHDPGFGPVFTTSDPDSFWQQLNEIHALGGGDEPEMCLSALQLALLHTPPLSDIFVFTDASPKDAFLTNQVESLTQERRCRVTFLVTEDTSRVQGRARREILSPLRFEPYKAVALASGGEVIFTKDQHIRDVAAIVGESMAALVTLPLDPPVVVPGQPLVFSVDGLLQKITVRIHGDISSFWIKNPAGVSQGQEEGGGPLGHTRRFGQFWMVTMDDPPQTGTWEIQVTAEDTPGVRVQAQTSLDFLFHFGIPMEDGPHPGLYPLTQPVAGLQTQLLVEVTGLGSRANPGDPQPHFSHVILRGVPEGAELGQVPLEPVGPPERGLLAASLSPTLLSTPRPFSLELIGQDAAGRRLHRAAPQPSTVVPVLLELSGPSGFLAPGSKVPLSLRIASFSGPQDLDLRTFVNPSFSLTSNLSRAHLELNESAWGRLWLEVPDSAAPDSVVMVTVTAGGREANPVPPTHAFLRLLVSAPAPQVRNHYFPSQGPAHHPYRLI

SEQ ID NO: 6521 - protein, 412 aa, Homo sapiens
MKMHLQRALVVLALLNFATVSLSLSTCTTLDFGHIKKKRVEAIRGQILSKLRLTSPPEPTVMTHVPYQVLALYNSTRELLEEMHGEREEGCTQENTESEYYAKEIHKFDMIQGLAEHNELAVCPKGITSKVFRFNVSSVEKNRTNLFRAEFRVLRVPNPSSKRNEQRIELFQILRPDEHIAKQRYIGGKNLPTRGTAEWLSFDVTDTVREWLLRRESNLGLEISIHCPCHTFQPNGDILENIHEVMEIKFKGVDNEDDHGRGDLGRLKKQKDHHNPHLILMMIPPHRLDNPGQGGQRKKRALDTNYCFRNLEENCCVRPLYIDFRQDLGWKWVHEPKGYYANFCSGPCPYLRSADTTHSTVLGLYNTLNPEASASPCCVPQDLEPLTILYYVGRTPKVEQLSNMVVKSCKCS

SEQ ID NO: 6522 - protein, 309 aa, Homo sapiens
MKMHLQRALVVLALLNFATVSLSLSTCTTLDFGHIKKKRVEAIRGQILSKLRLTSPPEPTVMTHVPYQVLALYNSTRELLEEMHGEREEGCTQENTESEYYAKEIHKFDMIQGLAEHNELAVCPKGITSKVFRFNVSSVEKNRTNLFRAEFRVLRVPNPSSKRNEQRIELFQILRPDEHIAKQRYIGGKNLPTRGTAEWLSFDVTDTVREWLLRRESNLGLEISIHCPCHTFQPNGDILENIHEVMEIKFKGVDNEDDHGRGDLGRLKKQKDHHNPHLILMMIPPHRLDNPGQGGQRKKRALDTNYCFR

SEQ ID NO: 6523 - protein, 399 aa, Homo sapiens
MAEAMDLGKDPNGPTHSSTLFVRDDGSSMSFYVRPSPAKRRLSTLILHGGGTVCRVQEPGAVLLAQPGEALAEASGDFISTQYILDCVERNERLELEAYRLGPASAADTGSEAKPGALAEGAAEPEPQRHAGRIAFTDADDVAILTYVKENARSPSSVTGNALWKAMEKSSLTQHSWQSLKDRYLKHLRGQEHKYLLGDAPVSPSSQKLKRKAEEDPEAADSGEPQNKRTPDLPEEEYVKEEIQENEEAVKKMLVEATREFEEVVVDESPPDFEIHITMCDDDPPTPEEDSETQPDEEEEEEEEKVSQPEVGAAIKIIRQLMEKFNLDLSTVTQAFLKNSGELEATSAFLASGQRADGYPIWSRQDDIDLQKDDEDTREALVKKFGAQNVARRIEFRKK

SEQ ID NO: 6524 - protein, 450 aa, Homo sapiens; identical to SEQ ID NO: 2584

SEQ ID NO: 6525 - protein, 729 aa, Homo sapiens
MQSTSNHLWLLSDILGQGATANVFRGRHKKTGDLFAIKVFNNISFLRPVDVQMREFEVLKKLNHKNIVKLFAIEEETTTRHKVLIMEFCPCGSLYTVLEEPSNAYGLPESEFLIVLRDVVGGMNHLRENGIVHRDIKPGNIMRVIGEDGQSVYKLTDFGAARELEDDEQFVSLYGTEEYLHPDMYERAVLRKDHQKKYGATVDLWSIGVTFYHAATGSLPFRPFEGPRRNKEVMYKIITGKPSGAISGVQKAENGPIDWSGDMPVSCSLSRGLQVLLTPVLANILEADQEKCWGFDQFFAETSDILHRMVIHVFSLQQMTAHKIYIHSYNTATIFHELVYKQTKIISSNQELIYEGRRLVLEPGRLAQHFPKTTEENPIFVVSREPLNTIGLIYEKISLPKVHPRYDLDGDASMAKAITGVVCYACRIASTLLLYQELMRKGIRWLIELIKDDYNETVHKKTEVVITLDFCIRNIEKTVKVYEKLMKINLEAAELGEISDIHTKLLRLSSSQGTIETSLQDIDSRLSPGGSLADAWAHQEGTHPKDRNVEKLQVLLNCMTEIYYQFKKDKAERRLAYNEEQIHKFDKQKLYYHATKAMTHFTDECVKKYEAFLNKSEEWIRKMLHLRKQLLSLTNQCFDIEEEVSKYQEYTNELQETLPQKMFTASSGIKHTMTPIYPSSNTLVEMTLGMKKLKEEMEGVVKELAENNHILERFGSLTMDGGLRNVDCL

SEQ ID NO: 6526 - protein, 789 aa, Homo sapiens
MTSFQEVPLQTSNFAHVIFQNVAKSYLPNAHLECHYTLTPYIHPHPKDWVGIFKVGWSTARDYYTFLWSPMPEHYVEGSTVNCVLAFQGYYLPNDDGEFYQFCYVTHKGEIRGASTPFQFRASSPVEELLTMEDEGNSDMLVVTTKAGLLELKIEKTMKEKEELLKLIAVLEKETAQLREQVGRMERELNHEKERCDQLQAEQKGLTEVTQSLKMENEEFKKRFSDATSKAHQLEEDIVSVTHKAIEKETELDSLKDKLKKAQHEREQLECQLKTEKDEKELYKVHLKNTEIENTKLMSEVQTLKNLDGNKESVITHFKEEIGRLQLCLAEKENLQRTFLLTTSSKEDTCFLKEQLRKAEEQVQATRQEVVFLAKELSDAVNVRDRTMADLHTARLENEKVKKQLADAVAELKLNAMKKDQDKTDTLEHELRREVEDLKLRLQMAADHYKEKFKECQRLQKQINKLSDQSANNNNVFTKKTGNQQKVNDASVNTDPATSASTVDVKPSPSAAEADFDIVTKGQVCEMTKEIADKTEKYNKCKQLLQDEKAKCNKYADELAKMELKWKEQVKIAENVKLELAEVQDNYKELKRSLENPAERKMEGQNSQSPQCFKTCSEQNGYVLTLSNAQPVLQYGNPYASQETRDGADGAFYPDEIQRPPVRVPSWGLEDNVVCSQPARNFSRPDGLEDSEDSKEDENVPTAPDPPSQHLRGHGTGFCFDSSFDVHKKCPLCELMFPPNYDQSKFEEHVESHWKVCPMCSEQFPPDYDQQVFERHVQTHFDQNVLNFD

SEQ ID NO: 6527 - protein, 747 aa, Homo sapiens
MTSFQEVPLQTSNFAHVIFQNVAKSYLPNAHLECHYTLTPYIHPHPKDWVGIFKVGWSTARDYYTFLWSPMPEHYVEGSTVNCVLAFQGYYLPNDDGEFYQFCYVTHKGEIRGASTPFQFRASSPVEELLTMEDEGNSDMLVVTTKAGLLELKIEKTMKEKEELLKLIAVLEKETAQLREQVGRMERELNHEKERCDQLQAEQKGLTEVTQSLKMENEEFKKRFSDATSKAHQLEEDIVSVTHKAIEKETELDSLKDKLKKAQHEREQLECQLKTEKDEKELYKVHLKNTEIENTKLMSEVQTLKNLDGNKESVITHFKEEIGRLQLCLAEKENLQRTFLLTTSSKEDTCFLKEQLRKAEEQVQATRQEVVFLAKELSDAVNVRDRTMADLHTARLENEKVKKQLADAVAELKLNAMKKDQDKTDTLEHELRREVEDLKLRLQMAADHYKEKFKECQRLQKQINKLSDQSANNNNVFTKKTGNQQKVNDASVNTDPATSASTVDVKPSPSAAEADFDIVTKGQVCEMTKEIADKTEKYNKCKQLLQDEKAKCNKYADELAKMELKWKEQVKIAENVKLELAEVQDNYKELKRSLENPAERKMEDGADGAFYPDEIQRPPVRVPSWGLEDNVVCSQPARNFSRPDGLEDSEDSKEDENVPTAPDPPSQHLRGHGTGFCFDSSFDVHKKCPLCELMFPPNYDQSKFEEHVESHWKVCPMCSEQFPPDYDQQVFERHVQTHFDQNVLNFD

SEQ ID NO: 6528 - protein, 563 aa, Homo sapiens
MERELNHEKERCDQLQAEQKGLTEVTQSLKMENEEFKKRFSDATSKAHQLEEDIVSVTHKAIEKETELDSLKDKLKKAQHEREQLECQLKTEKDEKELYKVHLKNTEIENTKLMSEVQTLKNLDGNKESVITHFKEEIGRLQLCLAEKENLQRTFLLTTSSKEDTCFLKEQLRKAEEQVQATRQEVVFLAKELSDAVNVRDRTMADLHTARLENEKVKKQLADAVAELKLNAMKKDQDKTDTLEHELRREVEDLKLRLQMAADHYKEKFKECQRLQKQINKLSDQSANNNNVFTKKTGNQQKVNDASVNTDPATSASTVDVKPSPSAAEADFDIVTKGQVCEMTKEIADKTEKYNKCKQLLQDEKAKCNKYADELAKMELKWKEQVKIAENVKLELAEVQDNYKELKRSLENPAERKMEDGADGAFYPDEIQRPPVRVPSWGLEDNVVCSQPARNFSRPDGLEDSEDSKEDENVPTAPDPPSQHLRGHGTGFCFDSSFDVHKKCPLCELMFPPNYDQSKFEEHVESHWKVCPMCSEQFPPDYDQQVFERHVQTHFDQNVLNFD

SEQ ID NO: 6529 - protein, 590 aa, Homo sapiens
MKEKEELLKLIAVLEKETAQLREQVGRMERELNHEKERCDQLQAEQKGLTEVTQSLKMENEEFKKRFSDATSKAHQLEEDIVSVTHKAIEKETELDSLKDKLKKAQHEREQLECQLKTEKDEKELYKVHLKNTEIENTKLMSEVQTLKNLDGNKESVITHFKEEIGRLQLCLAEKENLQRTFLLTTSSKEDTCFLKEQLRKAEEQVQATRQEVVFLAKELSDAVNVRDRTMADLHTARLENEKVKKQLADAVAELKLNAMKKDQDKTDTLEHELRREVEDLKLRLQMAADHYKEKFKECQRLQKQINKLSDQSANNNNVFTKKTGNQQKVNDASVNTDPATSASTVDVKPSPSAAEADFDIVTKGQVCEMTKEIADKTEKYNKCKQLLQDEKAKCNKYADELAKMELKWKEQVKIAENVKLELAEVQDNYKELKRSLENPAERKMEDGADGAFYPDEIQRPPVRVPSWGLEDNVVCSQPARNFSRPDGLEDSEDSKEDENVPTAPDPPSQHLRGHGTGFCFDSSFDVHKKCPLCELMFPPNYDQSKFEEHVESHWKVCPMCSEQFPPDYDQQVFERHVQTHFDQNVLNFD

SEQ ID NO: 6530 - protein, 893 aa, Homo sapiens
MFPLKDAEMGAFTFFASALPHDVCGSNGLPLTPNSIKILGRFQILKTITHPRLCQYVDISRGKHERLVVVAEHCERSLEDLLRERKPVSCSTVLCIAFEVLQGLQYMNKHGIVHRALSPHNILLDRKGHIKLAKFGLYHMTAHGDDVDFPIGYPSYLAPEVIAQGIFKTTDHMPSKKPLPSGPKSDVWSLGIILFELCVGRKLFQSLDISERLKFLLTLDCVDDTLIVLAEEHGCLDIIKELPETVIDLLNKCLTFHPSKRPTPDQLMKDKVFSEVSPLYTPFTKPASLFSSSLRCADLTLPEDISQLCKDINNDYLAERSIEEVYYLWCLAGGDLEKELVNKEIIRSKPPICTLPNFLFEDGESFGQGRDRSSLLDDTTVTLSLCQLRNRLKDVGGEAFYPLLEDDQSNLPHSNSNNELSAAATLPLIIREKDTEYQLNRIILFDRLLKAYPYKKNQIWKEARVDIPPLMRGLTWAALLGVEGAIHAKYDAIDKDTPIPTDRQIEVDIPRCHQYDELLSSPEGHAKFRRVLKAWVVSHPDLVYWQGLDSLCAPFLYLNFNNEALAYACMSAFIPKYLYNFFLKDNSHVIQEYLTVFSQMIAFHDPELSNHLNEIGFIPDLYAIPWFLTMFTHVFPLHKIFHLWDTLLLGNSSFPFCIGVAILQQLRDRLLANGFNECILLFSDLPEIDIERCVRESINLFCWTPKSATYRQHAQPPKPSSDSSGGRSSAPYFSAECPDPPKTDLSRESIPLNDLKSEVSPRISAEDLIDLCELTVTGHFKTPSKKTKSSKPKLLVVDIRNSEDFIRGHISGSINIPFSAAFTAEGELTQGPYTAMLQNFKGKVIVIVGHVAKHTAEFAAHLVKMKYPRICILDGGINKIKPTGLLTIPSPQI

SEQ ID NO: 6531 - protein, 854 aa, Homo sapiens
MFPLKDAEMGAFTFFASALPHDVCGSNGLPLTPNSIKILGRFQILKTITHPRLCQYVDISRGKHERLVVVAEHCERSLEDLLRERKPVSCSTVLCIAFEVLQGLQYMNKHGIVHRALSPHNILLDRKGHIKLAKFGLYHMTAHGDDVDFPIGYPSYLAPEGRKLFQSLDISERLKFLLTLDCVDDTLIVLAEEHGCLDIIKELPETVIDLLNKCLTFHPSKRPTPDQLMKDKVFSEVSPLYTPFTKPASLFSSSLRCADLTLPEDISQLCKDINNDYLAERSIEEVYYLWCLAGGDLEKELVNKEIIRSKPPICTLPNFLFEDGESFGQGRDRSSLLDDTTVTLSLCQLRNRLKDVGGEAFYPLLEDDQSNLPHSNSNNELSAAATLPLIIREKDTEYQLNRIILFDRLLKAYPYKKNQIWKEARVDIPPLMRGLTWAALLGVEGAIHAKYDAIDKDTPIPTDRQIEVDIPRCHQYDELLSSPEGHAKFRRVLKAWVVSHPDLVYWQGLDSLCAPFLYLNFNNEALAYACMSAFIPKYLYNFFLKDNSHVIQEYLTVFSQMIAFHDPELSNHLNEIGFIPDLYAIPWFLTMFTHVFPLHKIFHLWDTLLLGNSSFPFCIGVAILQQLRDRLLANGFNECILLFSDLPEIDIERCVRESINLFCWTPKSATYRQHAQPPKPSSDSSGGRSSAPYFSAECPDPPKTDLSRESIPLNDLKSEVSPRISAEDLIDLCELTVTGHFKTPSKKTKSSKPKLLVVDIRNSEDFIRGHISGSINIPFSAAFTAEGELTQGPYTAMLQNFKGKVIVIVGHVAKHTAEFAAHLVKMKYPRICILDGGINKIKPTGLLTIPSPQI

SEQ ID NO: 6532 - protein, 830 aa, Homo sapiens
MFPLKDAEMGAFTFFASALPHDVCGSNGLPLTPNSIKILGRFQILKTITHPRLCQYVDISRGKHERLVVVAEHCERSLEDLLRERKPVRYPSYLAPEVIAQGIFKTTDHMPSKKPLPSGPKSDVWSLGIILFELCVGRKLFQSLDISERLKFLLTLDCVDDTLIVLAEEHGCLDIIKELPETVIDLLNKCLTFHPSKRPTPDQLMKDKVFSEVSPLYTPFTKPASLFSSSLRCADLTLPEDISQLCKDINNDYLAERSIEEVYYLWCLAGGDLEKELVNKEIIRSKPPICTLPNFLFEDGESFGQGRDRSSLLDDTTVTLSLCQLRNRLKDVGGEAFYPLLEDDQSNLPHSNSNNELSAAATLPLIIREKDTEYQLNRIILFDRLLKAYPYKKNQIWKEARVDIPPLMRGLTWAALLGVEGAIHAKYDAIDKDTPIPTDRQIEVDIPRCHQYDELLSSPEGHAKFRRVLKAWVVSHPDLVYWQGLDSLCAPFLYLNFNNEALAYACMSAFIPKYLYNFFLKDNSHVIQEYLTVFSQMIAFHDPELSNHLNEIGFIPDLYAIPWFLTMFTHVFPLHKIFHLWDTLLLGNSSFPFCIGVAILQQLRDRLLANGFNECILLFSDLPEIDIERCVRESINLFCWTPKSATYRQHAQPPKPSSDSSGGRSSAPYFSAECPDPPKTDLSRESIPLNDLKSEVSPRISAEDLIDLCELTVTGHFKTPSKKTKSSKPKLLVVDIRNSEDFIRGHISGSINIPFSAAFTAEGELTQGPYTAMLQNFKGKVIVIVGHVAKHTAEFAAHLVKMKYPRICILDGGINKIKPTGLLTIPSPQI

SEQ ID NO: 6533 - protein, 691 aa, Homo sapiens
MAAAGVVSGKIIYEQEGVYIHSSCGKTNDQDGLISGILRVLEKDAEVIVDWRPLDDALDSSSILYARKDSSSVVEWTQAPKERGHRGSEHLNSYEAEWDMVNTVSFKRKPHTNGDAPSHRNGKSKWSFLFSLTDLKSIKQNKEGMGWSYLVFCLKDDVVLPALHFHQGDSKLLIESLEKYVVLCESPQDKRTLLVNCQNKSLSQSFENLLDEPAYGLIQAGLLDRRKLLWAIHHWKKIKKDPYTATMIGFSKVTNYIFDSLRGSDPSTHQRPPSEMADFLSDAIPGLKINQQEEPGFEVITRIDLGERPVVQRREPVSLEEWTKNIDSEGRILNVDNMKQMIFRGGLSHALRKQAWKFLLGYFPWDSTKEERTQLQKQKTDEYFRMKLQWKSISQEQEKRNSRLRDYRSLIEKDVNRTDRTNKFYEGQDNPGLILLHDILMTYCMYDFDLGYVQGMSDLLSPLLYVMENEVDAFWCFASYMDQMHQNFEEQMQGMKTQLIQLSTLLRLLDSGFCSYLESQDSGYLYFCFRWLLIRFKREFSFLDILRLWEVMWTELPCTNFHLLLCCAILESEKQQIMEKHYGFNEILKHINELSMKIDVEDILCKAEAISLQMVKCKELPQAVCEILGLQGSEVTTPDSDVGEDENVVMTPCPTSAFQSNALPTLSASGARNDSPTQIPVSSDVCRLTPA

SEQ ID NO: 6534 - protein, 674 aa, Homo sapiens
MAAAGVVSGKIIYEQEGVYIHSSCGKTNDQDGLISGILRVLEKDAEVIVDWRPLDDALDSSSILYARKDSSSVVEWTQAPKERGHRGSEHLNSYEAEWDMVNTVSFKRKPHTNGDAPSHRNGKSKWSFLFSLTDLKSIKQNKEGMGWSYLVFCLKDDVVLPALHFHQGDSKLLIESLEKYVVLCESPQDKRTLLVNCQNKSLSQSFENLLDEPAYGLIQKIKKDPYTATMIGFSKVTNYIFDSLRGSDPSTHQRPPSEMADFLSDAIPGLKINQQEEPGFEVITRIDLGERPVVQRREPVSLEEWTKNIDSEGRILNVDNMKQMIFRGGLSHALRKQAWKFLLGYFPWDSTKEERTQLQKQKTDEYFRMKLQWKSISQEQEKRNSRLRDYRSLIEKDVNRTDRTNKFYEGQDNPGLILLHDILMTYCMYDFDLGYVQGMSDLLSPLLYVMENEVDAFWCFASYMDQMHQNFEEQMQGMKTQLIQLSTLLRLLDSGFCSYLESQDSGYLYFCFRWLLIRFKREFSFLDILRLWEVMWTELPCTNFHLLLCCAILESEKQQIMEKHYGFNEILKHINELSMKIDVEDILCKAEAISLQMVKCKELPQAVCEILGLQGSEVTTPDSDVGEDENVVMTPCPTSAFQSNALPTLSASGARNDSPTQIPVSSDVCRLTPA

SEQ ID NO: 6535 - protein, 682 aa, Homo sapiens
MCPGLYPYSSLLEYGRSMIIYEQEGVYIHSSCGKTNDQDGLISGILRVLEKDAEVIVDWRPLDDALDSSSILYARKDSSSVVEWTQAPKERGHRGSEHLNSYEAEWDMVNTVSFKRKPHTNGDAPSHRNGKSKWSFLFSLTDLKSIKQNKEGMGWSYLVFCLKDDVVLPALHFHQGDSKLLIESLEKYVVLCESPQDKRTLLVNCQNKSLSQSFENLLDEPAYGLIQKIKKDPYTATMIGFSKVTNYIFDSLRGSDPSTHQRPPSEMADFLSDAIPGLKINQQEEPGFEVITRIDLGERPVVQRREPVSLEEWTKNIDSEGRILNVDNMKQMIFRGGLSHALRKQAWKFLLGYFPWDSTKEERTQLQKQKTDEYFRMKLQWKSISQEQEKRNSRLRDYRSLIEKDVNRTDRTNKFYEGQDNPGLILLHDILMTYCMYDFDLGYVQGMSDLLSPLLYVMENEVDAFWCFASYMDQMHQNFEEQMQGMKTQLIQLSTLLRLLDSGFCSYLESQDSGYLYFCFRWLLIRFKREFSFLDILRLWEVMWTELPCTNFHLLLCCAILESEKQQIMEKHYGFNEILKHINELSMKIDVEDILCKAEAISLQMVKCKELPQAVCEILGLQGSEVTTPDSDVGEDENVVMTPCPTSAFQSNALPTLSASGARNDSPTQIPVSSDVCRLTPA

SEQ ID NO: 6536 - protein, 1098 aa, Homo sapiens
MAERGGDGGESERFNPGELRMAQQQALRFRGPAPPPNAVMRGPPPLMRPPPPFGMMRGPPPPPRPPFGRPPFDPNMPPMPPPGGIPPPMGPPHLQRPPFMPPPMSSMPPPPGMMFPPGMPPVTAPGTPALPPTEEIWVENKTPDGKVYYYNARTRESAWTKPDGVKVIQQSELTPMLAAQAQVQAQAQAQAQAQAQAQAQAQAQAQAQAQAQAQAQAQAQAQAQAQAQAQAQAQAQAQAQAQVQAQVQAQVQAQAVGASTPTTSSPAPAVSTSTSSSTPSSTTSTTTTATSVAQTVSTPTTQDQTPSSAVSVATPTVSVSTPAPTATPVQTVPQPHPQTLPPAVPHSVPQPTTAIPAFPPVMVPPFRVPLPGMPIPLPGVAMMQIVSCPYVKTVATTKTGVLPGMAPPIVPMIHPQVAIAASPATLAGATAVSEWTEYKTADGKTYYYNNRTLESTWEKPQELKEKEKLEEKIKEPIKEPSEEPLPMETEEEDPKEEPIKEIKEEPKEEEMTEEEKAAQKAKPVATAPIPGTPWCVVWTGDERVFFYNPTTRLSMWDRPDDLIGRADVDKIIQEPPHKKGMEELKKLRHPTPTMLSIQKWQFSMSAIKEEQELMEEINEDEPVKAKKRKRDDNKDIDSEKEAAMEAEIKAARERAIVPLEARMKQFKDMLLERGVSAFSTWEKELHKIVFDPRYLLLNPKERKQVFDQYVKTRAEEERREKKNKIMQAKEDFKKMMEEAKFNPRATFSEFAAKHAKDSRFKAIEKMKDREALFNEFVAAARKKEKEDSKTRGEKIKSDFFELLSNHHLDSQSRWSKVKDKVESDPRYKAVDSSSMREDLFKQYIEKIAKNLDSEKEKELERQARIEASLREREREVQKARSEQTKEIDREREQHKREEAIQNFKALLSDMVRSSDVSWSDTRRTLRKDHRWESGSLLEREEKEKLFNEHIEALTKKKREHFRQLLDETSAITLTSTWKEVKKIIKEDPRCIKFSSSDRKKQREFEEYIRDKYITAKADFRTLLKETKFITYRSKKLIQESDQHLKDVEKILQNDKRYLVLDCVPEERRKLIVAYVDDLDRRGPPPPPTASEPTRRSTK

SEQ ID NO: 6537 - protein, 1077 aa, Homo sapiens
MAERGGDGGESERFNPGELRMAQQQALRFRGPAPPPNAVMRGPPPLMRPPPPFGMMRGPPPPPRPPFGRPPFDPNMPPMPPPGGIPPPMGPPHLQRPPFMPPPMSSMPPPPGMMFPPGMPPVTAPGTPALPPTEEIWVENKTPDGKVYYYNARTRESAWTKPDGVKVIQQSELTPMLAAQAQVQAQAQAQAQAQAQAQAQAQAQAQAQAQAQAQAQAQAQAQAQAQAQAQAQAQAQAQAQAQVQAQVQAQVQAQAVGASTPTTSSPAPAVSTSTSSSTPSSTTSTTTTATSVAQTVSTPTTQDQTPSSAVSVATPTVSVSTPAPTATPVQTVPQPHPQTLPPAVPHSVPQPTTAIPAFPPVMVPPFRVPLPGMPIPLPGVLPGMAPPIVPMIHPQVAIAASPATLAGATAVSEWTEYKTADGKTYYYNNRTLESTWEKPQELKEKEKLEEKIKEPIKEPSEEPLPMETEEEDPKEEPIKEIKEEPKEEEMTEEEKAAQKAKPVATAPIPGTPWCVVWTGDERVFFYNPTTRLSMWDRPDDLIGRADVDKIIQEPPHKKGMEELKKLRHPTPTMLSIQKWQFSMSAIKEEQELMEEINEDEPVKAKKRKRDDNKDIDSEKEAAMEAEIKAARERAIVPLEARMKQFKDMLLERGVSAFSTWEKELHKIVFDPRYLLLNPKERKQVFDQYVKTRAEEERREKKNKIMQAKEDFKKMMEEAKFNPRATFSEFAAKHAKDSRFKAIEKMKDREALFNEFVAAARKKEKEDSKTRGEKIKSDFFELLSNHHLDSQSRWSKVKDKVESDPRYKAVDSSSMREDLFKQYIEKIAKNLDSEKEKELERQARIEASLREREREVQKARSEQTKEIDREREQHKREEAIQNFKALLSDMVRSSDVSWSDTRRTLRKDHRWESGSLLEREEKEKLFNEHIEALTKKKREHFRQLLDETSAITLTSTWKEVKKIIKEDPRCIKFSSSDRKKQREFEEYIRDKYITAKADFRTLLKETKFITYRSKKLIQESDQHLKDVEKILQNDKRYLVLDCVPEERRKLIVAYVDDLDRRGPPPPPTASEPTRRSTK

SEQ ID NO: 6538 - protein, 339 aa, Homo sapiens
MDQNNSLPPYAQGLASPQGAMTPGIPIFSPMMPYGTGLTPQPIQNTNSLSILEEQQRQQQQQQQQQQQQQQQQQQQQQQQQQQQQQQQQQQQQQQAVAAAAVQQSTSQQATQGTSGQAPQLFHSQTLTTAPLPGTTPLYPSPMTPMTPITPATPASESSGIVPQLQNIVSTVNLGCKLDLKTIALRARNAEYNPKRFAAVIMRIREPRTTALIFSSGKMVCTGAKSEEQSRLAARKYARVVQKLGFPAKFLDFKIQNMVGSCDVKFPIRLEGLVLTHQQFSSYEPELFPGLIYRMIKPRIVLLIFVSGKVVLTGAKVRAEIYEAFENIYPILKGFRKTT

SEQ ID NO: 6539 - protein, 319 aa, Homo sapiens
MTPGIPIFSPMMPYGTGLTPQPIQNTNSLSILEEQQRQQQQQQQQQQQQQQQQQQQQQQQQQQQQQQQQQQQQQQAVAAAAVQQSTSQQATQGTSGQAPQLFHSQTLTTAPLPGTTPLYPSPMTPMTPITPATPASESSGIVPQLQNIVSTVNLGCKLDLKTIALRARNAEYNPKRFAAVIMRIREPRTTALIFSSGKMVCTGAKSEEQSRLAARKYARVVQKLGFPAKFLDFKIQNMVGSCDVKFPIRLEGLVLTHQQFSSYEPELFPGLIYRMIKPRIVLLIFVSGKVVLTGAKVRAEIYEAFENIYPILKGFRKTT

SEQ ID NO: 6540 - protein, 635 aa, Homo sapiens
MPSWALFMVTSCLLLAPQNLAQVSSQDVSLLASDSEPLKCFSRTFEDLTCFWDEEEAAPSGTYQLLYAYPREKPRACPLSSQSMPHFGTRYVCQFPDQEEVRLFFPLHLWVKNVFLNQTRTQRVLFVDSVGLPAPPSIIKAMGGSQPGELQISWEEPAPEISDFLRYELRYGPRDPKNSTGPTVIQLIATETCCPALQRPHSASALDQSPCAQPTMPWQDGPKQTSPSREASALTAEGGSCLISGLQPGNSYWLQLRSEPDGISLGGSWGSWSLPVTVDLPGDAVALGLQCFTLDLKNVTCQWQQQDHASSQGFFYHSRARCCPRDRYPIWENCEEEEKTNPGLQTPQFSRCHFKSRNDSIIHILVEVTTAPGTVHSYLGSPFWIHQAVRLPTPNLHWREISSGHLELEWQHPSSWAAQETCYQLRYTGEGHQDWKVLEPPLGARGGTLELRPRSRYRLQLRARLNGPTYQGPWSSWSDPTRVETATETAWISLVTALHLVLGLSAVLGLLLLRWQFPAHYRRLRHALWPSLPDLHRVLGQYLRDTAALSPPKATVSDTCEEVEPSLLEILPKSSERTPLPLCSSQAQMDYRRLQPSCLGTMPLSVCPPMAESGSCCTTHIANHSYLPLSYWQQP

SEQ ID NO: 6541 - protein, 579 aa, Homo sapiens
MPSWALFMVTSCLLLAPQNLAQVSSQDVSLLASDSEPLKCFSRTFEDLTCFWDEEEAAPSGTYQLLYAYPREKPRACPLSSQSMPHFGTRYVCQFPDQEEVRLFFPLHLWVKNVFLNQTRTQRVLFVDSVGLPAPPSIIKAMGGSQPGELQISWEEPAPEISDFLRYELRYGPRDPKNSTGPTVIQLIATETCCPALQRPHSASALDQSPCAQPTMPWQDGPKQTSPSREASALTAEGGSCLISGLQPGNSYWLQLRSEPDGISLGGSWGSWSLPVTVDLPGDAVALGLQCFTLDLKNVTCQWQQQDHASSQGFFYHSRARCCPRDRYPIWENCEEEEKTNPGLQTPQFSRCHFKSRNDSIIHILVEVTTAPGTVHSYLGSPFWIHQAVRLPTPNLHWREISSGHLELEWQHPSSWAAQETCYQLRYTGEGHQDWKVLEPPLGARGGTLELRPRSRYRLQLRARLNGPTYQGPWSSWSDPTRVETATETAWISLVTALHLVLGLSAVLGLLLLRWQFPAHYRYRPRQAGDWRWTRWSRTCKQAFLVRSVTPDLRPPPVRTYGFALPARHLWDSPRLLTL

SEQ ID NO: 6542 - protein, 964 aa, Homo sapiens
MDEQSVESIAEVFRCFICMEKLRDARLCPHCSKLCCFSCIRRWLTEQRAQCPHCRAPLQLRELVNCRWAEEVTQQLDTLQLCSLTKHEENEKDKCENHHEKLSVFCWTCKKCICHQCALWGGMHGGHTFKPLAEIYEQHVTKVNEEVAKLRRRLMELISLVQEVERNVEAVRNAKDERVREIRNAVEMMIARLDTQLKNKLITLMGQKTSLTQETELLESLLQEVEHQLRSCSKSELISKSSEILMMFQQVHRKPMASFVTTPVPPDFTSELVPSYDSATFVLENFSTLRQRADPVYSPPLQVSGLCWRLKVYPDGNGVVRGYYLSVFLELSAGLPETSKYEYRVEMVHQSCNDPTKNIIREFASDFEVGECWGYNRFFRLDLLANEGYLNPQNDTVILRFQVRSPTFFQKSRDQHWYITQLEAAQTSYIQQINNLKERLTIELSRTQKSRDLSPPDNHLSPQNDDALETRAKKSACSDMLLEGGPTTASVREAKEDEEDEEKIQNEDYHHELSDGDLDLDLVYEDEVNQLDGSSSSASSTATSNTEENDIDEETMSGENDVEYNNMELEEGELMEDAAAAGPAGSSHGYVGSSSRISRRTHLCSAATSSLLDIDPLILIHLLDLKDRSSIENLWGLQPRPPASLLQPTASYSRKDKDQRKQQAMWRVPSDLKMLKRLKTQMAEVRCMKTDVKNTLSEIKSSSAASGDMQTSLFSADQAALAACGTENSGRLQDLGMELLAKSSVANCYIRNSTNKKSNSPKPARSSVAGSLSLRRAVDPGENSRSKGDCQTLSEGSPGSSQSGSRHSSPRALIHGSIGDILPKTEDRQCKALDSDAVVVAVFSGLPAVEKRRKMVTLGANAKGGHLEGLQMTDLENNSETGELQPVLPEGASAAPEEGMSSDSDIECDTENEEQEEHTSVGGFHDSFMVMTQPPDEDTHSSFPDGEQIGPEDLSFNTDENSGR

SEQ ID NO: 6543 - protein, 803 aa, Homo sapiens
MHGGHTFKPLAEIYEQHVTKVNEEVAKLRRRLMELISLVQEVERNVEAVRNAKDERVREIRNAVEMMIARLDTQLKNKLITLMGQKTSLTQETELLESLLQEVEHQLRSCSKSELISKSSEILMMFQQVHRKPMASFVTTPVPPDFTSELVPSYDSATFVLENFSTLRQRADPVYSPPLQVSGLCWRLKVYPDGNGVVRGYYLSVFLELSAGLPETSKYEYRVEMVHQSCNDPTKNIIREFASDFEVGECWGYNRFFRLDLLANEGYLNPQNDTVILRFQVRSPTFFQKSRDQHWYITQLEAAQTSYIQQINNLKERLTIELSRTQKSRDLSPPDNHLSPQNDDALETRAKKSACSDMLLEGGPTTASVREAKEDEEDEEKIQNEDYHHELSDGDLDLDLVYEDEVNQLDGSSSSASSTATSNTEENDIDEETMSGENDVEYNNMELEEGELMEDAAAAGPAGSSHGYVGSSSRISRRTHLCSAATSSLLDIDPLILIHLLDLKDRSSIENLWGLQPRPPASLLQPTASYSRKDKDQRKQQAMWRVPSDLKMLKRLKTQMAEVRCMKTDVKNTLSEIKSSSAASGDMQTSLFSADQAALAACGTENSGRLQDLGMELLAKSSVANCYIRNSTNKKSNSPKPARSSVAGSLSLRRAVDPGENSRSKGDCQTLSEGSPGSSQSGSRHSSPRALIHGSIGDILPKTEDRQCKALDSDAVVVAVFSGLPAVEKRRKMVTLGANAKGGHLEGLQMTDLENNSETGELQPVLPEGASAAPEEDTHSSFPDGEQIGPEDLSFNTDENSGR

SEQ ID NO: 6544 - protein, 930 aa, Homo sapiens
MDEQSVERWLTEQRAQCPHCRAPLQLRELVNCRWAEEVTQQLDTLQLCSLTKHEENEKDKCENHHEKLSVFCWTCKKCICHQCALWGGMHGGHTFKPLAEIYEQHVTKVNEEVAKLRRRLMELISLVQEVERNVEAVRNAKDERVREIRNAVEMMIARLDTQLKNKLITLMGQKTSLTQETELLESLLQEVEHQLRSCSKSELISKSSEILMMFQQVHRKPMASFVTTPVPPDFTSELVPSYDSATFVLENFSTLRQRADPVYSPPLQVSGLCWRLKVYPDGNGVVRGYYLSVFLELSAGLPETSKYEYRVEMVHQSCNDPTKNIIREFASDFEVGECWGYNRFFRLDLLANEGYLNPQNDTVILRFQVRSPTFFQKSRDQHWYITQLEAAQTSYIQQINNLKERLTIELSRTQKSRDLSPPDNHLSPQNDDALETRAKKSACSDMLLEGGPTTASVREAKEDEEDEEKIQNEDYHHELSDGDLDLDLVYEDEVNQLDGSSSSASSTATSNTEENDIDEETMSGENDVEYNNMELEEGELMEDAAAAGPAGSSHGYVGSSSRISRRTHLCSAATSSLLDIDPLILIHLLDLKDRSSIENLWGLQPRPPASLLQPTASYSRKDKDQRKQQAMWRVPSDLKMLKRLKTQMAEVRCMKTDVKNTLSEIKSSSAASGDMQTSLFSADQAALAACGTENSGRLQDLGMELLAKSSVANCYIRNSTNKKSNSPKPARSSVAGSLSLRRAVDPGENSRSKGDCQTLSEGSPGSSQSGSRHSSPRALIHGSIGDILPKTEDRQCKALDSDAVVVAVFSGLPAVEKRRKMVTLGANAKGGHLEGLQMTDLENNSETGELQPVLPEGASAAPEEGMSSDSDIECDTENEEQEEHTSVGGFHDSFMVMTQPPDEDTHSSFPDGEQIGPEDLSFNTDENSGR

SEQ ID NO: 6545 - protein, 744 aa, Homo sapiens
MASEGTNIPSPVVRQIDKQFLICSICLERYKNPKVLPCLHTFCERCLQNYIPAHSLTLSCPVCRQTSILPEKGVAALQNNFFITNLMDVLQRTPGSNAEESSILETVTAVAAGKPLSCPNHDGNVMEFYCQSCETAMCRECTEGEHAEHPTVPLKDVVEQHKASLQVQLDAVNKRLPEIDSALQFISEIIHQLTNQKASIVDDIHSTFDELQKTLNVRKSVLLMELEVNYGLKHKVLQSQLDTLLQGQESIKSCSNFTAQALNHGTETEVLLVKKQMSEKLNELADQDFPLHPRENDQLDFIVETEGLKKSIHNLGTILTTNAVASETVATGEGLRQTIIGQPMSVTITTKDKDGELCKTGNAYLTAELSTPDGSVADGEILDNKNGTYEFLYTVQKEGDFTLSLRLYDQHIRGSPFKLKVIRSADVSPTTEGVKRRVKSPGSGHVKQKAVKRPASMYSTGKRKENPIEDDLIFRVGTKGRNKGEFTNLQGVAASTNGKILIADSNNQCVQIFSNDGQFKSRFGIRGRSPGQLQRPTGVAVHPSGDIIIADYDNKWVSIFSSDGKFKTKIGSGKLMGPKGVSVDRNGHIIVVDNKACCVFIFQPNGKIVTRFGSRGNGDRQFAGPHFAAVNSNNEIIITDFHNHSVKVFNQEGEFMLKFGSNGEGNGQFNAPTGVAVDSNGNIIVADWGNSRIQVFDGSGSFLSYINTSADPLYGPQGLALTSDGHVVVADSGNHCFKVYRYLQ

SEQ ID NO: 6546 - protein, 771 aa, Homo sapiens
MHRSGRYGTQQQRAGSKTAGPPCQWSRMASEGTNIPSPVVRQIDKQFLICSICLERYKNPKVLPCLHTFCERCLQNYIPAHSLTLSCPVCRQTSILPEKGVAALQNNFFITNLMDVLQRTPGSNAEESSILETVTAVAAGKPLSCPNHDGNVMEFYCQSCETAMCRECTEGEHAEHPTVPLKDVVEQHKASLQVQLDAVNKRLPEIDSALQFISEIIHQLTNQKASIVDDIHSTFDELQKTLNVRKSVLLMELEVNYGLKHKVLQSQLDTLLQGQESIKSCSNFTAQALNHGTETEVLLVKKQMSEKLNELADQDFPLHPRENDQLDFIVETEGLKKSIHNLGTILTTNAVASETVATGEGLRQTIIGQPMSVTITTKDKDGELCKTGNAYLTAELSTPDGSVADGEILDNKNGTYEFLYTVQKEGDFTLSLRLYDQHIRGSPFKLKVIRSADVSPTTEGVKRRVKSPGSGHVKQKAVKRPASMYSTGKRKENPIEDDLIFRVGTKGRNKGEFTNLQGVAASTNGKILIADSNNQCVQIFSNDGQFKSRFGIRGRSPGQLQRPTGVAVHPSGDIIIADYDNKWVSIFSSDGKFKTKIGSGKLMGPKGVSVDRNGHIIVVDNKACCVFIFQPNGKIVTRFGSRGNGDRQFAGPHFAAVNSNNEIIITDFHNHSVKVFNQEGEFMLKFGSNGEGNGQFNAPTGVAVDSNGNIIVADWGNSRIQVFDGSGSFLSYINTSADPLYGPQGLALTSDGHVVVADSGNHCFKVYRYLQ

SEQ ID NO: 6547 - protein, 351 aa, Homo sapiens
MQRALPGARQHLGAILASASVVVKALCAAVLFLYLLSFAVDTGCLAVTPGYLFPPNFWIWTLATHGLMEQHVWDVAISLTTVVVAGRLLEPLWGALELLIFFSVVNVSVGLLGAFAYLLTYMASFNLVYLFTVRIHGALGFLGGVLVALKQTMGDCVVLRVPQVRVSVMPMLLLALLLLLRLATLLQSPALASYGFGLLSSWVYLRFYQRHSRGRGDMADHFAFATFFPEILQPVVGLLANLVHSLLVKVKICQKTVKRYDVGAPSSITISLPGTDPQDAERRRQLALKALNERLKRVEDQSIWPSMDDDEEESGAKVDSPLPSDKAPTPPGKGAAPESSLITFEAAPPTL

SEQ ID NO: 6548 - protein, 1249 aa, Homo sapiens
MATAATEEPFPFHGLLPKKETGAASFLCRYPEYDGRGVLIAVLDTGVDPGAPGMQVTTDGKPKIVDIIDTTGSGDVNTATEVEPKDGEIVGLSGRVLKIPASWTNPSGKYHIGIKNGYDFYPKALKERIQKERKEKIWDPVHRVALAEACRKQEEFDVANNGSSQANKLIKEELQSQVELLNSFEKKYSDPGPVYDCLVWHDGEVWRACIDSNEDGDLSKSTVLRNYKEAQEYGSFGTAEMLNYSVNIYDDGNLLSIVTSGGAHGTHVASIAAGHFPEEPERNGVAPGAQILSIKIGDTRLSTMETGTGLIRAMIEVINHKCDLVNYSYGEATHWPNSGRICEVINEAVWKHNIIYVSSAGNNGPCLSTVGCPGGTTSSVIGVGAYVSPDMMVAEYSLREKLPANQYTWSSRGPSADGALGVSISAPGGAIASVPNWTLRGTQLMNGTSMSSPNACGGIALILSGLKANNIDYTVHSVRRALENTAVKADNIEVFAQGHGIIQVDKAYDYLVQNTSFANKLGFTVTVGNNRGIYLRDPVQVAAPSDHGVGIEPVFPENTENSEKISLQLHLALTSNSSWVQCPSHLELMNQCRHINIRVDPRGLREGLHYTEVCGYDIASPNAGPLFRVPITAVIAAKVNESSHYDLAFTDVHFKPGQIRRHFIEVPEGATWAEVTVCSCSSEVSAKFVLHAVQLVKQRAYRSHEFYKFCSLPEKGTLTEAFPVLGGKAIEFCIARWWASLSDVNIDYTISFHGIVCTAPQLNIHASEGINRFDVQSSLKYEDLAPCITLKNWVQTLRPVSAKTKPLGSRDVLPNNRQLYEMVLTYNFHQPKSGEVTPSCPLLCELLYESEFDSQLWIIFDQNKRQMGSGDAYPHQYSLKLEKGDYTIRLQIRHEQISDLERLKDLPFIVSHRLSNTLSLDIHENHSFALLGKKKSSNLTLPPKYNQPFFVTSLPDDKIPKGAGPGCYLAGSLTLSKTELGKKADVIPVHYYLIPPPTKTKNGSKDKEKDSEKEKDLKEEFTEALRDLKIQWMTKLDSSDIYNELKETYPNYLPLYVARLHQLDAEKERMKRLNEIVDAANAVISHIDQTALAVYIAMKTDPRPDAATIKNDMDKQKSTLVDALCRKGCALADHLLHTQAQDGAISTDAEGKEEEGESPLDSLAETFWETTKWTDLFDNKVLTFAYKHALVNKMYGRGLKFATKLVEEKPTKENWKNCIQLMKLLGWTHCASFTENWLPIMYPPDYCVF

SEQ ID NO: 6549 - protein, 243 aa, Homo sapiens [sequence omitted]

SEQ ID NO: 6550 - protein, 124 aa, Homo sapiens
MVDVIVTLGGLAGRFDQIMASVNTLFQATHITPFPIIIIQEESLIYLLQPGKHRLHVDTGMEGDWCGLIPVGQPCMQVTTTGLKWNLRTCDYTRTTWIAKDNPVPRLIRLIRLNHICKVPLAIK

SEQ ID NO: 6551 - protein, 173 aa, Homo sapiens
MARMNRPAPVEVTYKNMRFLITHNPTNATLNKFIEELKKYGVTTIVRVCEATYDTTLVEKEGIHVLDWPFDDGAPPSNQIVDDWLSLVKIKFREEPGCCIAVHCVAGLGRAPVLVALALIEGGMKYEDAVQFIRQKRRGAFNSKQLLYLEKYRPKMRLRFKDSNGHRNNCCIQ

SEQ ID NO: 6552 - protein, 476 aa, Homo sapiens
MWTGYKILIFSYLTTEIWMEKQYLSQREVDLEAYFTRNHTVLQGTRFKRAIFQGQYCRNFGCCEDRDDGCVTEFYAANALCYCDKFCDRENSDCCPDYKSFCREEKEWPPHTQPWYPEGCFKDGQHYEEGSVIKENCNSCTCSGQQWKCSQHVCLVRSELIEQVNKGDYGWTAQNYSQFWGMTLEDGFKFRLGTLPPSPMLLSMNEMTASLPATTDLPEFFVASYKWPGWTHGPLDQKNCAASWAFSTASVAADRIAIQSKGRYTANLSPQNLISCCAKNRHGCNSGSIDRAWWYLRKRGLVSHACYPLFKDQNATNNGCAMASRSDGRGKRHATKPCPNNVEKSNRIYQCSPPYRVSSNETEIMKEIMQNGPVQAIMQVREDFFHYKTGIYRHVTSTNKESEKYRKLQTHAVKLTGWGTLRGAQGQKEKFWIAANSWGKSWGENGYFRILRGVNESDIEKLIIAAWGQLTSSDEP

SEQ ID NO: 6553 - protein, 333 aa, Homo sapiens
MWTGYKILIFSYLTTEIWMEKQYLSQREVDLEAYFTRNHTVLQGTRFKRAIFQGQYCRNFGCCEDRDDGCVTEFYAANALCYCDKFCDRENSDCCPDYKSFCREEKEWPPHTQPWYPEGWTAQNYSQFWGMTLEDGFKFRLGTLPPSPMLLSMNEMTLVSHACYPLFKDQNATNNGCAMASRSDGRGKRHATKPCPNNVEKSNRIYQCSPPYRVSSNETEIMKEIMQNGPVQAIMQVREDFFHYKTGIYRHVTSTNKESEKYRKLQTHAVKLTGWGTLRGAQGQKEKFWIAANSWGKSWGENGYFRILRGVNESDIEKLIIAAWGQLTSSDEP

SEQ ID NO: 6554 - protein, 973 aa, Homo sapiens
MAQLYYKKVNYSPYRDRIPLQIVRAETELSAEEKAFLNAVEKGDYATVKQALQEAEIYYNVNINCMDPLGRSALLIAIENENLEIMELLLNHSVYVGDALLYAIRKEVVGAVELLLSYRRPSGEKQVPTLMMDTQFSEFTPDITPIMLAAHTNNYEIIKLLVQKRVTIPRPHQIRCNCVECVSSSEVDSLRHSRSRLNIYKALASPSLIALSSEDPILTAFRLGWELKELSKVENEFKAEYEELSQQCKLFAKDLLDQARSSRELEIILNHRDDHSEELDPQKYHDLAKLKVAIKYHQKEFVAQPNCQQLLATLWYDGFPGWRRKHWVVKLLTCMTIGFLFPMLSIAYLISPRSNLGLFIKKPFIKFICHTASYLTFLFMLLLASQHIVRTDLHVQGPPPTVVEWMILPWVLGFIWGEIKEMWDGGFTEYIHDWWNLMDFAMNSLYLATISLKIVAYVKYNGSRPREEWEMWHPTLIAEALFAISNILSSLRLISLFTANSHLGPLQISLGRMLLDILKFLFIYCLVLLAFANGLNQLYFYYETRAIDEPNNCKGIRCEKQNNAFSTLFETLQSLFWSVFGLLNLYVTNVKARHEFTEFVGATMFGTYNVISLVVLLNMLIAMMNNSYQLIADHADIEWKFARTKLWMSYFDEGGTLPPPFNIIPSPKSFLYLGNWFNNTFCPKRDPDGRRRRRNLRSFTERNADSLIQNQHYQEVIRNLVKRYVAAMIRNSKTHEGLTEENFKELKQDISSFRYEVLDLLGNRKHPRSFSTSSTELSQRDDNNDGSGGARAKSKSVSFNLGCKKKTCHGPPLIRTMPRSSGAQGKSKAESSSKRSFMGPSLKKLGLLFSKFNGHMSEPSSEPMYTISDGIVQQHCMWQDIRYSQMEKGKAEACSQSEINLSEVELGEVQGAAQSSECPLACSSSLHCASSICSSNSKLLDSSEDVFETWGEACDLLMHKWGDGQEEQVTTRL

SEQ ID NO: 6555 - protein, 841 aa, Homo sapiens
MLLCTARLVGLQLLISCCWAFACHSTESSPDFTLPGDYLLAGLFPLHSGCLQVRHRPEVTLCDRSCSFNEHGYHLFQAMRLGVEEINNSTALLPNITLGYQLYDVCSDSANVYATLRVLSLPGQHHIELQGDLLHYSPTVLAVIGPDSTNRAATTAALLSPFLVPMISYAASSETLSVKRQYPSFLRTIPNDKYQVETMVLLLQKFGWTWISLVGSSDDYGQLGVQALENQATGQGICIAFKDIMPFSAQVGDERMQCLMRHLAQAGATVVVVFSSRQLARVFFESVVLTNLTGKVWVASEAWALSRHITGVPGIQRIGMVLGVAIQKRAVPGLKAFEEAYARADKKAPRPCHKGSWCSSNQLCRECQAFMAHTMPKLKAFSMSSAYNAYRAVYAVAHGLHQLLGCASGACSRGRVYPWQLLEQIHKVHFLLHKDTVAFNDNRDPLSSYNIIAWDWNGPKWTFTVLGSSTWSPVQLNINETKIQWHGKDNQVPKSVCSSDCLEGHQRVVTGFHHCCFECVPCGAGTFLNKSDLYRCQPCGKEEWAPEGSQTCFPRTVVFLALREHTSWVLLAANTLLLLLLLGTAGLFAWHLDTPVVRSAGGRLCFLMLGSLAAGSGSLYGFFGEPTRPACLLRQALFALGFTIFLSCLTVRSFQLIIIFKFSTKVPTFYHAWVQNHGAGLFVMISSAAQLLICLTWLVVWTPLPAREYQRFPHLVMLECTETNSLGFILAFLYNGLLSISAFACSYLGKDLPENYNEAKCVTFSLLFNFVSWIAFFTTASVYDGKYLPAANMMAGLSSLSSGFGGYFLPKCYVILCRPDLNSTEHFQASIQDYTRRCGST

SEQ ID NO: 6556 - protein, 587 aa, Homo sapiens
MLLCTARLVGLQLLISCCWAFACHSTESSPDFTLPGDYLLAGLFPLHSGCLQVRHRPEVTLCDRSCSFNEHGYHLFQAMRLGVEEINNSTALLPNITLGYQLYDVCSDSANVYATLRVLSLPGQHHIELQGDLLHYSPTVLAVIGPDSTNRAATTAALLSPFLVPMLLEQIHKVHFLLHKDTVAFNDNRDPLSSYNIIAWDWNGPKWTFTVLGSSTWSPVQLNINETKIQWHGKDNQVPKSVCSSDCLEGHQRVVTGFHHCCFECVPCGAGTFLNKSDLYRCQPCGKEEWAPEGSQTCFPRTVVFLALREHTSWVLLAANTLLLLLLLGTAGLFAWHLDTPVVRSAGGRLCFLMLGSLAAGSGSLYGFFGEPTRPACLLRQALFALGFTIFLSCLTVRSFQLIIIFKFSTKVPTFYHAWVQNHGAGLFVMISSAAQLLICLTWLVVWTPLPAREYQRFPHLVMLECTETNSLGFILAFLYNGLLSISAFACSYLGKDLPENYNEAKCVTFSLLFNFVSWIAFFTTASVYDGKYLPAANMMAGLSSLSSGFGGYFLPKCYVILCRPDLNSTEHFQASIQDYTRRCGST

SEQ ID NO: 6557 - protein, 480 aa, Homo sapiens
MLLCTARLVGLQLLISCCWAFACHSTESSPDFTLPGDYLLAGLFPLHSGCLQVRHRPEVTLCDRSCSFNEHGYHLFQAMRLGVEEINNSTALLPNITLGYQLYDVCSDSANVYATLRVLSLPGQHHIELQGDLLHYSPTVLAVIGPDSTNRAATTAALLSPFLVPMLSYAASSETLSVKRQYPSFLRTIPNDKYQVETMVLLLQKFGWTWISLVGSSDDYGQLGVQALENQATGQGICIAFKDIMPFSAQVGDERMQCLMRHLAQAGATVVVVFSSRQLARVFFESVVLTNLTGKVWVASEAWALSRHITGVPGIQRIGMVLGVAIQKRAVPGLKAFEEAYARADKKAPRPCHKGSWCSSNQLCRECQAFMAHTMPKLKAFSMSSAYNAYRAVYAVAHGLHQLLGCASGACSRGRVYPWQTSTDASLVGKKSGHLREARPASRALWCFWLCVSTPLGCCWQLTRCCCCCCLGLLACLPGT

SEQ ID NO: 6558 - protein, 320 aa, Homo sapiens
  MOD_RES (318)..(318): Any amino acid
MLLCTARLVGLQLLISCCWAFACHSTESSPDFTLPGDYLLAGLFPLHSGCLQVRHRPEVTLCDRSCSFNEHGYHLFQAMRLGVEEINNSTALLPNITLGYQLYDVCSDSANVYATLRVLSLPGQHHIELQGDLLHYSPTVLAVIGPDSTNRAATTAALLSPFLVPMLLEQIHKVHFLLHKDTVAFNDNRDPLSSYNIIAWDWNGPKWTFTVLGSSTWSPVQLNINETKIQWHGKDNQVPKSVCSSDCLEGHQRVVTGFHHCCFECVPCGAGTFLNKSATWVRTCQRTTTRTNVSPSACSSTSCPGSPSSPRPASTTAXTC

SEQ ID NO: 6559 - protein, 439 aa, Homo sapiens
MVPSREALLGPGTTAIRCPKKLQNQNYKGHGLSKGKEREQRASIRFKTTLMNTLMDVLRHRPGWVEVKDEGEWDFYWCDVSWLRENFDHTYMDEHVRISHFRNHYELTRKNYMVKNLKRFRKQLEREAGKLEAAKCDFFPKTFEMPCEYHLFVEEFRKNPGITWIMKPVARSQGKGIFLFRRLKDIVDWRKDTRSSDDQKDDIPVENYVAQRYIENPYLIGGRKFDLRVYVLVMSVFAECLLWSGHRRQDVHLTNVAVQKTSPDYHPKKGCKWTLQRFRQYLASKHGPEAVETLFRDIDNIFVKSLQSVQKVIISDKHCFELYGYDILIDQDLKPWLLEVNASPSLTASSQEDYELKTCLLEDTLHVVDMEARLTGREKRVGGFDLMWNDGPVSREEGAPDLSGMGNFVTNTHLGCVNDRKKQLRQLFCSLQVQKKASS

SEQ ID NO: 6560 - protein, 347 aa, Homo sapiens
MNTLMDVLRHRPGWVEVKDEGEWDFYWCDVSWLRENFDHTYMDEHVRISHFRNHYELTRKNYMVKNLKRFRKQLEREAGKLEAAKCDFFPKTFEMPCEYHLFVEEFRKNPGITWIMKPVARSQGKGIFLFRRLKDIVDWRKDTRSSDDQKDDIPVENYVAQRYIENPYLIGGRKFDLRVYVLVMSYIPLRAWLYRDGFARFSNTRFTLNSIDDQYVHLTNVAVQKTSPDYHPKKGCKWTLQRFRQYLASKHGPEAVETLFRDIDNIFVKSLQSVQKVIISDKHCFELYGYDILIDQDLKPWLLEVNASPSLTASSQEDYELKTCLLEDTLHVVDMEARSLRADSPCW

SEQ ID NO: 6561 - protein, 230 aa, Homo sapiens
MNTLMDVLRHRPGWVEVKDEGEWDFYWCDVSWLRENFDHTYMDEHVRISHFRNHYELTRKNYMVKNLKRFRKQLEREAGKLEAAKCDFFPKTFEMPCEYHLFVEEFRKNPGITWIMKPDTRSSDDQKDDIPVENYVAQRYIENPYLIGGRKFDLRVYVLVMSYIPLRAWLYRDGFARFSNTRFTLNSIDDQYVHLTNVAVQKTSPDYHPKKVAPGGQCVPITDSQQPGRL

SEQ ID NO: 6562 - protein, 320 aa, Homo sapiens
MGPWSRVRVAKCQMLVTCFFILLLGLSVATMVTLTYFGAHFAVIRRASLEKNPYQAVHQWAFSAGLSLVGLLTLGAVLSAAATVREAQGLMAGGFLCFSLAFCAQVQVVFWRLHSPTQVEDAMLDTYDLVYEQAMKGTSHVRRQELAAIQDVFLCCGKKSPFSRLGSTEADLCQGEEAAREDCLQGIRSFLRTHQQVASSLTSIGLALTVSALLFSSFLWFAIRCGCSLDRKGKYTLTPRACGRQPQEPSLLRCSQGGPTHCLHSEAVAIGPRGCSGSLRWLQESDAAPLPLSCHLAAHRALQGRSRGGLSGCPERGLSD

SEQ ID NO: 6563 - protein, 290 aa, Homo sapiens
MVTLTYFGAHFAVIRRASLEKNPYQAVHQWAFSAGLSLVGLLTLGAVLSAAATVREAQGLMAGGFLCFSLAFCAQVQVVFWRLHSPTQVEDAMLDTYDLVYEQAMKGTSHVRRQELAAIQDVFLCCGKKSPFSRLGSTEADLCQGEEAAREDCLQGIRSFLRTHQQVASSLTSIGLALTVSALLFSSFLWFAIRCGCSLDRKGKYTLTPRACGRQPQEPSLLRCSQGGPTHCLHSEAVAIGPRGCSGSLRWLQESDAAPLPLSCHLAAHRALQGRSRGGLSGCPERGLSD

SEQ ID NO: 6564 - protein, 253 aa, Homo sapiens
MGPWSRVRVAKCQMLVTCFFILLLGLSVATMVTLTYFGAHFAVIRRASLEKNPYQAVHQWAFSAGLSLVGLLTLGAVLSAAATVREAQGLMAGGFLCFSLAFCAQVQVVFWRLHSPTQVEDAMLDTYDLVYEQAMKGTSHVRRQELAAIQDVFLCCGKKSPFSRLGSTEADLCQGEEAAREDCLQGIRSFLRTHQQVASSLTSIGLALTVSALLFSSFLWFAIRCGCSLDRKGKYTLTPRSPGQKSRWAQWVP

SEQ ID NO: 6565 - protein, 124 aa, Homo sapiens
MVTLTYFGAHFAVIRRASLEKNPYQAVHQWAFSAGLSLVGLLTLGAVLSAAATVREAQGLMAGGFLCFSLAFCAQVQVVFWRLHSPTQVEDAMLDTYDLVYEQAMKVSVLWEEVSFQPSGEHRG

SEQ ID NO: 6566 - protein, 258 aa, Homo sapiens
MGPWSRVRVAKCQMLVTCFFILLLGLSVATMVTLTYFGAHFAVIRRASLEKNPYQAVHQWAFSAGLSLVGLLTLGAVLSAAATVREAQGLMAGGFLCFSLAFCAQVQVVFWRLHSPTQVEDAMLDTYDLVYEQAMKGTSHVRRQELAAIQDVFLCCGKKSPFSRLGSTEADLCQGEEAAREDCLQGIRSFLRTHQQVASSLTSIGLALTLGPQGQIHPDPTSMWPPAPGAQPLEMLPGWTHTLSPLRSSCYWSKRMLG

SEQ ID NO: 6567 - protein, 534 aa, Homo sapiens
MQAARVDYIAPWWVVWLHSVPHVGLRLQPVNSTFSPGDESYQESLLFLGLVAAVCLGLNLIFLVAYLVCACHCRRDDAVQTKQHHSCCITWTAVVAGLICCAAVGVGFYGNSETNDGAYQLMYSLDDANHTFSGIDALVSGTTQKMKVDLEQHLARLSEIFAARGDYLQTLKFIQQMAGSVVVQLSGLPVWREVTMELTKLSDQTGYVEYYRWLSYLLLFILDLVICLIACLGLAKRSKCLLASMLCCGALSLLLSWASLAADGSAAVATSDFCVAPDTFILNVTEGQISTEVTRYYLYCSQSGSSPFQQTLTTFQRALTTMQIQVAGLLQFAVPLFSTAEEDLLAIQLLLNSSESSLHQLTAMVDCRGLHKDYLDALAGICYDGLQGLLYLGLFSFLAALAFSTMICAGPRAWKHFTTRNRDYDDIDDDDPFNPQAWRMAAHSPPRGQLHSFCSYSSGLGSQTSLQPPAQTISNAPVSEYMNQAMLFGRNPRYENVPLIGRASPPPTYSPSMRATYLSVADEHLRHYGNQFPA

SEQ ID NO: 6568 - protein, 213 aa, Homo sapiens
MQIQVAGLLQFAVPLFSTAEEDLLAIQLLLNSSESSLHQLTAMVDCRGLHKDYLDALAGICYDGLQGLLYLGLFSFLAALAFSTMICAGPRAWKHFTTRNRDYDDIDDDDPFNPQAWRMAAHSPPRGQLHSFCSYSSGLGSQTSLQPPAQTISNAPVSEYMNQAMLFGRNPRYENVPLIGRASPPPTYSPSMRATYLSVADEHLRHYGNQFPA

SEQ ID NO: 6569 - protein, 308 aa, Homo sapiens
MRPEGSLTYWVPERLRQGFCGVGRAAQALVCASAKEGTAFRMEAVQEGAAGVESEQAALGEEAVLLLDDIMAEVEVVAEEEGLVERREEAQRAQQAVPGPGPMTPESALEELLAVQVELEPVNAQARKAFSRQREKMERRRKPHLDRRGAVIQSVPGFWANVIANHPQMSALITDEDEDMLSYMVSLEVEEEKHPVHLCKIMLFFRSNPYFQNKVITKEYLVNITEYRASHSTPIEWYLDYEVEAYRRRHHNSSLNFFNWFSDHNFAGSNKIAEILCKDLWRNPLQYYKRMKPPEEGTETSGDSQLLS

SEQ ID NO: 6570 - protein, 355 aa, Homo sapiens
MADKRAGTPEAAARPPPGLAREGDARTVPAARAREAGGRGSLHPAAGPGTAFPSPGRGEAASTATTPSLENGRVRDEAPETCGAEGLGTRAGASEKAEDANKEEGAIFKKEPAEEVEKQQEGEEKQEVAAEAQEGPRLLNLGALIVDPLEAIQWEAEAVSAQADRAYLPLERRFGRMHRLYLARRSFIIQNIPGFWVTAFLNHPQLSAMISPRDEDMLCYLMNLEVRELRHSRTGCKFKFRFWSNPYFQNKVIVKEYECRASGRVVSIATRIRWHWGQEPPALVHRNRDTVRSFFSWFSQHSLPEADRVAQIIKDDLWPNPLQYYLLGDRPCRARGGLARWPTETPSRPYGFQSG

SEQ ID NO: 6571 - protein, 358 aa, Homo sapiens
MDDATVLRKKGYIVGINLGKGSYAKVKSAYSERLKFNVAVKIIDRKKTPTDFVERFLPREMDILATVNHGSIIKTYEIFETSDGRIYIIMELGVQGDLLEFIKCQGALHEDVARKMFRQLSSAVKYCHDLDIVHRDLKCENLLLDKDFNIKLSDFGFSKRCLRDSNGRIILSKTFCGSAAYAAPEVLQSIPYQPKVYDIWSLGVILYIMVCGSMPYDDSDIRKMLRIQKEHRVDFPRSKNLTCECKDLIYRMLQPDVSQRLHIDEILSHSWLQPPKPKATSSASFKREGEGKYRAECKLDTKTGLRPDHRPDHKLGAKTQHRLLVVPENENRMEDRLAETSRAKDHHISGAEVGKAST

SEQ ID NO: 6572 - protein, 530 aa, Homo sapiens
MSLKWMSVFLLMQLSCYFSSGSCGKVLVWPTEYSHWINMKTILEELVQRGHEVIVLTSSASILVNASKSSAIKLEVYPTSLTKNDLEDFFMKMFDRWTYSISKNTFWSYFSQLQELCWEYSDYNIKLCEDAVLNKKLMRKLQESKFDVLLADAVNPCGELLAELLNIPFLYSLRFSVGYTVEKNGGGFLFPPSYVPVVMSELSDQMIFMERIKNMIYMLYFDFWFQAYDLKKWDQFYSEVLGRPTTLFETMGKAEMWLIRTYWDFEFPRPFLPNVDFVGGLHCKPAKPLPKEMEEFVQSSGENGIVVFSLGSMISNMSEESANMIASALAQIPQKVLWRFDGKKPNTLGSNTRLYKWLPQNDLLGHPKTKAFITHGGTNGIYEAIYHGIPMVGIPLFADQHDNIAHMKAKGAALSVDIRTMSSRDLLNALKSVINDPIYKENIMKLSRIHHDQPVKPLDRAVFWIEFVMRHKGAKHLRVAAHNLTWIQYHSLDVIAFLLACVATMIFMITKCCLFCFRKLAKTGKKKKRD

SEQ ID NO: 6573 - protein, 719 aa, Homo sapiens
MPRRKKKVKEVSESRNLEKKDVETTSSVSVKRKRRLEDAFIVISDSDGEEPKEENGLQKTKTKQSNRAKCLAKRKIAQMTEEEQFALALKMSEQEAREVNSQEEEEEELLRKAIAESLNSCRPSDASATRSRPLATGPSSQSHQEKTTDSGLTEGIWQLVPPSLFKGSHISQGNEAEEREEPWDHTEKTEEEPVSGSSGSWDQSSQPVFENVNVKSFDRCTGHSAEHTQCGKPQESTGRGSAFLKAVQGSGDTSRHCLPTLADAKGLQDTGGTVNYFWGIPFCPDGVDPNQYTKVILCQLEVYQKSLKMAQRQLLNKKGFGEPVLPRPPSLIQNECGQGEQASEKNECISEDMGDEDKEERQESRASDWHSKTKDFQESSIKSLKEKLLLEEEPTTSHGQSSQGIVEETSEEGNSVPASQSVAALTSKRSLVLMPESSAEEITVCPETQLSSSETFDLEREVSPGSRDILDGVRIIMADKEVGNKEDAEKEVAISTFSSSNQVSCPLCDQCFPPTKIERHAMYCNGLMEEDTVLTRRQKEAKTKSDSGTAAQTSLDIDKNEKCYLCKSLVPFREYQCHVDSCLQLAKADQGDGPEGSGRACSTVEGKWQQRLKNPKEKGHSEGRLLSFLEQSEHKTSDADIKSSETGAFRVPSPGMEEAGCSREMQSSFTRRDLNESPVKSFVSISEATDCLVDFKKQVTVQPGSRTRTKAGRGRRRKF

SEQ ID NO: 6574 - protein, 553 aa, Homo sapiens
MPRRKKKVKEVSESRNLEKKDVETTSSVSVKRKRRLEDAFIVISDSDGEEPKEENGLQKTKTKQSNRAKCLAKRKIAQMTEEEQFALALKMSEQEAREVNSQEEEEEELLRKAIAESLNSCRPSDASATRSRPLATGPSSQSHQEKTTDSGLTEGIWQLVPPSLFKGSHISQGNEAEEREEPWDHTEKTEEEPVSGSSGSWDQSSQPVFENVNVKSFDRCTGHSAEHTQCGKPQSSQGIVEETSEEGNSVPASQSVAALTSKRSLVLMPESSAEEITVCPETQLSSSETFDLEREVSPGSRDILDGVRIIMADKEVGNKEDAEKEVAISTFSSSNQVSCPLCDQCFPPTKIERHAMYCNGLMEEDTVLTRRQKEAKTKSDSGTAAQTSLDIDKNEKCYLCKSLVPFREYQCHVDSCLQLAKADQGDGPEGSGRACSTVEGKWQQRLKNPKEKGHSEGRLLSFLEQSEHKTSDADIKSSETGAFRVPSPGMEEAGCSREMQSSFTRRDLNESPVKSFVSISEATDCLVDFKKQVTVQPGSRTRTKAGRGRRRKF

SEQ ID NO: 6575 - protein, 641 aa, Homo sapiens
MTEEEQFALALKMSEQEAREVNSQEEEEEELLRKAIAESLNSCRPSDASATRSRPLATGPSSQSHQEKTTDSGLTEGIWQLVPPSLFKGSHISQGNEAEEREEPWDHTEKTEEEPVSGSSGSWDQSSQPVFENVNVKSFDRCTGHSAEHTQCGKPQESTGRGSAFLKAVQGSGDTSRHCLPTLADAKGLQDTGGTVNYFWGIPFCPDGVDPNQYTKVILCQLEVYQKSLKMAQRQLLNKKGFGEPVLPRPPSLIQNECGQGEQASEKNECISEDMGDEDKEERQESRASDWHSKTKDFQESSIKSLKEKLLLEEEPTTSHGQSSQGIVEETSEEGNSVPASQSVAALTSKRSLVLMPESSAEEITVCPETQLSSSETFDLEREVSPGSRDILDGVRIIMADKEVGNKEDAEKEVAISTFSSSNQVSCPLCDQCFPPTKIERHAMYCNGLMEEDTVLTRRQKEAKTKSDSGTAAQTSLDIDKNEKCYLCKSLVPFREYQCHVDSCLQLAKADQGDGPEGSGRACSTVEGKWQQRLKNPKEKGHSEGRLLSFLEQSEHKTSDADIKSSETGAFRVPSPGMEEAGCSREMQSSFTRRDLNESPVKSFVSISEATDCLVDFKKQVTVQPGSRTRTKAGRGRRRKF

SEQ ID NO: 6576 - protein, 349 aa, Homo sapiens
MLPLPDLDLWPLDRLPSPIKRKPQTLGSLKSSQGIVEETSEEGNSVPASQSVAALTSKRSLVLMPESSAEEITVCPETQLSSSETFDLEREVSPGSRDILDGVRIIMADKEVGNKEDAEKEVAISTFSSSNQVSCPLCDQCFPPTKIERHAMYCNGLMEEDTVLTRRQKEAKTKSDSGTAAQTSLDIDKNEKCYLCKSLVPFREYQCHVDSCLQLAKADQGDGPEGSGRACSTVEGKWQQRLKNPKEKGHSEGRLLSFLEQSEHKTSDADIKSSETGAFRVPSPGMEEAGCSREMQSSFTRRDLNESPVKSFVSISEATDCLVDFKKQVTVQPGSRTRTKAGRGRRRKF

SEQ ID NO: 6577 - protein, 152 aa, Homo sapiens
MPRRKKKVKEVSESRNLEKKDVETTSSVSVKRKRRLEDAFIVISDSDGEEPKEENGLQKTKTKQSNRAKCLAKRKIAQMTEEEQFALALKMSEQEAREVNSQEEEEEELLRKAIAESLNVNMPCCKSLWRLISYIFDFCGVVVALGTSCSHL

SEQ ID NO: 6578 - protein, 277 aa, Homo sapiens
MASAGGEDCESPAPEADRPHQRPFLIGVSGGTASGKSTVCEKIMELLGQNEVEQRQRKVVILSQDRFYKVLTAEQKAKALKGQYNFDHPDAFDNDLMHRTLKNIVEGKTVEVPTYDFVTHSRLPETTVVYPADVVLFEGILVFYSQEIRDMFHLRLFVDTDSDVRLSRRVLRDVRRGRDLEQILTQYTTFVKPAFEEFCLPTKKYADVIIPRGVDNMVAINLIVQHIQDILNGDICKWHRGGSNGRSYKRTFSEPGDHPGMLTSGKRSHLESSSRPH

SEQ ID NO: 6579 - protein, 201 aa, Homo sapiens
MASAGGEDCESPAPEADRPHQRPFLIGVSGGTASGKSTVCEKIMELLGQNEVEQRQRKVVILSQDRFYKVLTAEQKAKALKGQYNFDHPDAFDNDLMHRTLKNIVEGKTVEVPTYDFVTHSRLPETTVVYPADVVLFEGILVFYSQEIRDMFHLRLFVDTDSDVRLSRRDKEVCRCDHPARSGQYGCHQPDRAAHPGHSEW

SEQ ID NO: 6580 - protein, 268 aa, Homo sapiens
MASAGGEDCESPAPEADRPHQRPFLIGSTVCEKIMELLGQNEVEQRQRKVVILSQDRFYKVLTAEQKAKALKGQYNFDHPDAFDNDLMHRTLKNIVEGKTVEVPTYDFVTHSRLPETTVVYPADVVLFEGILVFYSQEIRDMFHLRLFVDTDSDVRLSRRVLRDVRRGRDLEQILTQYTTFVKPAFEEFCLPTKKYADVIIPRGVDNMVAINLIVQHIQDILNGDICKWHRGGSNGRSYKRTFSEPGDHPGMLTSGKRSHLESSSRPH

SEQ ID NO: 6581 - protein, 282 aa, Homo sapiens
MASAGGEDCESPAPEADRPHQRPFLIGDERFQAGIPLLCLQSTVCEKIMELLGQNEVEQRQRKVVILSQDRFYKVLTAEQKAKALKGQYNFDHPDAFDNDLMHRTLKNIVEGKTVEVPTYDFVTHSRLPETTVVYPADVVLFEGILVFYSQEIRDMFHLRLFVDTDSDVRLSRRVLRDVRRGRDLEQILTQYTTFVKPAFEEFCLPTKKYADVIIPRGVDNMVAINLIVQHIQDILNGDICKWHRGGSNGRSYKRTFSEPGDHPGMLTSGKRSHLESSSRPH

SEQ ID NO: 6582 - protein, 196 aa, Homo sapiens
MWFMYLLSWLSLFIQVAFITLAVAAGLYYLAELIEEYTVATSRIIKYMIWFSTAVLIGLYVFERFPTSMIGVGLFTNLVYFGLLQTFPFIMLTSPNFILSCGLVVVNHYLAFQFFAEEYYPFSEVLAYFTFCLWIIPFAFFVSLSAGENVLPSTMQPGDDVVSNYFTKGKRGKRLGILVVFSFIKEAILPSRQKIY

SEQ ID NO: 6583 - protein, 253 aa, Homo sapiens
MAAAFRKAAKSRQREHRERSQPGFRKHLGLLEKKKDYKLRADDYRKKQEYLKALRKKALEKNPDEFYYKMTRVKLQDGVHIIKETKEEVTPEQLKLMRTQDVKYIEMKRVAEAKKIERLKSELHLLDFQGKQQNKHVFFFDTKKEVEQFDVATHLQTAPELVDRVFNRPRIETLQKEKVKGVTNQTGLKRIAKERQKQYNCLTQRIEREKKLFVIAQKIQTRKDLMDKTQKVKVKKETVNSPAIYKFQSRRKR

SEQ ID NO: 6584 - protein, 148 aa, Homo sapiens
MAAAFRKAAKSRQREHRERSQPGFRKHLGLLEKKKDYKLRADDYRKKQEYLKALRKKALEKNPDEFYYKMTRVKLQDGVHIIKETKEEVTPEQLKLMRTQDVKYIEMKRVAEAKKIERLKSELHLLDFQGKQQNKHVFFFDTKKEANS

SEQ ID NO: 6585 - protein, 427 aa, Homo sapiens
MEAMAASTSLPDPGDFDRNVPRICGVCGDRATGFHFNAMTCEGCKGFFRRSMKRKALFTCPFNGDCRITKDNRRHCQACRLKRCVDIGMMKEFILTDEEVQRKREMILKRKEEEALKDSLRPKLSEEQQRIIAILLDAHHKTYDPTYSDFCQFRPPVRVNDGGGSHPSRPNSRHTPSFSGDSSSSCSDHCITSSDMMDSSSFSNLDLSEEDSDDPSVTLELSQLSMLPHLADLVSYSIQKVIGFAKMIPGFRDLTSEDQIVLLKSSAIEVIMLRSNESFTMDDMSWTCGNQDYKYRVSDVTKAGHSLELIEPLIKFQVGLKKLNLHEEEHVLLMAICIVSPDRPGVQDAALIEAIQDRLSNTLQTYIRCRHPPPGSHLLYAKMIQKLADLRSLNEEHSKQYRCLSFQPECSMKLTPLVLEVFGNEIS

SEQ ID NO: 6586 - protein, 477 aa, Homo sapiens
MEWRNKKRSDWLSMVLRTAGVEEAFGSEVSVRPHRRAPLGSTYLPPAPSGMEAMAASTSLPDPGDFDRNVPRICGVCGDRATGFHFNAMTCEGCKGFFRRSMKRKALFTCPFNGDCRITKDNRRHCQACRLKRCVDIGMMKEFILTDEEVQRKREMILKRKEEEALKDSLRPKLSEEQQRIIAILLDAHHKTYDPTYSDFCQFRPPVRVNDGGGSHPSRPNSRHTPSFSGDSSSSCSDHCITSSDMMDSSSFSNLDLSEEDSDDPSVTLELSQLSMLPHLADLVSYSIQKVIGFAKMIPGFRDLTSEDQIVLLKSSAIEVIMLRSNESFTMDDMSWTCGNQDYKYRVSDVTKAGHSLELIEPLIKFQVGLKKLNLHEEEHVLLMAICIVSPDRPGVQDAALIEAIQDRLSNTLQTYIRCRHPPPGSHLLYAKMIQKLADLRSLNEEHSKQYRCLSFQPECSMKLTPLVLEVFGNEIS

SEQ ID NO: 6587 - protein, 156 aa, Homo sapiens
WASQVSENRPVCKAIIQGKQFEGLVDTGADVSIIALNQWPKNWPKQKAVTGLVGIGTASEVYQSTEILHCLGPDNQESTVQPMITSIPLNLWGRDLLQQWGAEITMPAPLYSPTSQKIMTKMGYILGKGLGKNEDGIKIPVEAKINQKREGIGYPF

SEQ ID NO: 6588 - protein, 755 aa, Homo sapiens
MPPFLLLEAVCVFLFSRVPPSLPLQEVHVSKETIGKISAASKMMWCSAAVDIMFLLDGSNSVGKGSFERSKHFAITVCDGLDISPERVRVGAFQFSSTPHLEFPLDSFSTQQEVKARIKRMVFKGGRTETELALKYLLHRGLPGGRNASVPQILIIVTDGKSQGDVALPSKQLKERGVTVFAVGVRFPRWEELHALASEPRGQHVLLAEQVEDATNGLFSTLSSSAICSSATPDCRVEAHPCEHRTLEMVREFAGNAPCWRGSRRTLAVLAAHCPFYSWKRVFLTHPATCYRTTCPGPCDSQPCQNGGTCVPEGLDGYQCLCPLAFGGEANCALKLSLECRVDLLFLLDSSAGTTLDGFLRAKVFVKRFVRAVLSEDSRARVGVATYSRELLVAVPVGEYQDVPDLVWSLDGIPFRGGPTLTGSALRQAAERGFGSATRTGQDRPRRVVVLLTESHSEDEVAGPARHARARELLLLGVGSEAVRAELEEITGSPKHVMVYSDPQDLFNQIPELQGKLCSRQRPGCRTQALDLVFMLDTSASVGPENFAQMQSFVRSCALQFEVNPDVTQVGLVVYGSQVQTAFGLDTKPTRAAMLRAISQAPYLGGVGSAGTALLHIYDKVMTVQRGARPGVPKAVVVLTGGRGAEDAAVPAQKLRNNGISVLVVGVGPVLSEGLRRLAGPRDSLIHVAAYADLRYHQDVLIEWLCGEAKQPVNLCKPSPCMNEGSCVLQNGSYRCKCRDGWEGPHCENRFLRRP

SEQ ID NO: 6589 - protein, 725 aa, Homo sapiens
MPPFLLLEAVCVFLFSRVPPSLPLQEVHVSKETIGKISAASKMMWCSAAVDIMFLLDGSNSVGKGSFERSKHFAITVCDGLDISPERVRVGAFQFSSTPHLEFPLDSFSTQQEVKARIKRMVFKGGRTETELALKYLLHRGLPGGRNASVPQILIIVTDGKSQGDVALPSKQLKERGVTVFAVGVRFPRWEELHALASEPRGQHVLLAEQVEDATNGLFSTLSSSAICSSATPDCRVEAHPCEHRTLEMVREFAGNAPCWRGSRRTLAVLAAHCPFYSWKRVFLTHPATCYRTTCPGPCDSQPCQNGGTCVPEGLDGYQCLCPLAFGGEANCALKLSLECRVDLLFLLDSSAGTTLDGFLRAKVFVKRFVRAVLSEDSRARVGVATYSRELLVAVPVGEYQDVPDLVWSLDGIPFRGGPTLTGSALRQAAERGFGSATRTGQDRPRRVVVLLTESHSEDEVAGPARHARARELLLLGVGSEAVRAELEEITGSPKHVMVYSDPQDLFNQIPELQGKLCSRQRPGCRTQALDLVFMLDTSASVGPENFAQMQSFVRSCALQFEVNPDVTQVGLVVYGSQVQTAFGLDTKPTRAAMLRAISQAPYLGGVGSAGTALLHIYDKVMTVQRGARPGVPKAVVVLTGGRGAEDAAVPAQKLRNNGISVLVVGVGPVLSEGLRRLAGPRDSLIHVAAYADLRYHQDVLIEWLCGGEWGNPHPQGCPHGRPSA

SEQ ID NO: 6590 - protein, 421 aa, Homo sapiens
MEAHVFQKDWTATSASARWPLEGRLTVVALKLSLECRVDLLFLLDSSAGTTLDGFLRAKVFVKRFVRAVLSEDSRARVGVATYSRELLVAVPVGEYQDVPDLVWSLDGIPFRGGPTLTGSALRQAAERGFGSATRTGQDRPRRVVVLLTESHSEDEVAGPARHARARELLLLGVGSEAVRAELEEITGSPKHVMVYSDPQDLFNQIPELQGKLCSRQRPGCRTQALDLVFMLDTSASVGPENFAQMQSFVRSCALQFEVNPDVTQVGLVVYGSQVQTAFGLDTKPTRAAMLRAISQAPYLGGVGSAGTALLHIYDKVMTVQRGARPGVPKAVVVLTGGRGAEDAAVPAQKLRNNGISVLVVGVGPVLSEGLRRLAGPRDSLIHVAAYADLRYHQDVLIEWLCGGEWGNPHPQGCPHGRPSA

SEQ ID NO: 6591 - protein, 87 aa, Homo sapiens
MVSLMKLWIPMLMTFFCTVLLSVLGEMRKKRYDRKELLLEECWGKPNVKECTNKCSKAFRCKDKNYTCCWTYCGNICWINVETSGDY

SEQ ID NO: 6592 - protein, 950 aa, Homo sapiens
MGVPAFFRWLSRKYPSIIVNCVEEKPKECNGVKIPVDASKPNPNDVEFDNLYLDMNGIIHPCTHPEDKPAPKNEDEMMVAIFEYIDRLFSIVRPRRLLYMAIDGVAPRAKMNQQRSRRFRASKEGMEAAVEKQRVREEILAKGGFLPPEEIKERFDSNCITPGTEFMDNLAKCLRYYIADRLNNDPGWKNLTVILSDASAPGEGEHKIMDYIRRQRAQPNHDPNTHHCLCGADADLIMLGLATHEPNFTIIREEFKPNKPKPCGLCNQFGHEVKDCEGLPREKKGKHDELADSLPCAEGEFIFLRLNVLREYLERELTMASLPFTFDVERSIDDWVFMCFFVGNDFLPHLPSLEIRENAIDRLVNIYKNVVHKTGGYLTESGYVNLQRVQMIMLAVGEVEDSIFKKRKDDEDSFRRRQKEKRKRMKRDQPAFTPSGILTPHALGSRNSPGSQVASNPRQAAYEMRMQNNSSPSISPNTSFTSDGSPSPLGGIKRKAEDSDSEPEPEDNVRLWEAGWKQRYYKNKFDVDAADEKFRRKVVQSYVEGLCWVLRYYYQGCASWKWYYPFHYAPFASDFEGIADMPSDFEKGTKPFKPLEQLMGVFPAASGNFLPPSWRKLMSDPDSSIIDFYPEDFAIDLNGKKYAWQGVALLPFVDERRLRAALEEVYPDLTPEETRRNSLGGDVLFVGKHHPLHDFILELYQTGSTEPVEVPPELCHGIQGKFSLDEEAILPDQIVCSPVPMLRDLTQNTVVSINFKDPQFAEDYIFKAVMLPGARKPAAVLKPSDWEKSSNGRQWKPQLGFNRDRRPVHLDQAAFRTLGHVMPRGSGTGIYSNAAPPPVTYQGNLYRPLLRGQAQIPKLMSNMRPQDSWRGPPPLFQQQRFDRGVGAEPLLPWNRMLQTQNAAFQPNQYQMLAGPGGYPPRRDDRGGRQGYPREGRKYPLPPPSGRYNWN

SEQ ID NO: 6593 - protein, 874 aa, Homo sapiens
MMVAIFEYIDRLFSIVRPRRLLYMAIDGVAPRAKMNQQRSRRFRASKEGMEAAVEKQRVREEILAKGGFLPPEEIKERFDSNCITPGTEFMDNLAKCLRYYIADRLNNDPGWKNLTVILSDASAPGEGEHKIMDYIRRQRAQPNHDPNTHHCLCGADADLIMLGLATHEPNFTIIREEFKPNKPKPCGLCNQFGHEVKDCEGLPREKKGKHDELADSLPCAEGEFIFLRLNVLREYLERELTMASLPFTFDVERSIDDWVFMCFFVGNDFLPHLPSLEIRENAIDRLVNIYKNVVHKTGGYLTESGYVNLQRVQMIMLAVGEVEDSIFKKRKDDEDSFRRRQKEKRKRMKRDQPAFTPSGILTPHALGSRNSPGSQVASNPRQAAYEMRMQNNSSPSISPNTSFTSDGSPSPLGGIKRKAEDSDSEPEPEDNVRLWEAGWKQRYYKNKFDVDAADEKFRRKVVQSYVEGLCWVLRYYYQGCASWKWYYPFHYAPFASDFEGIADMPSDFEKGTKPFKPLEQLMGVFPAASGNFLPPSWRKLMSDPDSSIIDFYPEDFAIDLNGKKYAWQGVALLPFVDERRLRAALEEVYPDLTPEETRRNSLGGDVLFVGKHHPLHDFILELYQTGSTEPVEVPPELCHGIQGKFSLDEEAILPDQIVCSPVPMLRDLTQNTVVSINFKDPQFAEDYIFKAVMLPGARKPAAVLKPSDWEKSSNGRQWKPQLGFNRDRRPVHLDQAAFRTLGHVMPRGSGTGIYSNAAPPPVTYQGNLYRPLLRGQAQIPKLMSNMRPQDSWRGPPPLFQQQRFDRGVGAEPLLPWNRMLQTQNAAFQPNQYQMLAGPGGYPPRRDDRGGRQGYPREGRKYPLPPPSGRYNWN

SEQ ID NO: 6594 - protein, 367 aa, Homo sapiens
MLLLRCQLKQAPPQKVSFRFCVVMGKQQSKLKHSTYKYGRPDEIIEERIQTKAFQEYSPAHMDTVSVVAALNSDLCVSGGKDKTVVAYNWKTGNVVKRFKGHEHEITKVACIPKSSQFFSASRDRMVMMWDLHGSSQPRQQLCGHAMVVTGLAVSPDSSQLCTGSRDNTLLLWDVVTGQSVERASVSRNVVTHLCWVPREPYILQTSEDKTLRLWDSRGLQVAHMFPAKQHIQTYCEVSVDGHKCISCSNGFGGEGCEATLWDLRQTRNRICEYKGHFQTVASCVFLPRALALMPLIATSSHDCKVKIWNQDTGACLFTLSLDGSGPLTSLAVGDAISLLCASFNRGIHLLRMDHSQGLELQEVAAF

SEQ ID NO: 6595 - protein, 366 aa, Homo sapiens
MLLLRCQLKQAPPQKVSFRFCVVMGKQQSKLKHSTYKYGPDEIIEERIQTKAFQEYSPAHMDTVSVVAALNSDLCVSGGKDKTVVAYNWKTGNVVKRFKGHEHEITKVACIPKSSQFFSASRDRMVMMWDLHGSSQPRQQLCGHAMVVTGLAVSPDSSQLCTGSRDNTLLLWDVVTGQSVERASVSRNVVTHLCWVPREPYILQTSEDKTLRLWDSRGLQVAHMFPAKQHIQTYCEVSVDGHKCISCSNGFGGEGCEATLWDLRQTRNRICEYKGHFQTVASCVFLPRALALMPLIATSSHDCKVKIWNQDTGACLFTLSLDGSGPLTSLAVGDAISLLCASFNRGIHLLRMDHSQGLELQEVAAF

SEQ ID NO: 6596 - protein, 610 aa, Homo sapiens
METAPKPGKDVPPKKDKLQTKRKKPRRYWEEETVPTTAGASPGPPRNKKNRELRPQRPKNAYILKKSRISKKPQVPKKPREWKNPESQRGLSGTQDPFPGPAPVPVEVVQKFCRIDKSRKLPHSKAKTRSRLEVAEAEEEETSIKAARSELLLAEEPGFLEGEDGEDTAKICQADIVEAVDIASAAKHFDLNLRQFGPYRLNYSRTGRHLAFGGRRGHVAALDWVTKKLMCEINVMEAVRDIRFLHSEALLAVAQNRWLHIYDNQGIELHCIRRCDRVTRLEFLPFHFLLATASETGFLTYLDVSVGKIVAALNARAGRLDVMSQNPYNAVIHLGHSNGTVSLWSPAMKEPLAKILCHRGGVRAVAVDSTGTYMATSGLDHQLKIFDLRGTYQPLSTRTLPHGAGHLAFSQRGLLVAGMGDVVNIWAGQGKASPPSLEQPYLTHRLSGPVHGLQFCPFEDVLGVGHTGGITSMLVPGAGEPNFDGLESNPYRSRKQRQEWEVKALLEKVPAELICLDPRALAEVDVISLEQGKKEQIERLGYDPQAKAPFQPKPKQKGRSSTASLVKRKRKVMDEEHRDKVRQSLQQQHHKEAKAKPTGARPSALDRFVR

SEQ ID NO: 6597 - protein, 569 aa, Homo sapiens
MATEGGGKEMNEIKTQFTTREGLYKLLPHSEYSRPNRVPFNSQGSNPVRVSFVNLNDQSGNGDRLCFNVGRELYFYIYKGVRKAADLSKPIDKRIYKGTQPTCHDFNHLTATAESVSLLVGFSAGQVQLIDPIKKETSKLFNEERLIDKSRVTCVKWVPGSESLFLVAHSSGNMYLYNVEHTCGTTAPHYQLLKQGESFAVHTCKSKSTRNPLLKWTVGEGALNEFAFSPDGKFLACVSQDGFLRVFNFDSVELHGTMKSYFGGLLCVCWSPDGKYIVTGGEDDLVTVWSFVDCRVIARGHGHKSWVSVVAFDPYTTSVEEGDPMEFSGSDEDFQDLLHFGRDRANSTQSRLSKRNSTDSRPVSVTYRFGSVGQDTQLCLWDLTEDILFPHQPLSRARTHTNVMNATSPPAGSNGNSVTTPGNSVPPPLPRSNSLPHSAVSNAGSKSSVMDGAIASGVSKFATLSLHDRKERHHEKDHKRNHSMGHISSKSSDKLNLVTKTKTDPAKTLGTPLCPRMEDVPLLEPLICKKIAHERLTVLIFLEDCIVTACQEGFICTWGRPGKVVSFNP

SEQ ID NO: 6598 - protein, 581 aa, Homo sapiens
MATEGGGKEMNEIKTQFTTREGLYKLLPHSEYSRPNRVPFNSQGSNPVRVSFVNLNDQSGNGDRLCFNVGRELYFYIYKGVRKAADLSKPIDKRIYKGTQPTCHDFNHLTATAESVSLLVGFSAGQVQLIDPIKKETSKLFNEERLIDKSRVTCVKWVPGSESLFLVAHSSGNMYLYNVEHTCGTTAPHYQLLKQGESFAVHTCKSKSTRNPLLKWTVGEGALNEFAFSPDGKFLACVSQDGFLRVFNFDSVELHGTMKSYFGGLLCVCWSPDGKYIVTGGEDDLVTVWSFVDCRVIARGHGHKSWVSVVAFDPYTTSVEEGDPMEFSGSDEDFQDLLHFGRDRANSTQSRLSKRNSTDSRPVSVTYRFGSVGQDTQLCLWDLTEDILFPHQPLSRARTHTNVMNATSPPAGSNGNSVTTPGNSVPPPLPRSNSLPHSAVSNAGSKSSVMDGAIASGVSKFATLSLHDRKERHHEKDHKRNHSMGHISSKSSDKLNLVTKTKTDPAKTLGTPLCPRMEDVPLLEPLICKKIAHERLTVLIFLEDCIVTACQEGFICTWGRPGKVGSLSSPSQASSPGGTVV

SEQ ID NO: 6599 - protein, 195 aa, Homo sapiens
MATEGGGKEMNEIKTQFTTREGLYKLLPHSEYSRPNRVPFNSQGSNPVRVSFVNLNDQSGNGDRLCFNVGRELYFYIYKGVRKAADLSKPIDKRIYKGTQPTCHDFNHLTATAESVSLLVGFSAGQVQLIDPIKKETSKLFNEENSCQHLWKVDWNEERQNEGSKTSEEALVTVQPAEHFCRQEDRMQGVLQDQN

SEQ ID NO: 6600 - protein, 499 aa, Homo sapiens
MNEIKTQFTTREGLYKLLPHSEYSRPNRVPFNSQGSNPVRVSFVNLNDQSGNGDRLCFNVGRELYFYIYKGVRKRLIDKSRVTCVKWVPGSESLFLVAHSSGNMYLYNVEHTCGTTAPHYQLLKQGESFAVHTCKSKSTRNPLLKWTVGEGALNEFAFSPDGKFLACVSQDGFLRVFNFDSVELHGTMKSYFGGLLCVCWSPDGKYIVTGGEDDLVTVWSFVDCRVIARGHGHKSWVSVVAFDPYTTSVEEGDPMEFSGSDEDFQDLLHFGRDRANSTQSRLSKRNSTDSRPVSVTYRFGSVGQDTQLCLWDLTEDILFPHQPLSRARTHTNVMNATSPPAGSNGNSVTTPGNSVPPPLPRSNSLPHSAVSNAGSKSSVMDGAIASGVSKFATLSLHDRKERHHEKDHKRNHSMGHISSKSSDKLNLVTKTKTDPAKTLGTPLCPRMEDVPLLEPLICKKIAHERLTVLIFLEDCIVTACQEGFICTWGRPGKVVSFNP

SEQ ID NO: 6601 - protein, 508 aa, Homo sapiens
MATEGGGKEMNEIKTQFTTREGLYKLLPHSEYSRPNRVPFNSQGSNPVRVSFVNLNDQSGNGDRLCFNVGRELYFYIYKGVRKRLIDKSRVTCVKWVPGSESLFLVAHSSGNMYLYNVEHTCGTTAPHYQLLKQGESFAVHTCKSKSTRNPLLKWTVGEGALNEFAFSPDGKFLACVSQDGFLRVFNFDSVELHGTMKSYFGGLLCVCWSPDGKYIVTGGEDDLVTVWSFVDCRVIARGHGHKSWVSVVAFDPYTTSVEEGDPMEFSGSDEDFQDLLHFGRDRANSTQSRLSKRNSTDSRPVSVTYRFGSVGQDTQLCLWDLTEDILFPHQPLSRARTHTNVMNATSPPAGSNGNSVTTPGNSVPPPLPRSNSLPHSAVSNAGSKSSVMDGAIASGVSKFATLSLHDRKERHHEKDHKRNHSMGHISSKSSDKLNLVTKTKTDPAKTLGTPLCPRMEDVPLLEPLICKKIAHERLTVLIFLEDCIVTACQEGFICTWGRPGKVVSFNP

SEQ ID NO: 6602 - protein, 520 aa, Homo sapiens
MATEGGGKEMNEIKTQFTTREGLYKLLPHSEYSRPNRVPFNSQGSNPVRVSFVNLNDQSGNGDRLCFNVGRELYFYIYKGVRKRLIDKSRVTCVKWVPGSESLFLVAHSSGNMYLYNVEHTCGTTAPHYQLLKQGESFAVHTCKSKSTRNPLLKWTVGEGALNEFAFSPDGKFLACVSQDGFLRVFNFDSVELHGTMKSYFGGLLCVCWSPDGKYIVTGGEDDLVTVWSFVDCRVIARGHGHKSWVSVVAFDPYTTSVEEGDPMEFSGSDEDFQDLLHFGRDRANSTQSRLSKRNSTDSRPVSVTYRFGSVGQDTQLCLWDLTEDILFPHQPLSRARTHTNVMNATSPPAGSNGNSVTTPGNSVPPPLPRSNSLPHSAVSNAGSKSSVMDGAIASGVSKFATLSLHDRKERHHEKDHKRNHSMGHISSKSSDKLNLVTKTKTDPAKTLGTPLCPRMEDVPLLEPLICKKIAHERLTVLIFLEDCIVTACQEGFICTWGRPGKVGSLSSPSQASSPGGTVV

SEQ ID NO: 6603 - protein, 600 aa, Homo sapiens
MATEGGGKEMNEIKTQFTTREGLYKLLPHSEYSRPNRVPFNSQGSNPVRVSFVNLNDQSGNGDRLCFNVGRELYFYIYKGVRKAADLSKPIDKRIYKGTQPTCHDFNHLTATAESVSLLVGFSAGQVQLIDPIKKETSKLFNEENSCQHLWKVDWNEERQNEGSKTSEEALVTVQRLIDKSRVTCVKWVPGSESLFLVAHSSGNMYLYNVEHTCGTTAPHYQLLKQGESFAVHTCKSKSTRNPLLKWTVGEGALNEFAFSPDGKFLACVSQDGFLRVFNFDSVELHGTMKSYFGGLLCVCWSPDGKYIVTGGEDDLVTVWSFVDCRVIARGHGHKSWVSVVAFDPYTTSVEEGDPMEFSGSDEDFQDLLHFGRDRANSTQSRLSKRNSTDSRPVSVTYRFGSVGQDTQLCLWDLTEDILFPHQPLSRARTHTNVMNATSPPAGSNGNSVTTPGNSVPPPLPRSNSLPHSAVSNAGSKSSVMDGAIASGVSKFATLSLHDRKERHHEKDHKRNHSMGHISSKSSDKLNLVTKTKTDPAKTLGTPLCPRMEDVPLLEPLICKKIAHERLTVLIFLEDCIVTACQEGFICTWGRPGKVVSFNP

SEQ ID NO: 6604 - protein, 86 aa, Homo sapiens
MATEGGGKEMNEIKTQFTTREGLYKLLPHSEYSRPNRVPFNSQGSNPVRVSFVNLNDQSGNGDRLCFNVGRELYFYIYKGVRKTIP

SEQ ID NO: 6605 - protein, 1092 aa, Homo sapiens
MDHINKLTQIEDPREQWRREQERMLKEYLIVAQEALNAKKEIYQIKQQRFELAQEEYQQLHKMCEDDSRSYASSFSGYSTNTKYDPHQIKAEIASRRDRLSRLKRELTQMKQELQYKEKGVETLQEIDRKMSSTHTSYKLDEAQAIMSELRTIKKAICTGEKERRDLMHSLAKLTDSFKNSCSVTDSLVDFPHHVGVPGDAGVPQQFCDAGSQTDIIGEFVFDDKTRLVDRVRLNWQYEEARKRVANIQQQLARLDNESWPSTAEADRDRLQLIKEKEALLQELQLIIAQRRSAGDVARLEEERERLEEELRRARATSAQGATERILLQEKRNCLLMQLEEATRLTSYLQSQLKSLCASTLTVSSGSSRGSLASSRGSLASSRGSLSSVSFTDIYGLPQYEKPDAEGSQLLRFDLIPFDSLGRDAPFSEPPGPSGFHKQRRSLDTPQSLASLSSRSSLSSLSPPSSPLDTPFLPASRDSPLAQLADSCEGPGLGALDRLRAHASAMGDEDLPGMAALQPHGVPGDGEGPHERGPPPASAPVGGTVTLREDSAKRLERRARRISACLSDYSLASDSGVFEPLTKRNEDAEEPAYGDTASNGDPQIHVGLLRDSGSECLLVHVLQLKNPAGLAVKEDCKVHIRVYLPPLDSGTPNTYCSKALEFQVPLVFNEVFRIPVHSSALTLKSLQLYVCSVTPQLQEELLGIAQINLADYDSLSEMQLRWHSVQVFTSSEPSRTREAGCAGESSARDPAHTISISGKTDAVTVLLARTTAQLQAVERELAEERAKLEYTEEEVLEMERKEEQAEAISERSWQADSVDSGCSNCTQTSPPYPEPCCMGIDSILGHPFAAQAGPYSPEKFQPSPLKVDKETNTEDLFLEEAASLVKERPSRRARGSPFVRSGTIVRSQTFSPGARSQYVCRLYRSDSDSSTLPRKSPFVRNTLERRTLRYKQSCRSSLAELMARTSLDLELDLQASRTRQRQLNEELCALRELRQRLEDAQLRGQTDLPPWVLRDERLRGLLREAERQTRQTKLDYRHEQAAEKMLKKASKEIYQLRGQSHKEPIQVQTFREKIAFFTRPRINIPPLPADDV

SEQ ID NO: 6606 - protein, 582 aa, Homo sapiens
MDHINKLTQIEDPREQWRREQERMLKEYLIVAQEALNAKKEIYQIKQQRFELAQEEYQQLHKMCEDDSRSYASSFSGYSTNTKYDPHQIKAEIASRRDRLSRLKRELTQMKQELQYKEKGVETLQEIDRKMSSTHTSYKLDEAQAIMSELRTIKKAICTGEKERRDLMHSLAKLTDSFKNSCSVTDSLVDFPHHVGVPGDAGVPQQFCDAGSQTDIIGEFVFDDKTRLVDRVRLNWQYEEARKRVANIQQQLARLDNESWPSTAEADRDRLQLIKEKEALLQELQLIIAQRRSAGDVARLEEERERLEEELRRARATSAQGATERILLQEKRNCLLMQLEEATRLTSYLQSQLKSLCASTLTVSSGSSRGSLASSRGSLASSRGSLSSVSFTDIYGLPQYEKPDAEGSQLLRFDLIPFDSLGRDAPFSEPPGPSGFHKQRRSLDTPQSLASLSSRSSLSSLSPPSSPLDTPFLPASRDSPLAQLADSCEGPGLGALDRLRAHASAMGDEDLPGMAALQPHGVPGDGEGPHERGPPPASAPVGGSKCSLSDSSRRQCQEVGEEGTPHLRMSVGLFASQRQWGV

SEQ ID NO: 6607 - protein, 334 aa, Homo sapiens
MFRWERSIPLRGSAAALCNNLSVLQLPARNLTYFGVVHGPSAQLLSAAPEGVPLAQRQLHAKEGAGVSPPLITQVHWCVLPFRVLLVLTSHRGIQMYESNGYTMVYWHALDSGDASPVQAVFARGIAASGHFICVGTWSGRVLVFDIPAKGPNIVLSEELAGHQMPITDIATEPAQGQDCVADMVTADDSGLLCVWRSGPEFTLLTRIPGFGVPCPSVQLWQGIIAAGYGNGQVHLYEATTGNLHVQINAHARAICALDLASEVGKLLSAGEDTFVHIWKLSRNPESGYIEVEHCHGECVADTQLCGARFCDSSGNSFAVTGYDLAEIRRFSSV

SEQ ID NO: 6608 - protein, 244 aa, Homo sapiens
MVAADLEGPYEPGVRRADLGLQVHWCVLPFRVLLVLTSHRGIQMYESNGYTMVYWHALDSGDASPVQAVFARGIAASGHFICVGTWSGRVLVFDIPAKGPNIVLSEELAGHQMPITDIATEPAQGQDCVADMVTADDSGLLCVWRSGPEFTLLTRIPGFGVPCPSVQLWQGIIAAGYGNGQVHLYEATTGNLHVQINAHARAICALDLASEVGKLLSAGEDTFVHIWKLSRNPESGYIEATPLL

SEQ ID NO: 6609 - protein, 349 aa, Homo sapiens
MVAADLEGPYEPGVRMFRWERSIPLRGSAAALCNNLSVLQLPARNLTYFGVVHGPSAQLLSAAPEGVPLAQRQLHAKEGAGVSPPLITQVHWCVLPFRVLLVLTSHRGIQMYESNGYTMVYWHALDSGDASPVQAVFARGIAASGHFICVGTWSGRVLVFDIPAKGPNIVLSEELAGHQMPITDIATEPAQGQDCVADMVTADDSGLLCVWRSGPEFTLLTRIPGFGVPCPSVQLWQGIIAAGYGNGQVHLYEATTGNLHVQINAHARAICALDLASEVGKLLSAGEDTFVHIWKLSRNPESGYIEVEHCHGECVADTQLCGARFCDSSGNSFAVTGYDLAEIRRFSSV

SEQ ID NO: 6610 - protein, 1151 aa, Homo sapiens
MMAAALGPPEVIAQLENAAKVLMAPPSMVNNEQRQHAEHIFLSFRKSKSPFAVCKHILETSKVDYVLFQAATAIMEAVVREWILLEKGSIESLRTFLLTYVLQRPNLQKYVREQILLAVAVIVKRGSLDKSIDCKSIFHEVSQLISSGNPTVQTLACSILTALLSEFSSSSKTSNIGLSMEFHGNCKRVFQEEDLRQIFMLTVEVLQEFSRRENLNAQMSSVFQRYLALANQVLSWNFLPPNLGRHYIAMFESSQNVLLKPTESWRETLLDSRVMELFFTVHRKIREDSDMAQDSLQCLAQLASLHGPIFPDEGSQVDYLAHFIEGLLNTINGIEIEDSEAVGISSIISNLITVFPRNVLTAIPSELFSSFVNCLTHLTCSFGRSAALEEVLDKDDMVYMEAYDKLLESWLTLVQDDKHFHKGFFTQHAVQVFNSYIQCHLAAPDGTRNLTANGVASREEEEISELQEDDRDQFSDQLASVGMLGRIAAEHCIPLLTSLLEERVTRLHGQLQRHQQQLLASPGSSTVDNKMLDDLYEDIHWLILVTGYLLADDTQGETPLIPPEIMEYSIKHSSEVDINTTLQILGSPGEKASSIPGYNRTDSVIRLLSAILRVSEVESRAIRADLTHLLSPQMGKDIVWFLKRWAKTYLLVDEKLYDQISLPFSTAFGADTEGSQWIIGYLLQKVISNLSVWSSEQDLANDTVQLLVTLVERRERANLVIQCENWWNLAKQFASRSPPLNFLSSPVQRTLMKALVLGGFAHMDTETKQQYWTEVLQPLQQRFLRVINQENFQQMCQQEEVKQEITATLEALCGIAEATQIDNVAILFNFLMDFLTNCIGLMEVYKNTPETVNLIIEVFVEVAHKQICYLGESKAMNLYEACLTLLQVYSKNNLGRQRIDVTAEEEQYQDLLLIMELLTNLLSKEFIDFSDTDEVFRGHEPGQAANRSVSAADVVLYGVNLILPLMSQDLLKFPTLCNQYYKLITFICEIFPEKIPQLPEDLFKSLMYSLELGMTSMSSEVCQLCLEALTPLAEQCAKAQETDSPLFLATRHFLKLVFDMLVLQKHNTEMTTAAGEAFYTLVCLHQAEYSELVETLLSSQQDPVIYQRLADAFNKLTASSTPPTLDRKQKMAFLKSLEEFMANVGGLLCVK

SEQ ID NO: 6611 - protein, 582 aa, Homo sapiens
MSESWQQPPQTQPQQPQPPQPQHHAEPPPALAEHTLPPGTAENPLGCAVYGILLQPDPGLQPPQHAPLQAAGEPGPKCGVCGHDLAHLSSPHEHQCLAGHDRSFQCTQCLKIFHQATDLLEHQCVQAEQKPFVCGVCKMGFSLLTSLAQHHSSHSGLVKCSICEKTYKPAEAAEPATTAAPSLPAAPAPSTVTPAEQADKPYSCPICQKPFKHLSELSRHERIHTGEKPYKCTLCDKSFSQSSHLVHHKRTHSSERPYKCAVCEKTFKHRSHLVRHMYAHSGEHHLFRCNVCELHFKESSELLQHPCTPSGERPFRCGECQKAFKRPSDLRQHERTHSAERPFKCDLCPMGFKQQYALMRHRRTHKTEEPFKCGLCEKGFGQPSHLLYHQHVHTLETLFKCPVCQKGFDQSAELLRHKCLPGAAERPFKCPVCNKAYKRASALQKHQLAHCAAAEKPLRCTLCERRFFSSSEFVQHRCDPAREKPLKCPDCEKRFKYASDLQRHRRVHTGEKPYKCPNCDKAFKQREHLNKHQGVHAREQQFKCVWCGERFLDVALLQEHSAQHSAAAAAAEGAYQVAACLP

SEQ ID NO: 6612 - protein, 327 aa, Homo sapiens
MAELPGPFLCGALLGFLCLSGLAVEVKVPTEPLSTPLGKTAELTCTYSTSVGDSFALEWSFVQPGKPISESHPILYFTNGHLYPTGSKSKRVSLLQNPPTVGVATLKLTDVHPSDTGTYLCQVNNPPDFYTNGLGLINLTVLVPPSNPLCSQSGQTSVGGSTALRCSSSEGAPKPVYNWVRLGTFPTPSPGSMVQDEVSGQLILTNLSLTSSGTYRCVATNQMGSASCELTLSVTEPSQGRVAGALIGVLLGVLLLSVAAFCLVRFQKERGKKPKETYGGSDLREDAIAPGISEHTCMRADSSKGFLERPSSASTVTTTKSKLPMVV

SEQ ID NO: 6613 - protein, 284 aa, Homo sapiens
MAELPGPFLCGALLGFLCLSGLAVEVKVPTEPLSTPLGKTAELTCTYSTSVGDSFALEWSFVQPGKPISESHPILYFTNGHLYPTGSKSKRVSLLQNPPTVGVATLKLTDVHPSDTGTYLCQVNNPPDFYTNGLGLINLTVLVPPSNPLCSQSGQTSVGGSTALRCSSSEGAPKPVYNWVRLGTFPTPSPGSMVQDEVSGQLILTNLSLTSSGTYRCVATNQMGSASCELTLSVTEPSQGRVAGALIGVLLGVLLLSVAAFCLVRFQKERGKKPKETYGGSDLR

SEQ ID NO: 6614 - protein, 575 aa, Homo sapiens
MAAAAPRRPTQQGTVTFEDVAVNFSQEEWCLLSEAQRCLYRDVMLENLALISSLGCWCGSKDEEAPCKQRISVQRESQSRTPRAGVSPKKAHPCEMCGLILEDVFHFADHQETHHKQKLNRSGACGKNLDDTAYLHQHQKQHIGEKFYRKSVREASFVKKRKLRVSQEPFVFREFGKDVLPSSGLCQEAAAVEKTDSETMHGPPFQEGKTNYSCGKRTKAFSTKHSVIPHQKLFTRDGCYVCSDCGKSFSRYVSFSNHQRDHTAKGPYDCGECGKSYSRKSSLIQHQRVHTGKTAYPCEECGKSFSQKGSLISHQRVHTGERPYECREYGKSFGQKGNLIQHQQGHTGERAYHCGECGKSFRQKFCFINHQRVHTGERPYKCGECGKSFGQKGNLVQHQRGHTGERPYECKECGKSFRYRSHLTEHQRLHTGERPYNCRECGKLFNRKYHLLVHERVHTGERPYACEVCGKLFGNKNCVTIHQRIHTGERPYECNECGKSFLSSSALHVHKRVHSGQKPYKCSECGKSFAECSSLIKHRRIHTGERPYECTKCGKTFQRSSTLLHHQSSHRRKAL

SEQ ID NO: 6615 - protein, 376 aa, Homo sapiens
MHGPPFQEGKTNYSCGKRTKAFSTKHSVIPHQKLFTRDGCYVCSDCGKSFSRYVSFSNHQRDHTAKGPYDCGECGKSYSRKSSLIQHQRVHTGKTAYPCEECGKSFSQKGSLISHQRVHTGERPYECREYGKSFGQKGNLIQHQQGHTGERAYHCGECGKSFRQKFCFINHQRVHTGERPYKCGECGKSFGQKGNLVQHQRGHTGERPYECKECGKSFRYRSHLTEHQRLHTGERPYNCRECGKLFNRKYHLLVHERVHTGERPYACEVCGKLFGNKNCVTIHQRIHTGERPYECNECGKSFLSSSALHVHKRVHSGQKPYKCSECGKSFAECSSLIKHRRIHTGERPYECTKCGKTFQRSSTLLHHQSSHRRKAL

SEQ ID NO: 6616 - protein, 645 aa, Homo sapiens
MEPLKFRDVAIEFSLEEWQCLDTIQQNLYRNVMLENYRNLVFLGIVVSKPDLITCLEQEKEPWTRKRHRMVAEPPVICSHFAQDFSPEQNIKDSFQKVTPRRYGKCEHENLQLSKSVDECKVQKGGYNGLNQCLPTTQSKIFQCDKYMKIFHKFSNLNGHKVRHTRKKPFKYKEFGKSFCIFSNLTQHKIICTRVNFYKCEDCGKAFNGSSIFTKHKRIHIGEKSYICEECGKACNQFTNLTTHKIIYTRDKLYKREECSKAFNLSSHITTHTIIHTGENPYKREECDKAFNQSLTLTTHKIIHTREKLNEYKECGKAFNQSSHLTRHKIIHTGEKPYKCEECGKAFNQSSHLTRHKIIHTGEKPYRCEECGKAFRQSSHLTTHKIIHTGEKPYKCEECGKAFNKSSHLTRHKSIHTGEKPYQCEKCGKASNQSSNLTEHKNIHTEEKPYKCEECGKAFNQFSNLTTHKRIHTGEKPYKCEECGKAFNQSSILTTHKRIHTGEKSYKCEECGKAFYRSSKLTEHKKIHTGEKPYTCEECGKAFNHSSHLATHKVIHTGEKPYQCEECGKAFNQSSHLTRHKRIHTGEKPYQCEKCGKAFNQSSNLTGHKKIHTGEKLYKPKRCNSDFENTSKFSKHKRNYAGEKS

SEQ ID NO: 6617 - protein, 576 aa, Homo sapiens
MVAEPPVICSHFAQDFSPEQNIKDSFQKVTPRRYGKCEHENLQLSKSVDECKVQKGGYNGLNQCLPTTQSKIFQCDKYMKIFHKFSNLNGHKVRHTRKKPFKYKEFGKSFCIFSNLTQHKIICTRVNFYKCEDCGKAFNGSSIFTKHKRIHIGEKSYICEECGKACNQFTNLTTHKIIYTRDKLYKREECSKAFNLSSHITTHTIIHTGENPYKREECDKAFNQSLTLTTHKIIHTREKLNEYKECGKAFNQSSHLTRHKIIHTGEKPYKCEECGKAFNQSSHLTRHKIIHTGEKPYRCEECGKAFRQSSHLTTHKIIHTGEKPYKCEECGKAFNKSSHLTRHKSIHTGEKPYQCEKCGKASNQSSNLTEHKNIHTEEKPYKCEECGKAFNQFSNLTTHKRIHTGEKPYKCEECGKAFNQSSILTTHKRIHTGEKSYKCEECGKAFYRSSKLTEHKKIHTGEKPYTCEECGKAFNHSSHLATHKVIHTGEKPYQCEECGKAFNQSSHLTRHKRIHTGEKPYQCEKCGKAFNQSSNLTGHKKIHTGEKLYKPKRCNSDFENTSKFSKHKRNYAGEKS

SEQ ID NO: 6618 - protein, 165 aa, Homo sapiens
MNLFCISLEGSMDSLYEPIPEQQANQENMSSRTDSPIPPFGESEQTPNNLFVGVSNLENAKPKKRKLFRRFMSENKIFEGKTVNDKIWQEHSKHKNDSHIRRPCQLKDLNENDFLSNNIHTYQGKTLQGTSYQVTSECWSPFHYQRHVETTVDELVRHFFPDVTI

SEQ ID NO: 6619 - protein, 376 aa, Homo sapiens
MADYWKSQPKKFCDYCKCWIADNRPSVEFHERGKNHKENVAKRISEIKQKSLDKAKEEEKASKEFAAMEAAALKAYQEDLKRLGLESEILEPSITPVTSTIPPTSTSNQQKEKKEKKKRKKDPSKGRWVEGITSEGYHYYYDLISGASQWEKPEGFQGDLKKTAVKTVWVEGLSEDGFTYYYNTETGESRWEKPDDFIPHTSDLPSSKVNENSLGTLDESKSSDSHSDSDGEQEAEEGGVSTETEKPKIKFKEKNKNSDGGSDPETQKEKSIQKQNSLGSNEEKSKTLKKSNPYGEWQEIKQEVESHEEVDLELPSTENEYVSTSEADGGGEPKVVFKEKTVTSLGVMADGVAPVFKKRRTENGKSRNLRQRGDDQ

SEQ ID NO: 6620 - protein, 355 aa, Homo sapiens
MADYWKSQPKKFCDYCKCWIADNRPIKQKSLDKAKEEEKASKEFAAMEAAALKAYQEDLKRLGLESEILEPSITPVTSTIPPTSTSNQQKEKKEKKKRKKDPSKGRWVEGITSEGYHYYYDLISGASQWEKPEGFQGDLKKTAVKTVWVEGLSEDGFTYYYNTETGESRWEKPDDFIPHTSDLPSSKVNENSLGTLDESKSSDSHSDSDGEQEAEEGGVSTETEKPKIKFKEKNKNSDGGSDPETQKEKSIQKQNSLGSNEEKSKTLKKSNPYGEWQEIKQEVESHEEVDLELPSTENEYVSTSEADGGGEPKVVFKEKTVTSLGVMADGVAPVFKKRRTENGKSRNLRQRGDDQ

SEQ ID NO: 6621 - protein, 395 aa, Homo sapiens
MTHTLYPTPFALYPINISAAWHLGPLPVSCFVSNKYQCSLAFGATTGLRVLVVVVPQTQLSFLSSLCLVSLFLHSLVSAHGEKPTKPVGLDPTLFQVVVGILGNFSLLYYYMFLYFRGYKPRSTDLILRHLTVADSLVILSKRIPETMATFGLKHFDNYFGCKFLLYAHRVGRGVSIGSTCLLSVFQVITINPRNSRWAEMKVKAPTYIGLSNILCWAFHMLVNAIFPIYTTGKWSNNNITKKGDLGYCSAPLSDEVTKSVYAALTSFHDVLCLGLMLWASSSIVLVLYRHKQQVQHICRNNLYPNSSPGNRAIQSILALVSTFALCYALSFITYVYLALFDNSSWWLVNTAALIIACFPTISPFVLMCRDPSRSRLCSICCRRNRRFFHDFRKM

SEQ ID NO: 6622 - protein, 1433 aa, Homo sapiens
MWSLTASEGESTTAHFFLGAGDEGLGTRGIGMRPEESDSELLEDEEDEVPPEPQIIVGICAMTKKSKSKPMTQILERLCRFDYLTVVILGEDVILNEPVENWPSCHCLISFHSKGFPLDKAVAYSKLRNPFLINDLAMQYYIQDRREVYRILQEEGIDLPRYAVLNRDPARPEECNLIEGEDQVEVNGAVFPKPFVEKPVSAEDHNVYIYYPSSAGGGSQRLFRKIGSRSSVYSPESSVRKTGSYIYEEFMPTDGTDVKVYTVGPDYAHAEARKSPALDGKVERDSEGKEIRYPVMLTAMEKLVARKVCVAFKQTVCGFDLLRANGHSFVCDVNGFSFVKNSMKYYDDCAKILGNTIMRELAPQFQIPWSIPTEAEDIPIVPTTSGTMMELRCVIAIIRHGDRTPKQKMKMEVKHPRFFALFEKHGGYKTGKLKLKRPEQLQEVLDITRLLLAELEKEPGGEIEEKTGKLEQLKSVLEMYGHFSGINRKVQLTYYPHGVKASNEGQDPQRETLAPSLLLVLKWGGELTPAGRVQAEELGRAFRCMYPGGQGDYAGFPGCGLLRLHSTFRHDLKIYASDEGRVQMTAAAFAKGLLALEGELTPILVQMVKSANMNGLLDSDGDSLSSCQHRVKARLHHILQQDAPFGPEDYDQLAPTRSTSLLNSMTIIQNPVKVCDQVFALIENLTHQIRERMQDPRSVDLQLYHSETLELMLQRWSKLERDFRQKSGRYDISKIPDIYDCVKYDVQHNGSLGLQGTAELLRLSKALADVVIPQEYGISREEKLEIAVGFCLPLLRKILLDLQRTHEDESVNKLHPLCYLRYSRGVLSPGRHVRTRLYFTSESHVHSLLSVFRYGGLLDETQDAQWQRALDYLSAISELNYMTQIVIMLYEDNTQDPLSEERFHVELHFSPGVKGVEEEGSAPAGCGFRPASSENEEMKTNQGSMENLCPGKASDEPDRALQTSPQPPEGPGLPRRSPLIRNRKAGSMEVLSETSSSRPGGYRLFSSSRPPTEMKQSGLGSQCTGLFSTTVLGGSSSAPNLQDYARSHGKKLPPASLKHRDELLFVPAVKRFSVSFAKHPTNGFEGCSMVPTIYPLETLHNALSLRQVSEFLSRVCQRHTDAQAQASAALFDSMHSSQASDNPFSPPRTLHSPPLQLQQRSEKPPWYSSGPSSTVSSAGPSSPTTVDGNSQFGFSDQPSLNSHVAEEHQGLGLLQETPGSGAQELSIEGEQELFEPNQSPQVPPMETSQPYEEVSQPCQEVPDISQPCQDISEALSQPCQKVPDISQQCQENHDNGNHTCQEVPHISQPCQKSSQLCQKVSEEVCQLCLENSEEVSQPCQGVSVEVGKLVHKFHVGVGSLVQETLVEVGSPAEEIPEEVIQPYQEFSVEVGRLAQETSAINLLSQGIPEIDKPSQEFPEEIDLQAQEVPEEIN

SEQ ID NO: 6623 - protein, 1430 aa, Homo sapiens
MWSLTASEGESTTAHFFLGAGDEGLGTRGIGMRPEESDSELLEDEEDEVPPEPQIIVGICAMTKKSKSKPMTQILERLCRFDYLTVVILGEDVILNEPVENWPSCHCLISFHSKGFPLDKAVAYSKLRNPFLINDLAMQYYIQDRREVYRILQEEGIDLPRYAVLNRDPARPEECNLIEGEDQVEVNGAVFPKPFVEKPVSAEDHNVYIYYPSSAGGGSQRLFRKIGSRSSVYSPESSVRKTGSYIYEEFMPTDGTDVKVYTVGPDYAHAEARKSPALDGKVERDSEGKEIRYPVMLTAMEKLVARKVCVAFKQTVCGFDLLRANGHSFVCDVNGFSFVKNSMKYYDDCAKILGNTIMRELAPQFQIPWSIPTEAEDIPIVPTTSGTMMELRCVIAIIRHGDRTPKQKMKMEVKHPRFFALFEKHGGYKTGKLKLKRPEQLQEVLDITRLLLAELEKEPGGEIEEKTGKLEQLKSVLEMYGHFSGINRKVQLTYYPHGVKASNEGQDPQRETLAPSLLLVLKWGGELTPAGRVQAEELGRAFRCMYPGGQGDYAGFPGCGLLRLHSTFRHDLKIYASDEGRVQMTAAAFAKGLLALEGELTPILVQMVKSANMNGLLDSDGDSLSSCQHRVKARLHHILQQDAPFGPEDYDQLAPTRSTSLLNSMTIIQNPVKVCDQVFALIENLTHQIRERMQDPRSVDLQLYHSETLELMLQRWSKLERDFRQKSGRYDISKIPDIYDCVKYDVQHNGSLGLQGTAELLRLSKALADVVIPQEYGISREEKLEIAVGFCLPLLRKILLDLQRTHEDESVNKLHPLYSRGVLSPGRHVRTRLYFTSESHVHSLLSVFRYGGLLDETQDAQWQRALDYLSAISELNYMTQIVIMLYEDNTQDPLSEERFHVELHFSPGVKGVEEEGSAPAGCGFRPASSENEEMKTNQGSMENLCPGKASDEPDRALQTSPQPPEGPGLPRRSPLIRNRKAGSMEVLSETSSSRPGGYRLFSSSRPPTEMKQSGLGSQCTGLFSTTVLGGSSSAPNLQDYARSHGKKLPPASLKHRDELLFVPAVKRFSVSFAKHPTNGGFEGCSMVPTIYPLETLHNALSLRQVSEFLSRVCQRHTDAQAQASAALFDSMHSSQASDNPFSPPRTLHSPPLQLQQRSEKPPWYSSGPSSTVSSAGPSSPTTVDGNSQFGFSDQPSLNSHVAEEHQGLGLLQETPGSGAQELSIEGEQELFEPNQSPQVPPMETSQPYEEVSQPCQEVPDISQPCQDISEALSQPCQKVPDISQQCQENHDNGNHTCQEVPHISQPCQKSSQLCQKVSEEVCQLCLENSEEVSQPCQGVSVEVGKLVHKFHVGVGSLVQETLVEVGSPAEEIPEEVIQPYQEFSVEVGRLAQETSAINLLSQGIPEIDKPSQEFPEEIDLQAQEVPEEIN

SEQ ID NO: 6624 - protein, 1408 aa, Homo sapiens
MWSLTASEGESTTAHFFLGAGDEGLGTRGIGMRPEESDSELLEDEEDEVPPEPQIIVGICAMTKKSKSKPMTQILERLCRFDYLTVVILGEDVILNEPVENWPSCHCLISFHSKGFPLDKAVAYSKLRNPFLINDLAMQYYIQDRREVYRILQEEGIDLPRYAVLNRDPARPEECNLIEGEDQVEVNGAVFPKPFVEKPVSAEDHNVYIYYPSSAGGGSQRLFRKIGSRSSVYSPESSVRKTGSYIYEEFMPTDGTDVKVYTVGPDYAHAEARKSPALDGKVERDSEGKEIRYPVMLTAMEKLVARKVCVAFKQTVCGFDLLRANGHSFVCDVNGFSFVKNSMKYYDDCAKILGNTIMRELAPQFQIPWSIPTEAEDIPIVPTTSGTMMELRCVIAIIRHGDRTPKQKMKMEVKHPRFFALFEKHGGYKTGKLKLKRPEQLQEVLDITRLLLAELEKEPGGEIEEKTGKLEQLKSVLEMYGHFSGINRKVQLTYYPHGVKASNEGQDPQRETLAPSLLLVLKWGGELTPAGRVQAEELGRAFRCMYPGGQGDYAGFPGCGLLRLHSTFRHDLKIYASDEGRVQMTAAAFAKGLLALEGELTPILVQMVKSANMNGLLDSDGDSLSSCQHRVKARLHHILQQDAPFGPEDYDQLAPTRSTSLLNSMTIIQNPVKVCDQVFALIENLTHQIRERMQDPRSVDLQLYHSETLELMLQRWSKLERDFRQKSGRYDISKIPDIYDCVKYDVQHNGSLGLQGTAELLRLSKALADVVIPQEYGISREEKLEIAVGFCLPLLRKILLDLQRTHEDESVNKLHPLYSRGVLSPGRHVRTRLYFTSESHVHSLLSVFRYGGLLDETQDAQWQRALDYLSAISELNYMTQIVIMLYEDNTQDPLSEERFHVELHFSPGVKGVEEEGSAPAGCGFRPASSENEEMKTNQGSMENLCPGKASDEPDRALQTSPQPPEGPGLPRRSPLIRNRKAGSMEVLSETSSSRPGGYRLFSSSRPPTEMKQSGLGSQCTGLFSTTVLGGSSSAPNLQDYARSHGKKLPPASLKHRDGFEGCSMVPTIYPLETLHNALSLRQVSEFLSRVCQRHTDAQAQASAALFDSMHSSQASDNPFSPPRTLHSPPLQLQQRSEKPPWYSSGPSSTVSSAGPSSPTTVDGNSQFGFSDQPSLNSHVAEEHQGLGLLQETPGSGAQELSIEGEQELFEPNQSPQVPPMETSQPYEEVSQPCQEVPDISQPCQDISEALSQPCQKVPDISQQCQENHDNGNHTCQEVPHISQPCQKSSQLCQKVSEEVCQLCLENSEEVSQPCQGVSVEVGKLVHKFHVGVGSLVQETLVEVGSPAEEIPEEVIQPYQEFSVEVGRLAQETSAINLLSQGIPEIDKPSQEFPEEIDLQAQEVPEEIN

SEQ ID NO: 6625 - protein, 1407 aa, Homo sapiens
MWSLTASEGESTTAHFFLGAGDEGLGTRGIGMRPEESDSELLEDEEDEVPPEPQIIVGICAMTKKSKSKPMTQILERLCRFDYLTVVILGEDVILNEPVENWPSCHCLISFHSKGFPLDKAVAYSKLRNPFLINDLAMQYYIQDRREVYRILQEEGIDLPRYAVLNRDPARPEECNLIEGEDQVEVNGAVFPKPFVEKPVSAEDHNVYIYYPSSAGGGSQRLFRKIGSRSSVYSPESSVRKTGSYIYEEFMPTDGTDVKVYTVGPDYAHAEARKSPALDGKVERDSEGKEIRYPVMLTAMEKLVARKVCVAFKQTVCGFDLLRANGHSFVCDVNGFSFVKNSMKYYDDCAKILGNTIMRELAPQFQIPWSIPTEAEDIPIVPTTSGTMMELRCVIAIIRHGDRTPKQKMKMEVKHPRFFALFEKHGGYKTGKLKLKRPEQLQEVLDITRLLLAELEKEPGGEIEEKTGKLEQLKSVLEMYGHFSGINRKVQLTYYPHGVKASNEGQDPQRETLAPSLLLVLKWGGELTPAGRVQAEELGRAFRCMYPGGQGDYAGFPGCGLLRLHSTFRHDLKIYASDEGRVQMTAAAFAKGLLALEGELTPILVQMVKSANMNGLLDSDGDSLSSCQHRVKARLHHILQQDAPFGPEDYDQAPTRSTSLLNSMTIIQNPVKVCDQVFALIENLTHQIRERMQDPRSVDLQLYHSETLELMLQRWSKLERDFRQKSGRYDISKIPDIYDCVKYDVQHNGSLGLQGTAELLRLSKALADVVIPQEYGISREEKLEIAVGFCLPLLRKILLDLQRTHEDESVNKLHPLYSRGVLSPGRHVRTRLYFTSESHVHSLLSVFRYGGLLDETQDAQWQRALDYLSAISELNYMTQIVIMLYEDNTQDPLSEERFHVELHFSPGVKGVEEEGSAPAGCGFRPASSENEEMKTNQGSMENLCPGKASDEPDRALQTSPQPPEGPGLPRRSPLIRNRKAGSMEVLSETSSSRPGGYRLFSSSRPPTEMKQSGLGSQCTGLFSTTVLGGSSSAPNLQDYARSHGKKLPPASLKHRDGFEGCSMVPTIYPLETLHNALSLRQVSEFLSRVCQRHTDAQAQASAALFDSMHSSQASDNPFSPPRTLHSPPLQLQQRSEKPPWYSSGPSSTVSSAGPSSPTTVDGNSQFGFSDQPSLNSHVAEEHQGLGLLQETPGSGAQELSIEGEQELFEPNQSPQVPPMETSQPYEEVSQPCQEVPDISQPCQDISEALSQPCQKVPDISQQCQENHDNGNHTCQEVPHISQPCQKSSQLCQKVSEEVCQLCLENSEEVSQPCQGVSVEVGKLVHKFHVGVGSLVQETLVEVGSPAEEIPEEVIQPYQEFSVEVGRLAQETSAINLLSQGIPEIDKPSQEFPEEIDLQAQEVPEEIN

SEQ ID NO: 6626 - protein, 1194 aa, Homo sapiens
MWSLTASEGESTTAHFFLGAGDEGLGTRGIGMRPEESDSELLEDEEDEVPPEPQIIVGICAMTKKSKSKPMTQILERLCRFDYLTVVILGEDVILNEPVENWPSCHCLISFHSKGFPLDKAVAYSKLRNPFLINDLAMQYYIQDRREVYRILQEEGIDLPRYAVLNRDPARPEECNLIEGEDQVEVNGAVFPKPFVEKPVSAEDHNVYIYYPSSAGGGSQRLFRKIGSRSSVYSPESSVRKTGSYIYEEFMPTDGTDVKVYTVGPDYAHAEARKSPALDGKVERDSEGKEIRYPVMLTAMEKLVARKVCVAFKQTVCGFDLLRANGHSFVCDVNGFSFVKNSMKYYDDCAKILGNTIMRELAPQFQIPWSIPTEAEDIPIVPTTSGTMMELRCVIAIIRHGDRTPKQKMKMEVKHPRFFALFEKHGGYKTGKLKLKRPEQLQEVLDITRLLLAELEKEPGGEIEEKTGKLEQLKSVLEMYGHFSGINRKVQLTYYPHGVKASNEGQDPQRETLAPSLLLVLKWGGELTPAGRVQAEELGRAFRCMYPGGQGDYAGFPGCGLLRLHSTFRHDLKIYASDEGRVQMTAAAFAKGLLALEGELTPILVQMVKSANMNGLLDSDGDSLSSCQHRVKARLHHILQQDAPFGPEDYDQLAPTRSTSLLNSMTIIQNPVKVCDQVFALIENLTHQIRERMQDPRSVDLQLYHSETLELMLQRWSKLERDFRQKSGRYDISKIPDIYDCVKYDVQHNGSLGLQGTAELLRLSKALADVVIPQEYGISREEKLEIAVGFCLPLLRKILLDLQRTHEDEYSRGVLSPGRHVRTRLYFTSESHVHSLLSVFRYGGLLDETQDADRALQTSPQPPEGPGLPRRSPLIRNRKAGSMEVLSETSSSRPGGYRLFSSSRPPTEMKQSGLGSQCTGLFSTTVLGGSSSAPNLQDYARSHGKKLPPASLKHRDELLFVPAVKRFSVSFAKHPTNGFEGCSMVPTIYPLETLHNALSLRQVPPMETSQPYEEVSQPCQEVPDISQPCQDISEALSQPCQKVPDISQQCQENHDNGNHTCQEVPHISQPCQKSSQLCQKVSEEVCQLCLENSEEVSQPCQGVSVEVGKLVHKFHVGVGSLVQETLVEVGSPAEEIPEEVIQPYQEFSVEVGRLAQETSAINLLSQGIPEIDKPSQEFPEEIDLQAQEVPEEIN

SEQ ID NO: 6627 - protein, 817 aa, Homo sapiens
MWSLTASEGESTTAHFFLGAGDEGLGTRGIGMRPEESDSELLEDEEDEVPPEPQIIVGICAMTKKSKSKPMTQILERLCRFDYLTVVILGEDVILNEPVENWPSCHCLISFHSKGFPLDKAVAYSKLRNPFLINDLAMQYYIQDRREVYRILQEEGIDLPRYAVLNRDPARPEECNLIEGEDQVEVNGAVFPKPFVEKPVSAEDHNVYIYYPSSAGGGSQRLFRKIGSRSSVYSPESSVRKTGSYIYEEFMPTDGTDVKVYTVGPDYAHAEARKSPALDGKVERDSEGKEIRYPVMLTAMEKLVARKVCVAFKQTVCGFDLLRANGHSFVCDVNGFSFVKNSMKYYDDCAKILGNTIMRELAPQFQIPWSIPTEAEDIPIVPTTSGTMMELRCVIAIIRHGDRTPKQKMKMEVKHPRFFALFEKHGGYKTGKLKLKRPEQLQEVLDITRLLLAELEKEPGGEIEEKTGKLEQLKSVLEMYGHFSGINRKVQLTYYPHGVKASNEGQDPQRETLAPSLLLVLKWGGELTPAGRVQAEELGRAFRCMYPGGQGDYAGFPGCGLLRLHSTFRHDLKIYASDEGRVQMTAAAFAKGLLALEGELTPILVQMVKSANMNGLLDSDGDSLSSCQHRVKARLHHILQQDAPFGPEDYDQLAPTRSTSLLNSMTIIQNPVKVCDQVFALIENLTHQIRERMQDPRSVDLQLYHSETLELMLQRWSKLERDFRQKSGRYDISKIPDIYDCVKYDVQHNGSLGLQGTAELLRLSKALADVVIPQEYGISREEKLEIAVGFCLPLLRKILLDLQRTHEDESVNKLHPL

SEQ ID NO: 6628 - protein, 1406 aa, Homo sapiens
MWSLTASEGESTTAHFFLGAGDEGLGTRGIGMRPEESDSELLEDEEDEVPPEPQIIVGICAMTKKSKSKPMTQILERLCRFDYLTVVILGEDVILNEPVENWPSCHCLISFHSKGFPLDKAVAYSKLRNPFLINDLAMQYYIQDRREVYRILQEEGIDLPRYAVLNRDPARPEECNLIEGEDQVEVNGAVFPKPFVEKPVSAEDHNVYIYYPSSAGGGSQRLFRKIGSRSSVYSPESSVRKTGSYIYEEFMPTDGTDVKVYTVGPDYAHAEARKSPALDGKVERDSEGKEIRYPVMLTAMEKLVARKVCVAFKQTVCGFDLLRANGHSFVCDVNGFSFVKNSMKYYDDCAKILGNTIMRELAPQFQIPWSIPTEAEDIPIVPTTSGTMMELRCVIAIIRHGDRTPKQKMKMEVKHPRFFALFEKHGGYKTGKLKLKRPEQLQEVLDITRLLLAELEKEPGGEIEEKTGKLEQLKSVLEMYGHFSGINRKVQLTYYPHGVKASNEGQDPQRETLAPSLLLVLKWGGELTPAGRVQAEELGRAFRCMYPGGQGDYAGFPGCGLLRLHSTFRHDLKIYASDEGRVQMTAAAFAKGLLALEGELTPILVQMVKSANMNGLLDSDGDSLSSCQHRVKARLHHILQQDAPFGPEDYDQLAPTRSTSLLNSMTIIQNPVKVCDQVFALIENLTHQIRERMQDPRSVDLQLYHSETLELMLQRWSKLERDFRQKSGRYDISKIPDIYDCVKYDVQHNGSLGLQGTAELLRLSKALADVVIPQEYGISREEKLEIAVGFCLPLLRKILLDLQRTHEDESVNKLHPLYSRGVLSPGRHVRTRLYFTSESHVHSLLSVFRYGGLLDETQDAQWQRALDYLSAISELNYMTQIVIMLYEDNTQDPLSEERFHVELHFSPGVKGVEEEGSAPAGCGFRPASSENEEMKTNQGSMENLCPGKASDEPDRALQTSPQPPEGPGLPRRSPLIRNRKAGSMEVLSETSSSRPGGYRLFSSSRPPTEMKQSGLGFEGCSMVPTIYPLETLHNALSLRQVSEFLSRVCQRHTDAQAQASAALFDSMHSSQASDNPFSPPRTLHSPPLQLQQRSEKPPWLETRFCHVGQAGLELLTSSDLPASASQSAGITGVSHRTQPDSSGPSSTVSSAGPSSPTTVDGNSQFGFSDQPSLNSHVAEEHQGLGLLQETPGSGAQELSIEGEQELFEPNQSPQVPPMETSQPYEEVSQPCQEVPDISQPCQDISEALSQPCQKVPDISQQCQENHDNGNHTCQEVPHISQPCQKSSQLCQKVSEEVCQLCLENSEEVSQPCQGVSVEVGKLVHKFHVGVGSLVQETLVEVGSPAEEIPEEVIQPYQEFSVEVGRLAQETSAINLLSQGIPEIDKPSQEFPEEIDLQAQEVPEEIN

SEQ ID NO: 6629 - protein, 3753 aa, Homo sapiens
MVLESVVADLLNRFLGDYVENLNKSQLKLGIWGGNVALDNLQIKENALSELDVPFKVKAGQIDKLTLKIPWKNLYGEAVVATLEGLYLLVVPGASIKYDAVKEEKSLQDVKQKELSRIEEALQKAAEKGTHSGEFIYGLENFVYKDIKPGRKRKKHKKHFKKPFKGLDRSKDKPKEAKKDTFVEKLATQVIKNVQVKITDIHIKYEDDVTDPKRPLSFGVTLGELSLLTANEHWTPCILNEADKIIYKLIRLDSLSAYWNVNCSMSYQRSREQILDQLKNEILTSGNIPPNYQYIFQPISASAKLYMNPYAESELKTPKLDCNIEIQNIAIELTKPQYLSMIDLLESVDYMVRNAPYRKYKPYLPLHTNGRRWWKYAIDSVLEVHIRRYTQMWSWSNIKKHRQLLKSYKIAYKNKLTQSKVSEEIQKEIQDLEKTLDVFNIILARQQAQVEVIRSGQKLRKKSADTGEKRGGWFSGLWGKKESKKKDEESLIPETIDDLMTPEEKDKLFTAIGYSESTHNLTLPKQYVAHIMTLKLVSTSVTIRENKNIPEILKIQIIGLGTQVSQRPGAQALKVEAKLEHWYITGLRQQDIVPSLVASIGDTTSSLLKIKFETNPEDSPADQTLIVQSQPVEVIYDAKTVNAVVEFFQSNKGLDLEQITSATLMKLEEIKERTATGLTHIIETRKVLDLRINLKPSYLVVPQTGFHHEKSDLLILDFGTFQLNSKDQGLQKTTNSSLEEIMDKAYDKFDVEIKNVQLLFARAEETWKKCRFQHPSTMHILQPMDIHVELAKAMVEKDIRMARFKVSGGLPLMHVRISDQKMKDVLYLMNSIPLPQKSSAQSPERQVSSIPIISGGTKGLLGTSLLLDTVESESDDEYFDAEDGEPQTCKSMKGSELKKAAEVPNEELINLLLKFEIKEVILEFTKQQKEEDTILVFNVTQLGTEATMRTFDLTVVSYLKKISLDYHEIEGSKRKPLHLISSSDKPGLDLLKVEYIKADKNGPSFQTAFGKTEQTVKVAFSSLNLLLQTQALVASINYLTTIIPSDDQSISVAKEVQISTEKQQKNSTLPKAIVSSRDSDIIDFRLFAKLNAFCVIVCNEKNNIAEIKIQGLDSSLSLQSRKQSLFARLENIIVTDVDPKTVHKKAVSIMGNEVFRFNLDLYPDATEGDLYTDMSKVDGVLSLNVGCIQIVYLHKFLMSLLNFLNNFQTAKESLSAATAQAAERAATSVKDLAQRSFRVSINIDLKAPVIVIPQSSISTNAVVVDLGLIRVHNQFSLVSDEDYLNPPVIDRMDVQLTKLTLYRTVIQPGIYHPDIQLLHPINLEFLVNRNLAASWYHKVPVVEIKGHLDSMNVSLNQEDLNLLFRILTENLCEGTEDLDKVKPRVQETGEIKEPLEISISQDVHDSKNTLTTGVEEIRSVDIINMLLNFEIKEVVVTLMKKSEKKGRPLHELNVLQLGMEAKVKTYDMTAKAYLKKISMQCFDFTDSKGEPLHIINSSNVTDEPLLKMLLTKADSDGPEFKTIHDSTKQRLKVSFASLDLVLHLEALLSFMDFLSSAAPFSEPSSSEKESELKPLVGESRSIAVKAVSSNISQKDVFDLKITAELNAFNVFVCDQKCNIADIKIHGMDASISVKPKQTDVFARLKDIIVMNVDLQSIHKKAVSILGDEVFRFQLTLYPDATEGEAYADMSKVDGKLSFKVGCIQIVYVHKFFMSLLNFLNNFQTAKEALSTATVQAAERAASSMKDLAQKSFRLLMDINLKAPVIIIPQSSVSPNAVIADLGLIRVENKFSLVPMEHYSLPPVIDKMNIELTQLKLSRTILQASLPQNDIEILKPVNMLLSIQRNLAAAWYVQIPGMEIKGKLKPMQVALSEDDLTVLMKILLENLGEASSQPSPTQSVQETVRVRKVDVSSVPDHLKEQEDWTDSKLSMNQIVSLQFDFHFESLSIILYNNDINQESGVAFHNDSFQLGELRLHLMASSGKMFKDGSMNVSVKLKTCTLDDLREGIERATSRMIDRKNDQDNNSSMIDISYKQDKNGSQIDAVLDKLYVCASVEFLMTVADFFIKAVPQSPENVAKETQILPRQTATGKVKIEKDDSVRPNMTLKAMITDPEVVFVASLTKADAPALTASFQCNLSLSTSKLEQMMEASVRDLKVLACPFLREKRGKNITTVLQPCSLFMEKCTWASGKQNINIMVKEFIIKISPIILNTVLTIMAALSPKTKEDGSKDTSKEMENLWGIKSINDYNTWFLGVDTATEITESFKGIEHSLIEENCGVVVESIQVTLECGLGHRTVPLLLAESKFSGNIKNWTSLMAAVADVTLQVHYYNEIHAVWEPLIERVEGKRQWNLRLDVKKNPVQDKSLLPGDDFIPEPQMAIHISSGNTMNITISKSCLNVFNNLAKGFSEGTASTFDYSLKDRAPFTVKNAVGVPIKVKPNCNLRVMGFPEKSDIFDVDAGQNLELEYASMVPSSQGNLSILSRQESSFFTLTIVPHGYTEVANIPVARPGRRLYNVRNPNASHSDSVLVQIDATEGNKVITLRSPLQIKNHFSIAFIIYKFVKNVKLLERIGIARPEEEFHVPLDSYRCQLFIQPAGILEHQYKESTTYISWKEELHRSREVRCMLQCPSVEVSFLPLIVNTVALPDELSYICTHGEDWDVAYIIHLYPSLTLRNLLPYSLRYLLEGTAETHELAEGSTADVLHSRISGEIMELVLVKYQGKNWNGHFRIRDTLPEFFPVCFSSDSTEVTTVDLSVHVRRIGSRMVLSVFSPYWLINKTTRVLQYRSEDIHVKHPADFRDIILFSFKKKNIFTKNKVQLKISTSAWSSSFSLDTVGSYGCVKCPANNMEYLVGVSIKMSSFNLSRIVTLTPFCTIANKSSLELEVGEIASDGSMPTNKWNYIASSECLPFWPESLSGKLCVRVVGCEGSSKPFFYNRQDNGTLLSLEDLNGGILVDVNTAEHSTVITFSDYHEGSAPALIMNHTPWDILTYKQSGSPEEMVLLPRQARLFAWADPTGTRKLTWTYAANVGEHDLLKDGCGQFPYDANIQIHWVSFLDGRQRVLLFTDDVALVSKALQAEEMEQADYEITLSLHSLGLSLVNNESKQEVSYIGITSSGVVWEVKPKQKWKPFSQKQIILLEQSYQKHQISRDHGWIKLDNNFEVNFDKDPMEMRLPIRSPIKRDFLSGIQIEFKQSSHQRSLRARLYWLQVDNQLPGAMFPVVFHPVAPPKSIALDSEPKPFIDVSVITRFNEYSKVLQFKYFMVLIQEMALKIDQGFLGAIIALFTPTTDPEAERRRTKLIQQDIDALNAELMETSMTDMSILSFFEHFHISPVKLHLSLSLGSGGEESDKEKQEMFAVHSVNLLLKSIGATLTDVDDLIFKLAYYEIRYQFYKRDQLIWSVVRHYSEQFLKQMYVLVLGLDVLGNPFGLIRGLSEGVEALFYEPFQGAVQGPEEFAEGLVIGVRSLFGHTVGGAAGVVSRITGSVGKGLAAITMDKEYQQKRREELSRQPRDFGDSLARGGKGFLRGVVGGVTGIITKPVEGAKKEGAAGFFKGIGKGLVGAVARPTGGIVDMASSTFQGIQRAAESTEEVSSLRPPRLIHEDGIIRPYDRQESEGSDLLENHIKKLEGETYRYHCAIPGSKKTILMVTNRRVLCIKEVEILGLMCVDWQCPFEDFVFPPSVSENVLKISVKEQGLFHKKDSANQGCVRKVYLKDTATAERACNAIEDAQSTRQQQKLMKQSSVRLLRPQLPS

SEQ ID NO: 6630 - protein, 3628 aa, Homo sapiens
MVLESVVADLLNRFLGDYVENLNKSQLKLGIWGGNVALDNLQIKENALSELDVPFKVKAGQIDKLTLKIPWKNLYGEAVVATLEGLYLLVVPGASIKYDAVKEEKSLQDVKQKELSRIEEALQKAAEKGTHSGEFIYGLENFVYKDIKPGRKRKKHKKHFKKPFKGLDRSKDKPKEAKKDTFVEKLATQVIKNVQVKITDIHIKYEDDVTDPKRPLSFGVTLGELSLLTANEHWTPCILNEADKIIYKLIRLDSLSAYWNVNCSMSYQRSREQILDQLKNEILTSGNIPPNYQYIFQPISASAKLYMNPYAESELKTPKLDCNIEIQNIAIELTKPQYLSMIDLLESVDYMVRNAPYRKYKPYLPLHTNGRRWWKYAIDSVLEVHIRRYTQMWSWSNIKKHRQLLKSYKIAYKNKLTQSKVSEEIQKEIQDLEKTLDVFNIILARQQAQVEVIRSGQKLRKKSADTGEKRGGWFSGLWGKKESKKKDEESLIPETIDDLMTPEEKDKLFTAIGYSESTHNLTLPKQYVAHIMTLKLVSTSVTIRENKNIPEILKIQIIGLGTQVSQRPGAQALKVEAKLEHWYITGLRQQDIVPSLVASIGDTTSSLLKIKFETNPEDSPADQTLIVQSQPVEVIYDAKTVNAVVEFFQSNKGLDLEQITSATLMKLEEIKERTATGLTHIIETRKVLDLRINLKPSYLVVPQTGFHHEKSDLLILDFGTFQLNSKDQGLQKTTNSSLEEIMDKAYDKFDVEIKNVQLLFARAEETWKKCRFQHPSTMHILQPMDIHVELAKAMVEKDIRMARFKVSGGLPLMHVRISDQKMKDVLYLMNSIPLPQKSSAQSPERQVSSIPIISGGTKGLLGTSLLLDTVESESDDEYFDAEDGEPQTCKSMKGSELKKAAEVPNEELINLLLKFEIKEVILEFTKQQKEEDTILVFNVTQLGTEATMRTFDLTVVSYLKKISLDYHEIEGSKRKPLHLISSSDKPGLDLLKVEYIKADKNGPSFQTAFGKTEQTVKVAFSSLNLLLQTQALVASINYLTTIIPSDDQSISVAKEVQISTEKQQKNSTLPKAIVSSRDSDIIDFRLFAKLNAFCVIVCNEKNNIAEIKIQGLDSSLSLQSRKQSLFARLENIIVTDVDPKTVHKKAVSIMGNEVFRFNLDLYPDATEGDLYTDMSKVDGVLSLNVGCIQIVYLHKFLMSLLNFLNNFQTAKESLSAATAQAAERAATSVKDLAQRSFRVSINIDLKAPVIVIPQSSISTNAVVVDLGLIRVHNQFSLVSDEDYLNPPVIDRMDVQLTKLTLYRTVIQPGIYHPDIQLLHPINLEFLVNRNLAASWYHKVPVVEIKGHLDSMNVSLNQEDLNLLFRILTENLCEGTEDLDKVKPRVQETGEIKEPLEISISQDVHDSKNTLTTGVEEIRSVDIINMLLNFEIKEVVVTLMKKSEKKGRPLHELNVLQLGMEAKVKTYDMTAKAYLKKISMQCFDFTDSKGEPLHIINSSNVTDEPLLKMLLTKADSDGPEFKTIHDSTKQRLKVSFASLDLVLHLEALLSFMDFLSSAAPFSEPSSSEKESELKPLVGESRSIAVKAVSSNISQKDVFDLKITAELNAFNVFVCDQKCNIADIKIHGMDASISVKPKQTDVFARLKDIIVMNVDLQSIHKKAVSILGDEVFRFQLTLYPDATEGEAYADMSKVDGKLSFKVGCIQIVYVHKFFMSLLNFLNNFQTAKEALSTATVQAAERAASSMKDLAQKSFRLLMDINLKAPVIIIPQSSVSPNAVIADLGLIRVENKFSLVPMEHYSLPPVIDKMNIELTQLKLSRTILQASLPQNDIEILKPVNMLLSIQRNLAAAWYVQIPGMEIKGKLKPMQVALSEDDLTVLMKILLENLGEASSQPSPTQSVQETVRVRKVDVSSVPDHLKEQEDWTDSKLSMNQIVSLQFDFHFESLSIILYNNDINQESGVAFHNDSFQLGELRLHLMASSGKMFKDGSMNVSVKLKTCTLDDLREGIERATSRMIDRKNDQDNNSSMIDISYKQDKNGSQIDAVLDKLYVCASVEFLMTVADFFIKAVPQSPENVAKETQILPRQTATGKVKIEKDDSVRPNMTLKAMITDPEVVFVASLTKADAPALTASFQCNLSLSTSKLEQMMEASVRDLKVLACPFLREKRGKNITTVLQPCSLFMEKCTWASGKQNINIMVKEFIIKISPIILNTVLTIMAALSPKTKEDGSKDTSKEMENLWGIKSINDYNTWFLGVDTATEITESFKGIEHSLIEENCGVVVESIQVTLECGLGHRTVPLLLAESKFSGNIKNWTSLMAAVADVTLQVHYYNEIHAVWEPLIERVEGKRQWNLRLDVKKNPVQDKSLLPGDDFIPEPQMAIHISSGNTMNITISKSCLNVFNNLAKGFSEGTASTFDYSLKDRAPFTVKNAVGVPIKVKPNCNLRVMGFPEKSDIFDVDAGQNLELEYASMVPSSQGNLSILSRQESSFFTLTIVPHGYTEVANIPVARPGRRLYNVRNPNASHSDSVLVQIDATEGNKVITLRSPLQIKNHFSIAFIIYKFVKNVKLLERIGIARPEEEFHVPLDSYRCQLFIQPAGILEHQYKESTTYISWKEELHRSREVRCMLQCPSVEVSFLPLIVNTVALPDELSYICTHGEDWDVAYIIHLYPSLTLRNLLPYSLRYLLEGTAETHELAEGSTADVLHSRISGEIMELVLVKYQGKNWNGHFRIRDTLPEFFPVCFSSDSTEVTTVDLSVHVRRIGSRMVLSVFSPYWLINKTTRVLQYRSEDIHVKHPADFRDIILFSFKKKNIFTKNKVQLKISTSAWSSSFSLDTVGSYGCVKCPANNMEYLVGVSIKMSSFNLSRIVTLTPFCTIANKSSLELEVGEIASDGSMPTNKWNYIASSECLPFWPESLSGKLCVRVVGCEGSSKPFFYNRQDNGTLLSLEDLNGGILVDVNTAEHSTVITFSDYHEGSAPALIMNHTPWDILTYKQSGSPEEMVLLPRQARLFAWADPTGTRKLTWTYAANVGEHDLLKDGCGQFPYDANIQIHWVSFLDGRQRVLLFTDDVALVSKALQAEEMEQADYEITLSLHSLGLSLVNNESKQEVSYIGITSSGVVWEVKPKQKWKPFSQKQIILLEQSYQKHQISRDHGWIKLDNNFEVNFDKDPMEMRLPIRSPIKRDFLSGIQIEFKQSSHQRSLRARLYWLQVDNQLPGAMFPVVFHPVAPPKSIALDSEPKPFIDVSVITRFNEYSKVLQFKYFMVLIQEMALKIDQGFLGAIIALFTPTTDPEAERRRTKLIQQDIDALNAELMETSMTDMSILSFFEHFHISPVKLHLSLSLGSGGEESDKEKQEMFAVHSVNLLLKSIGATLTDVDDLIFKLAYYEIRYQFYKRDQLIWSVVRHYSEQFLKQMYVLVLGLDVLGNPFGLIRGLSEGVEALFYEPFQGAVQGPEEFAEGLVIGVRSLFGHTVGGAAGVVSRITGSVGKGLAAITMDKEYQQKRREELSRQPRDFGDSLARGGKGFLRGVVGGVTGIITKPVEGAKKEGAAGFFKGIGKGLVGAVARPTGGIVDMASSTFQGIQRAAESTEEVSSLRPPRLIHEDGIIRPYDRQESEGSDLLEQELEIQE

SEQ ID NO: 6631 - protein, 3710 aa, Homo sapiens
MVLESVVADLLNRFLGDYVENLNKSQLKLGIWGGNVALDNLQIKENALSELDVPFKVKAGQIDKLTLKIPWKNLYGEAVVATLEGLYLLVVPGASIKYDAVKEEKSLQDVKQKELSRIEEALQKAAEKDKPKEAKKDTFVEKLATQVIKNVQVKITDIHIKYEDDVTDPKRPLSFGVTLGELSLLTANEHWTPCILNEADKIIYKLIRLDSLSAYWNVNCSMSYQRSREQILDQLKNEILTSGNIPPNYQYIFQPISASAKLYMNPYAESELKTPKLDCNIEIQNIAIELTKPQYLSMIDLLESVDYMVRNAPYRKYKPYLPLHTNGRRWWKYAIDSVLEVHIRRYTQMWSWSNIKKHRQLLKSYKIAYKNKLTQSKVSEEIQKEIQDLEKTLDVFNIILARQQAQVEVIRSGQKLRKKSADTGEKRGGWFSGLWGKKESKKKDEESLIPETIDDLMTPEEKDKLFTAIGYSESTHNLTLPKQYVAHIMTLKLVSTSVTIRENKNIPEILKIQIIGLGTQVSQRPGAQALKVEAKLEHWYITGLRQQDIVPSLVASIGDTTSSLLKIKFETNPEDSPADQTLIVQSQPVEVIYDAKTVNAVVEFFQSNKGLDLEQITSATLMKLEEIKERTATGLTHIIETRKVLDLRINLKPSYLVVPQTGFHHEKSDLLILDFGTFQLNSKDQGLQKTTNSSLEEIMDKAYDKFDVEIKNVQLLFARAEETWKKCRFQHPSTMHILQPMDIHVELAKAMVEKDIRMARFKVSGGLPLMHVRISDQKMKDVLYLMNSIPLPQKSSAQSPERQVSSIPIISGGTKGLLGTSLLLDTVESESDDEYFDAEDGEPQTCKSMKGSELKKAAEVPNEELINLLLKFEIKEVILEFTKQQKEEDTILVFNVTQLGTEATMRTFDLTVVSYLKKISLDYHEIEGSKRKPLHLISSSDKPGLDLLKVEYIKADKNGPSFQTAFGKTEQTVKVAFSSLNLLLQTQALVASINYLTTIIPSDDQSISVAKEVQISTEKQQKNSTLPKAIVSSRDSDIIDFRLFAKLNAFCVIVCNEKNNIAEIKIQGLDSSLSLQSRKQSLFARLENIIVTDVDPKTVHKKAVSIMGNEVFRFNLDLYPDATEGDLYTDMSKVDGVLSLNVGCIQIVYLHKFLMSLLNFLNNFQTAKESLSAATAQAAERAATSVKDLAQRSFRVSINIDLKAPVIVIPQSSISTNAVVVDLGLIRVHNQFSLVSDEDYLNPPVIDRMDVQLTKLTLYRTVIQPGIYHPDIQLLHPINLEFLVNRNLAASWYHKVPVVEIKGHLDSMNVSLNQEDLNLLFRILTENLCEGTEDLDKVKPRVQETGEIKEPLEISISQDVHDSKNTLTTGVEEIRSVDIINMLLNFEIKEVVVTLMKKSEKKGRPLHELNVLQLGMEAKVKTYDMTAKAYLKKISMQCFDFTDSKGEPLHIINSSNVTDEPLLKMLLTKADSDGPEFKTIHDSTKQRLKVSFASLDLVLHLEALLSFMDFLSSAAPFSEPSSSEKESELKPLVGESRSIAVKAVSSNISQKDVFDLKITAELNAFNVFVCDQKCNIADIKIHGMDASISVKPKQTDVFARLKDIIVMNVDLQSIHKKAVSILGDEVFRFQLTLYPDATEGEAYADMSKVDGKLSFKVGCIQIVYVHKFFMSLLNFLNNFQTAKEALSTATVQAAERAASSMKDLAQKSFRLLMDINLKAPVIIIPQSSVSPNAVIADLGLIRVENKFSLVPMEHYSLPPVIDKMNIELTQLKLSRTILQASLPQNDIEILKPVNMLLSIQRNLAAAWYVQIPGMEIKGKLKPMQVALSEDDLTVLMKILLENLGEASSQPSPTQSVQETVRVRKVDVSSVPDHLKEQEDWTDSKLSMNQIVSLQFDFHFESLSIILYNNDINQESGVAFHNDSFQLGELRLHLMASSGKMFKDGSMNVSVKLKTCTLDDLREGIERATSRMIDRKNDQDNNSSMIDISYKQDKNGSQIDAVLDKLYVCASVEFLMTVADFFIKAVPQSPENVAKETQILPRQTATGKVKIEKDDSVRPNMTLKAMITDPEVVFVASLTKADAPALTASFQCNLSLSTSKLEQMMEASVRDLKVLACPFLREKRGKNITTVLQPCSLFMEKCTWASGKQNINIMVKEFIIKISPIILNTVLTIMAALSPKTKEDGSKDTSKEMENLWGIKSINDYNTWFLGVDTATEITESFKGIEHSLIEENCGVVVESIQVTLECGLGHRTVPLLLAESKFSGNIKNWTSLMAAVADVTLQVHYYNEIHAVWEPLIERVEGKRQWNLRLDVKKNPVQDKSLLPGDDFIPEPQMAIHISSGNTMNITISKSCLNVFNNLAKGFSEGTASTFDYSLKDRAPFTVKNAVGVPIKVKPNCNLRVMGFPEKSDIFDVDAGQNLELEYASMVPSSQGNLSILSRQESSFFTLTIVPHGYTEVANIPVARPGRRLYNVRNPNASHSDSVLVQIDATEGNKVITLRSPLQIKNHFSIAFIIYKFVKNVKLLERIGIARPEEEFHVPLDSYRCQLFIQPAGILEHQYKESTTYISWKEELHRSREVRCMLQCPSVEVSFLPLIVNTVALPDELSYICTHGEDWDVAYIIHLYPSLTLRNLLPYSLRYLLEGTAETHELAEGSTADVLHSRISGEIMELVLVKYQGKNWNGHFRIRDTLPEFFPVCFSSDSTEVTTVDLSVHVRRIGSRMVLSVFSPYWLINKTTRVLQYRSEDIHVKHPADFRDIILFSFKKKNIFTKNKVQLKISTSAWSSSFSLDTVGSYGCVKCPANNMEYLVGVSIKMSSFNLSRIVTLTPFCTIANKSSLELEVGEIASDGSMPTNKWNYIASSECLPFWPESLSGKLCVRVVGCEGSSKPFFYNRQDNGTLLSLEDLNGGILVDVNTAEHSTVITFSDYHEGSAPALIMNHTPWDILTYKQSGSPEEMVLLPRQARLFAWADPTGTRKLTWTYAANVGEHDLLKDGCGQFPYDANIQIHWVSFLDGRQRVLLFTDDVALVSKALQAEEMEQADYEITLSLHSLGLSLVNNESKQEVSYIGITSSGVVWEVKPKQKWKPFSQKQIILLEQSYQKHQISRDHGWIKLDNNFEVNFDKDPMEMRLPIRSPIKRDFLSGIQIEFKQSSHQRSLRARLYWLQVDNQLPGAMFPVVFHPVAPPKSIALDSEPKPFIDVSVITRFNEYSKVLQFKYFMVLIQEMALKIDQGFLGAIIALFTPTTDPEAERRRTKLIQQDIDALNAELMETSMTDMSILSFFEHFHISPVKLHLSLSLGSGGEESDKEKQEMFAVHSVNLLLKSIGATLTDVDDLIFKLAYYEIRYQFYKRDQLIWSVVRHYSEQFLKQMYVLVLGLDVLGNPFGLIRGLSEGVEALFYEPFQGAVQGPEEFAEGLVIGVRSLFGHTVGGAAGVVSRITGSVGKGLAAITMDKEYQQKRREELSRQPRDFGDSLARGGKGFLRGVVGGVTGIITKPVEGAKKEGAAGFFKGIGKGLVGAVARPTGGIVDMASSTFQGIQRAAESTEEVSSLRPPRLIHEDGIIRPYDRQESEGSDLLENHIKKLEGETYRYHCAIPGSKKTILMVTNRRVLCIKEVEILGLMCVDWQCPFEDFVFPPSVSENVLKISVKEQGLFHKKDSANQGCVRKVYLKDTATAERACNAIEDAQSTRQQQKLMKQSSVRLLRPQLPS

SEQ ID NO: 6632 - protein, 3585 aa, Homo sapiens
MVLESVVADLLNRFLGDYVENLNKSQLKLGIWGGNVALDNLQIKENALSELDVPFKVKAGQIDKLTLKIPWKNLYGEAVVATLEGLYLLVVPGASIKYDAVKEEKSLQDVKQKELSRIEEALQKAAEKDKPKEAKKDTFVEKLATQVIKNVQVKITDIHIKYEDDVTDPKRPLSFGVTLGELSLLTANEHWTPCILNEADKIIYKLIRLDSLSAYWNVNCSMSYQRSREQILDQLKNEILTSGNIPPNYQYIFQPISASAKLYMNPYAESELKTPKLDCNIEIQNIAIELTKPQYLSMIDLLESVDYMVRNAPYRKYKPYLPLHTNGRRWWKYAIDSVLEVHIRRYTQMWSWSNIKKHRQLLKSYKIAYKNKLTQSKVSEEIQKEIQDLEKTLDVFNIILARQQAQVEVIRSGQKLRKKSADTGEKRGGWFSGLWGKKESKKKDEESLIPETIDDLMTPEEKDKLFTAIGYSESTHNLTLPKQYVAHIMTLKLVSTSVTIRENKNIPEILKIQIIGLGTQVSQRPGAQALKVEAKLEHWYITGLRQQDIVPSLVASIGDTTSSLLKIKFETNPEDSPADQTLIVQSQPVEVIYDAKTVNAVVEFFQSNKGLDLEQITSATLMKLEEIKERTATGLTHIIETRKVLDLRINLKPSYLVVPQTGFHHEKSDLLILDFGTFQLNSKDQGLQKTTNSSLEEIMDKAYDKFDVEIKNVQLLFARAEETWKKCRFQHPSTMHILQPMDIHVELAKAMVEKDIRMARFKVSGGLPLMHVRISDQKMKDVLYLMNSIPLPQKSSAQSPERQVSSIPIISGGTKGLLGTSLLLDTVESESDDEYFDAEDGEPQTCKSMKGSELKKAAEVPNEELINLLLKFEIKEVILEFTKQQKEEDTILVFNVTQLGTEATMRTFDLTVVSYLKKISLDYHEIEGSKRKPLHLISSSDKPGLDLLKVEYIKADKNGPSFQTAFGKTEQTVKVAFSSLNLLLQTQALVASINYLTTIIPSDDQSISVAKEVQISTEKQQKNSTLPKAIVSSRDSDIIDFRLFAKLNAFCVIVCNEKNNIAEIKIQGLDSSLSLQSRKQSLFARLENIIVTDVDPKTVHKKAVSIMGNEVFRFNLDLYPDATEGDLYTDMSKVDGVLSLNVGCIQIVYLHKFLMSLLNFLNNFQTAKESLSAATAQAAERAATSVKDLAQRSFRVSINIDLKAPVIVIPQSSISTNAVVVDLGLIRVHNQFSLVSDEDYLNPPVIDRMDVQLTKLTLYRTVIQPGIYHPDIQLLHPINLEFLVNRNLAASWYHKVPVVEIKGHLDSMNVSLNQEDLNLLFRILTENLCEGTEDLDKVKPRVQETGEIKEPLEISISQDVHDSKNTLTTGVEEIRSVDIINMLLNFEIKEVVVTLMKKSEKKGRPLHELNVLQLGMEAKVKTYDMTAKAYLKKISMQCFDFTDSKGEPLHIINSSNVTDEPLLKMLLTKADSDGPEFKTIHDSTKQRLKVSFASLDLVLHLEALLSFMDFLSSAAPFSEPSSSEKESELKPLVGESRSIAVKAVSSNISQKDVFDLKITAELNAFNVFVCDQKCNIADIKIHGMDASISVKPKQTDVFARLKDIIVMNVDLQSIHKKAVSILGDEVFRFQLTLYPDATEGEAYADMSKVDGKLSFKVGCIQIVYVHKFFMSLLNFLNNFQTAKEALSTATVQAAERAASSMKDLAQKSFRLLMDINLKAPVIIIPQSSVSPNAVIADLGLIRVENKFSLVPMEHYSLPPVIDKMNIELTQLKLSRTILQASLPQNDIEILKPVNMLLSIQRNLAAAWYVQIPGMEIKGKLKPMQVALSEDDLTVLMKILLENLGEASSQPSPTQSVQETVRVRKVDVSSVPDHLKEQEDWTDSKLSMNQIVSLQFDFHFESLSIILYNNDINQESGVAFHNDSFQLGELRLHLMASSGKMFKDGSMNVSVKLKTCTLDDLREGIERATSRMIDRKNDQDNNSSMIDISYKQDKNGSQIDAVLDKLYVCASVEFLMTVADFFIKAVPQSPENVAKETQILPRQTATGKVKIEKDDSVRPNMTLKAMITDPEVVFVASLTKADAPALTASFQCNLSLSTSKLEQMMEASVRDLKVLACPFLREKRGKNITTVLQPCSLFMEKCTWASGKQNINIMVKEFIIKISPIILNTVLTIMAALSPKTKEDGSKDTSKEMENLWGIKSINDYNTWFLGVDTATEITESFKGIEHSLIEENCGVVVESIQVTLECGLGHRTVPLLLAESKFSGNIKNWTSLMAAVADVTLQVHYYNEIHAVWEPLIERVEGKRQWNLRLDVKKNPVQDKSLLPGDDFIPEPQMAIHISSGNTMNITISKSCLNVFNNLAKGFSEGTASTFDYSLKDRAPFTVKNAVGVPIKVKPNCNLRVMGFPEKSDIFDVDAGQNLELEYASMVPSSQGNLSILSRQESSFFTLTIVPHGYTEVANIPVARPGRRLYNVRNPNASHSDSVLVQIDATEGNKVITLRSPLQIKNHFSIAFIIYKFVKNVKLLERIGIARPEEEFHVPLDSYRCQLFIQPAGILEHQYKESTTYISWKEELHRSREVRCMLQCPSVEVSFLPLIVNTVALPDELSYICTHGEDWDVAYIIHLYPSLTLRNLLPYSLRYLLEGTAETHELAEGSTADVLHSRISGEIMELVLVKYQGKNWNGHFRIRDTLPEFFPVCFSSDSTEVTTVDLSVHVRRIGSRMVLSVFSPYWLINKTTRVLQYRSEDIHVKHPADFRDIILFSFKKKNIFTKNKVQLKISTSAWSSSFSLDTVGSYGCVKCPANNMEYLVGVSIKMSSFNLSRIVTLTPFCTIANKSSLELEVGEIASDGSMPTNKWNYIASSECLPFWPESLSGKLCVRVVGCEGSSKPFFYNRQDNGTLLSLEDLNGGILVDVNTAEHSTVITFSDYHEGSAPALIMNHTPWDILTYKQSGSPEEMVLLPRQARLFAWADPTGTRKLTWTYAANVGEHDLLKDGCGQFPYDANIQIHWVSFLDGRQRVLLFTDDVALVSKALQAEEMEQADYEITLSLHSLGLSLVNNESKQEVSYIGITSSGVVWEVKPKQKWKPFSQKQIILLEQSYQKHQISRDHGWIKLDNNFEVNFDKDPMEMRLPIRSPIKRDFLSGIQIEFKQSSHQRSLRARLYWLQVDNQLPGAMFPVVFHPVAPPKSIALDSEPKPFIDVSVITRFNEYSKVLQFKYFMVLIQEMALKIDQGFLGAIIALFTPTTDPEAERRRTKLIQQDIDALNAELMETSMTDMSILSFFEHFHISPVKLHLSLSLGSGGEESDKEKQEMFAVHSVNLLLKSIGATLTDVDDLIFKLAYYEIRYQFYKRDQLIWSVVRHYSEQFLKQMYVLVLGLDVLGNPFGLIRGLSEGVEALFYEPFQGAVQGPEEFAEGLVIGVRSLFGHTVGGAAGVVSRITGSVGKGLAAITMDKEYQQKRREELSRQPRDFGDSLARGGKGFLRGVVGGVTGIITKPVEGAKKEGAAGFFKGIGKGLVGAVARPTGGIVDMASSTFQGIQRAAESTEEVSSLRPPRLIHEDGIIRPYDRQESEGSDLLEQELEIQE

SEQ ID NO: 6633 - protein, 223 aa, Homo sapiens
MRIFRGCTQPSTLGQGVHSPLMKAQFITHHSRKQVKPGEGWGRSSFTRACRDHTTILSGNRSFSAVAATPAKHKHMHTRTHTHMHTHTGMHTLTGTHVHTPHTQMHTRILTLSHMHTHAHTHAHTHGHTHTRAHSTHAHTHAHSHYHTRTLTLTHSHAHSCTLTSTITHMHTHTHMHTHTSTLTRTLTLTHTHMHTFLSLVSHLAGYISCQFIFSSENPRLCH

SEQ ID NO: 6634 - protein, 707 aa, Homo sapiens
MTTFKEAMTFKDVAVVFTEEELGLLDLAQRKLYRDVMLENFRNLLSVGHQAFHRDTFHFLREEKIWMMKTAIQREGNSGDKIQTEMETVSEAGTHQEWSFQQIWEKIASDLTRSQDLMINSSQFSKEGDFPCQTEAGLSVIHTRQKSSQGNGYKPSFSDVSHFDFHQQLHSGEKSHTCDECGKNFCYISALRIHQRVHMGEKCYKCDVCGKEFSQSSHLQTHQRVHTGEKPFKCVECGKGFSRRSALNVHHKLHTGEKPYNCEECGKAFIHDSQLQEHQRIHTGEKPFKCDICGKSFCGRSRLNRHSMVHTAEKPFRCDTCDKSFRQRSALNSHRMIHTGEKPYKCEECGKGFICRRDLYTHHMVHTGEKPYNCKECGKSFRWASCLLKHQRVHSGEKPFKCEECGKGFYTNSQCYSHQRSHSGEKPYKCVECGKGYKRRLDLDFHQRVHTGEKLYNCKECGKSFSRAPCLLKHERLHSGEKPFQCEECGKRFTQNSHLHSHQRVHTGEKPYKCEKCGKGYNSKFNLDMHQKVHTGERPYNCKECGKSFGWASCLLKHQRLHSGEKPFKCEECGKRFTQNSQLHSHQRVHTGEKPYKCDECGKGFSWSSTRLTHQRRHSRETPLKCEQHGKNIVQNSFSKVQEKVHSVEKPYKCEDCGKGYNRRLNLDMHQRVHMGEKTWKCRECDMCFSQASSLRLHQNVHVGEKP

SEQ ID NO: 6635 - protein, 234 aa, Homo sapiens
MSSEVSARRDAKKLVRSPSGLRMVPEHRAFGSPFGLEEPQWVPDKECRRCMQCDAKFDFLTRKHHCRRCGKCFCDRCCSQKVPLRRMCFVDPVRQCAECALVSLKEAEFYDKQLKVLLSGATFLVTFGNSEKPETMTCRLSNNQRYLFLDGDSHYEIEIVHISTVQILTEGFPPGGGNARATGMFLQYTVPGTEGVTQLKLTVVEDVTVGRRQAVAWLVAMHKAAKLLYESRDQ

SEQ ID NO: 6636 - protein, 252 aa, Homo sapiens
MSSEVSARRDAKKLVRSPSGLRMVPEHRAFGSPFGLEEPQWVPDKECRRCMQCDAKFDFLTRKHHCRRCGKCFCDRCCSQKVPLRRMCFVDPVRQCAECALVSLKEAEFYDKQLKVLLSGATFLVTFGNSEKPETMTCRLSNNQRYLFLDGDSHYEIEIVHISTVQILTEGFPPGEKDIHAYTSLRGSQPASEGGNARATGMFLQYTVPGTEGVTQLKLTVVEDVTVGRRQAVAWLVAMHKAAKLLYESRDQ

SEQ ID NO: 6637 - protein, 163 aa, Homo sapiens
MCMNTSIHAHTYARTHTHSVFMSSNVTVFQWMRLMRASSRSFTQAIPAGQLLQTACSHLFTTQNTCQNALGNNTRLQHTEKVRLSIGLADFGLPGIARNTFVVPDSISRYCREGSVIGKCCPSRKSALLNKQGSLKKFKITRGETQPGVTISVLELAEIDQRF

SEQ ID NO: 6638 - protein, 532 aa, Homo sapiens
MALRSVMFSDVSIDFSPEEWEYLDLEQKDLYRDVMLENYSNLVSLGCFISKPDVISSLEQGKEPWKVVRKGRRQYPDLETKYETKKLSLENDIYEINLSQWKIMERIENHGLKGLILKNDWESTGKIEGQERPQEGYFSSVKMPSEKVSSYQKRTSVTPHQRLHFVDKPYECKECGKAFRVRQQLTFHHRIHTGEKPYECKECGMAFRQTAHLTRHQRLHSGEKLYECKECGEAFICGADLRVHQKMHIGEKPYECKECGKAFRVRGQLTLHQRIHTGEKPYVCKECGKAFRQYAHLTRHQKLNSADRLYECKECGKAFLCGSGLRVHHKLHTGEKPYECKECGKAFRVRQQLTLHQRIHTGEKPYECKECGKTFSRGYHLILHHRIHTGEKPYECKECWKAFSRYSQLISHQSIHIGVKPYDCKECGKAFRLLSQLTQHQSIHIGEKPYKCKECGKAFRLRQKLTLHQSIHTGEKPFECKECRKAFRLNSSLIQHLRIHSGEKPYECKECKKAFRQHSHLTHHLKIHNVKI

SEQ ID NO: 6639 - protein, 777 aa, Homo sapiens
MSAQTSPAEKGLNPGLMCQESYACSGTDEAIFECDECCSLQCLRCEEELHRQERLRNHERIRLKPGHVPYCDLCKGLSGHLPGVRQRAIVRCQTCKINLCLECQKRTHSGGNKRRHPVTVYNVSNLQESLEAEEMDEETKRKKMTEKVVSFLLVDENEEIQVTNEEDFIRKLDCKPDQHLKVVSIFGNTGDGKSHTLNHTFFYGREVFKTSPTQESCTVGVWAAYDPVHKVAVIDTEGLLGATVNLSQRTRLLLKVLAISDLVIYRTHADRLHNDLFKFLGDASEAYLKHFTKELKATTARCGLDVPLSTLGPAVIIFHETVHTQLLGSDHPSEVPEKLIQDRFRKLGRFPEAFSSIHYKGTRTYNPPTDFSGLRRALEQLLENNTTRSPRHPGVIFKALKALSDRFSGEIPDDQMAHSSFFPDEYFTCSSLCLSCGVGCKKSMNHGKEGVPHEAKSRCRYSHQYDNRVYTCKACYERGEEVSVVPKTSASTDSPWMGLAKYAWSGYVIECPNCGVVYRSRQYWFGNQDPVDTVVRTEIVHVWPGTDGFLKDNNNAAQRLLDGMNFMAQSVSELSLGPTKAVTSWLTDQIAPAYWRPNSQILSCNKCATSFKDNDTKHHCRACGEGFCDSCSSKTRPVPERGWGPAPVRVCDNCYEARNVQLAVTEAQVDDEGGTLIARKVGEAVQNTLGAVVTAIDIPLGLVKDAARPAYWVPDHEILHCHNCRKEFSIKLSKHHCRACGQGFCDECSHDRRAVPSRGWDHPVRVCFNCNKKPGDL

SEQ ID NO: 6640 - protein, 362 aa, Homo sapiens
MAHSSFFPDEYFTCSSLCLSCGVGCKKSMNHGKEGVPHEAKSRCRYSHQYDNRVYTCKACYERGEEVSVVPKTSASTDSPWMGLAKYAWSGYVIECPNCGVVYRSRQYWFGNQDPVDTVVRTEIVHVWPGTDGFLKDNNNAAQRLLDGMNFMAQSVSELSLGPTKAVTSWLTDQIAPAYWRPNSQILSCNKCATSFKDNDTKHHCRACGEGFCDSCSSKTRPVPERGWGPAPVRVCDNCYEARNVQLAVTEAQVDDEGGTLIARKVGEAVQNTLGAVVTAIDIPLGLVKDAARPAYWVPDHEILHCHNCRKEFSIKLSKHHCRACGQGFCDECSHDRRAVPSRGWDHPVRVCFNCNKKPGDL

SEQ ID NO: 6641 - protein, 763 aa, Homo sapiens
MSAQTSPAEKGLNPGLMCQESYACSGTDEAIFECDECCSLQCLRCEEELHRQERLRNHERIRLKPGHVPYCDLCKGLSGHLPGVRQRAIVRCQTCKINLCLECQKRTHSGGNKRRHPVTVYNVSNLQESLEAEEMDEETKRKKMTEKVVSFLLVDENEEIQVTNEEDFIRKLDCKPDQHLKVVSIFGNTGDGKSHTLNHTFFYGREVFKTSPTQESCTVGVWAAYDPVHKVAVIDTEGLLGATVNLSQRTRLLLKVLAISDLVIYRTHADRLHNDLFKFLGDASEAYLKHFTKELKATTARCGLDVPLSTLGPAVIIFHETVHTQLLGSDHPSEVPEKLIQDRFRKLGRFPEAFSSIHYKGTRTYNPPTDFSGLRRALEQLLENNTTRSPRHPGVIFKALKALSDRFSGEIPDDQMAHSSFFPDEYFTCSSLCLSCGVGCKKSMNHGKEGVPHEAKSRCRYSHQYDNRVYTCKACYERGEEVSVVPKTSASTDSPWMGLAKYAWSGRQYWFGNQDPVDTVVRTEIVHVWPGTDGFLKDNNNAAQRLLDGMNFMAQSVSELSLGPTKAVTSWLTDQIAPAYWRPNSQILSCNKCATSFKDNDTKHHCRACGEGFCDSCSSKTRPVPERGWGPAPVRVCDNCYEARNVQLAVTEAQVDDEGGTLIARKVGEAVQNTLGAVVTAIDIPLGLVKDAARPAYWVPDHEILHCHNCRKEFSIKLSKHHCRACGQGFCDECSHDRRAVPSRGWDHPVRVCFNCNKKPGDL

SEQ ID NO: 6642 - protein, 549 aa, Homo sapiens
MLENYKNLATVGYQLFKPSLISWLEQEESRTVQRGDFQASEWKVQLKTKELALQQDVLGEPTSSGIQMIGSHNGGEVSDVKQCGDVSSEHSCLKTHVRTQNSENTFECYLYGVDFLTLHKKTSTGEQRSVFSQCGKAFSLNPDVVCQRTCTGEKAFDCSDSGKSFINHSHLQGHLRTHNGESLHEWKECGRGFIHSTDLAVRIQTHRSEKPYKCKECGKGFRYSAYLNIHMGTHTGDNPYECKECGKAFTRSCQLTQHRKTHTGEKPYKCKDCGRAFTVSSCLSQHMKIHVGEKPYECKECGIAFTRSSQLTEHLKTHTAKDPFECKICGKSFRNSSCLSDHFRIHTGIKPYKCKDCGKAFTQNSDLTKHARTHSGERPYECKECGKAFARSSRLSEHTRTHTGEKPFECVKCGKAFAISSNLSGHLRIHTGEKPFECLECGKAFTHSSSLNNHMRTHSAKKPFTCMECGKAFKFPTCVNLHMRIHTGEKPYKCKQCGKSFSYSNSFQLHERTHTGEKPYECKECGKAFSSSSSFRNHERRHADERLSA

SEQ ID NO: 6643 - protein, 367 aa, Homo sapiens
MAPSGPGSSARRRCRRVLYWIPVVFITLLLGWSYYAYAIQLCIVSMENTGEQVVCLMAYHLLFAMFVWSYWKTIFTLPMNPSKEFHLSYAEKDLLEREPRGEAHQEVLRRAAKDLPIYTRTMSGAIRYCDRCQLIKPDRCHHCSVCDKCILKMDHHCPWVNNCVGFSNYKFFLLFLAYSLLYCLFIAATDLQYFIKFWTNGLPDTQAKFHIMFLFFAAAMFSVSLSSLFGYHCWLVSKNKSTLEAFRSPVFRHGTDKNGFSLGFSKNMRQVFGDEKKYWLLPIFSSLGDGCSFPTCLVNQDPEQASTPAGLNSTAKNLENHQFPAKPLRESQSHLLTDSQSWTESSINPGKCKAGMSNPALTMENET

SEQ ID NO: 6644 - protein, 164 aa, Homo sapiens
MGQKKTMGTERSRGGKRGPQPGAERPEEPGATFSKKPPEGARAPRCLSRPTAPKSGACLARRRPPGSPCSIRDAPFHTGDDRFLARENFPNVLQPLPRMFAVQQAADFESQCPRRWDSRKRPSEGLPSAGWGRWRGRPIHLGLWVSGSVRRKVSGSHVSRSLHL

SEQ ID NO: 6645 - protein, 538 aa, Homo sapiens
MTTFKEAVTFKDVAVVFTEEELGLLDPAQRKLYRDVMLENFRNLLSVGHQPFHQDTCHFLREEKFWMMGTATQREGNSGGKIQTELESVPEAGAHEEWSCQQIWEQIAKDLTRSQDSIINNSQFFENGDVPSQVEAGLPTIHTGQKPSQGGKCKQSISDVPIFDLPQQLYSEEKSYTCDECGKSICYISALHVHQRVHVGEKLFMCDVCGKEFSQSSHLQTHQRVHTGEKPFKCEQCGKGFSRRSALNVHRKLHTGEKPYICEACGKAFIHDSQLKEHKRIHTGEKPFKCDICGKTFYFRSRLKSHSMVHTGEKPFRCDTCDKSFHQRSALNRHCMVHTGEKPYRCEQCGKGFIGRLDFYKHQVVHTGEKPYNCKECGKSFRWSSCLLNHQRVHSGEKSFKCEECGKGFYTNSQLSSHQRSHSGEKPYKCEECGKGYVTKFNLDLHQRVHTGERPYNCKECGKNFSRASSILNHKRLHCQKKPFKCEDCGKRLVHRTYRKDQPRDYSGENPSKCEDCGRRYKRRLNLDILLSLFLNDT

SEQ ID NO: 6646 - protein, 549 aa, Homo sapiens
MIKRSKVLVFCSKIMEEAVTFKDVAVVFTEEELGLLDPAQRKLYRDVMLENFRNLLSVGHQPFHQDTCHFLREEKFWMMGTATQREGNSGGKIQTELESVPEAGAHEEWSCQQIWEQIAKDLTRSQDSIINNSQFFENGDVPSQVEAGLPTIHTGQKPSQGGKCKQSISDVPIFDLPQQLYSEEKSYTCDECGKSICYISALHVHQRVHVGEKLFMCDVCGKEFSQSSHLQTHQRVHTGEKPFKCEQCGKGFSRRSALNVHRKLHTGEKPYICEACGKAFIHDSQLKEHKRIHTGEKPFKCDICGKTFYFRSRLKSHSMVHTGEKPFRCDTCDKSFHQRSALNRHCMVHTGEKPYRCEQCGKGFIGRLDFYKHQVVHTGEKPYNCKECGKSFRWSSCLLNHQRVHSGEKSFKCEECGKGFYTNSQLSSHQRSHSGEKPYKCEECGKGYVTKFNLDLHQRVHTGERPYNCKECGKNFSRASSILNHKRLHCQKKPFKCEDCGKRLVHRTYRKDQPRDYSGENPSKCEDCGRRYKRRLNLDILLSLFLNDT

SEQ ID NO: 6647 - protein, 679 aa, Homo sapiens
MESRSVAQAGVQWCDLGSLQAPPPGFTLFSCLSLLSSWDYSSGFSGFCASPIEESHGALISSCNSRTMTDGLVTFRDVAIDFSQEEWECLDPAQRDLYVDVMLENYSNLVSLDLESKTYETKKIFSENDIFEINFSQWEMKDKSKTLGLEASIFRNNWKCKSIFEGLKGHQEGYFSQMIISYEKIPSYRKSKSLTPHQRIHNTEKSYVCKECGKACSHGSKLVQHERTHTAEKHFECKECGKNYLSAYQLNVHQRFHTGEKPYECKECGKTFSWGSSLVKHERIHTGEKPYECKECGKAFSRGYHLTQHQKIHTGVKSYKCKECGKAFFWGSSLAKHEIIHTGEKPYKCKECGKAFSRGYQLTQHQKIHTGKKPYECKICGKAFCWGYQLTRHQIFHTGEKPYECKECGKAFNCGSSLIQHERIHTGEKPYECKECGKAFSRGYHLSQHQKIHTGEKPFECKECGKAFSWGSSLVKHERVHTGEKSHECKECGKTFCSGYQLTRHQVFHTGEKPYECKECGKAFNCGSSLVQHERIHTGEKPYECKECGKAFSRGYHLTQHQKIHTGEKPFKCKECGKAFSWGSSLVKHERVHTNEKSYECKDCGKAFGSGYQLSVHQRFHTGEKLYQRKEFGKTFTCGSKLVHERTHSNDKPYKYNECGEAFLWTTYSNEKIDTDETL

SEQ ID NO: 6648 - protein, 659 aa, Homo sapiens
MAAAVLMDRVQSCVTFEDVFVYFSREEWELLEEAQRFLYRDVMLENFALVATLGFWCEAEHEAPSEQSVSVEGVSQVRTAESGLFQKAHPCEMCDPLLKDILHLAEHQGSHLTQKLCTRGLCRRRFSFSANFYQHQKQHNGENCFRGDDGGASFVKSCTVHMLGRSFTCREEGMDLPDSSGLFQHQTTYNRVSPCRRTECMESFPHSSSLRQHQGDYDGQMLFSCGDEGKAFLDTFTLLDSQMTHAEVRPFRCLPCGNVFKEKSALINHRKIHSGEISHVCKECGKAFIHLHHLKMHQKFHTGKRHYTCSECGKAFSRKDTLVQHQRVHTGERSYDCSECGKAYSRSSHLVQHQRIHTGERPYKCNKCGKAFSRKDTLVQHQRFHTGERPYECSECGKFFSQSSHLIEHWRIHTGARPYECIECGKFFSHNSSLIKHRRVHTGARSYVCSKCGKAFGCKDTLVQHQIIHTGARPYECSECGKAFSRKDTLVQHQKIHTGERPYECGECGKFFSHSSNLIVHQRIHTGAKPYECNECGKCFSHNSSLILHQRVHTGARPYVCSECGKAYISSSHLVQHKKVHTGARPYECSECGKFFSRNSGLILHQRVHTGEKPYVCSECGKAYSRSSHLVRHQKAHTGERAHECNSFGGPLAASLKLV

SEQ ID NO: 6649 - protein, 541 aa, Homo sapiens
MRLKMTTRNFPEREVPCDVEVERFTREVPCLSSLGDGWDCENQEGHLRQSALTLEKPGTQEAICEYPGFGEHLIASSDLPPSQRVLATNGFHAPDSNVSGLDCDPALPSYPKSYADKRTGDSDACGKGFNHSMEVIHGRNPVREKPYKYPESVKSFNHFTSLGHQKIMKRGKKSYEGKNFENIFTLSSSLNENQRNLPGEKQYRCTECGKCFKRNSSLVLHHRTHTGEKPYTCNECGKSFSKNYNLIVHQRIHTGEKPYECSKCGKAFSDGSALTQHQRIHTGEKPYECLECGKTFNRNSSLILHQRTHTGEKPYRCNECGKPFTDISHLTVHLRIHTGEKPYECSKCGKAFRDGSYLTQHERTHTGEKPFECAECGKSFNRNSHLIVHQKIHSGEKPYECKECGKTFIESAYLIRHQRIHTGEKPYGCNQCQKLFRNIAGLIRHQRTHTGEKPYECNQCGKAFRDSSCLTKHQRIHTKETPYQCPECGKSFKQNSHLAVHQRLHSREGPSRCPQCGKMFQKSSSLVRHQRAHLGEQPMET

SEQ ID NO: 6650 - protein, 213 aa, Homo sapiens
MAQETNQTPGPMLCSTGCGFYGNPRTNGMCSVCYKEHLQRQQNSGRMSPMGTASGSNSPTSDSASVQRADTSLNNCEGAAGSTSEKSRNVPVAALPVTQQMTEMSISREDKITTPKTEVSEPVVTQPSPSVSQPSTSQSEEKAPELPKPKKNRCFMCRKKVGLTGFDCRCGNLFCGLHRYSDKHNCPYDYKAEAAAKIRKENPVVVAEKIQRI

SEQ ID NO: 6651 - protein, 868 aa, Homo sapiens
MRGAASASVREPTPLPGRGAPRTKPRAGRGPTVGTPATLALPARGRPRSRNGLASKGQRGAAPTGPGHRALPSRDTALPQERNKKLEAVGTGIEPKAMSQGLVTFGDVAVDFSQEEWEWLNPIQRNLYRKVMLENYRNLASLGLCVSKPDVISSLEQGKEPWTVKRKMTRAWCPDLKAVWKIKELPLKKDFCEGKLSQAVITERLTSYNLEYSLLGEHWDYDALFETQPGLVTIKNLAVDFRQQLHPAQKNFCKNGIWENNSDLGSAGHCVAKPDLVSLLEQEKEPWMVKRELTGSLFSGQRSVHETQELFPKQDSYAEGVTDRTSNTKLDCSSFRENWDSDYVFGRKLAVGQETQFRQEPITHNKTLSKERERTYNKSGRWFYLDDSEEKVHNRDSIKNFQKSSVVIKQTGIYAGKKLFKCNECKKTFTQSSSLTVHQRIHTGEKPYKCNECGKAFSDGSSFARHQRCHTGKKPYECIECGKAFIQNTSLIRHWRYYHTGEKPFDCIDCGKAFSDHIGLNQHRRIHTGEKPYKCDVCHKSFRYGSSLTVHQRIHTGEKPYECDVCRKAFSHHASLTQHQRVHSGEKPFKCKECGKAFRQNIHLASHLRIHTGEKPFECAECGKSFSISSQLATHQRIHTGEKPYECKVCSKAFTQKAHLAQHQKTHTGEKPYECKECGKAFSQTTHLIQHQRVHTGEKPYKCMECGKAFGDNSSCTQHQRLHTGQRPYECIECGKAFKTKSSLICHRRSHTGEKPYECSVCGKAFSHRQSLSVHQRIHSGKKPYECKECRKTFIQIGHLNQHKRVHTGERSYNYKKSRKVFRQTAHLAHHQRIHTGESSTCPSLPSTSNPVDLFPKFLWNPSSLPSP

SEQ ID NO: 6652 - protein, 349 aa, Homo sapiens
MRGAASASVREPTPLPGRGAPRTKPRAGRGPTVGTPATLALPARGRPRSRNGLASKGQRGAAPTGPGHRALPSRDTALPQERNKKLEAVGTGIEPKAMSQGLVTFGDVAVDFSQEEWEWLNPIQRNLYRKVMLENYRNLASLGLCVSKPDVISSLEQGKEPWTVKRKMTRAWCPDLKAVWKIKELPLKKDFCEGKLSQAVITERLTSYNLEYSLLGEHWDYDALFETQPGLVTIKNLAVDFRQQLHPAQKNFCKNGIWENNSDLGSAGHCVAKPDLVSLLEQEKEPWMVKRELTGSLFSGECRRAWCGKSTARESGAFTKKAASSLIYSRKLYPGSLGLERKLNSGSSK

SEQ ID NO: 6653 - protein, 744 aa, Homo sapiens
MQAVVPLNKMTAISPEPQTLASTEQNEVPRVVTSGEQEAILRGNAADAESFRQRFRWFCYSEVAGPRKALSQLWELCNQWLRPDIHTKEQILELLVFEQFLTILPGEIRIWVKSQHPESSEEVVTLIEDLTQMLEEKDPVSQDSTVSQEENSKEDKMVTVCPNTESCESITLKDVAVNFSRGEWKKLEPFQKELYKEVLLENLRNLEFLDFPVSKLELISQLKWVELPWLLEEVSKSSRLDESALDKIIERCLRDDDHGLMEESQQYCGSSEEDHGNQGNSKGRVAQNKTLGSGSRGKKFDPDKSPFGHNFKETSDLIKHLRVYLRKKSRRYNESKKPFSFHSDLVLNRKEKTAGEKSRKSNDGGKVLSHSSALTEHQKRQKIHLGDRSQKCSKCGIIFIRRSTLSRRKTPMCEKCRKDSCQEAALNKDEGNESGEKTHKCSKCGKAFGYSASLTKHRRIHTGEKPYMCNECGKAFSDSSSLTPHHRTHSGEKPFKCDDCGKGFTLSAHLIKHQRIHTGEKPYKCKDCGRPFSDSSSLIQHQRIHTGEKPYTCSNCGKSFSHSSSLSKHQRIHTGEKPYKCGECGKAFRQNSCLTRHQRIHTGEKPYLCNDCGMTFSHFTSVIYHQRLHSGEKPYKCNQCEKAFPTHSLLSRHQRIHTGVKPYKCKECGKSFSQSSSLNEHHRIHTGEKPYECNYCGATFSRSSILVEHLKIHTGRREYECNECEKTFKSNSGLIRHRGFHSAE

SEQ ID NO: 6654 - protein, 256 aa, Homo sapiens
MQAVVPLNKMTAISPEPQTLASTEQNEVPRVVTSGEQEAILRGNAADAESFRQRFRWFCYSEVAGPRKALSQLWELCNQWLRPDIHTKEQILELLVFEQFLTILPGEIRIWVKSQHPESSEEVVTLIEDLTQMLEEKDPVSQDSTVSQEENSKEDKMVTVCPNTESCESITLKDVAVNFSRGEWKKLEPFQKELYKEVLLENLRNLEFLDFPVSKLELISQLKWVELPWLLEEVSKSSRLDIHGAVKKMQMFSEAE

SEQ ID NO: 6655 - protein, 132 aa, Homo sapiens
MAETYRRSRQHEQLPGQRHMDLLTGYSKLIQSRLKLLLHLGSQPPVGKTFFFSCWCHPLFHGSKTTPNVWYKFSETALSILNSCQASQLGVRKMPGDMSSSPRVREFSALVAIKEKIHILPTNAKVGSKFGS

SEQ ID NO: 6656 - protein, 554 aa, Homo sapiens
MAAADLSHGHYLSGDPVCLHEEKTPAGRIVADCLTDCYQDSVTFDDVAVDFTQEEWTLLDSTQRSLYSDVMLENYKNLATVGGQIIKPSLISWLEQEESRTVQGGVLQGWEMRLETQWSILQQDFLRGQTSIGIQLEGKHNGRELCDCEQCGEVFSEHSCLKTHVRTQSTGNTHDCNQYGKDFLTLCEKTSTGEKLSEFNQSEKIFSLTPNIVYQRTSTQEKSFECSHCGKSFINESYLQAHMRTHNGEKLYEWRNYGPGFIDSTSLSVLIETLNAKKPYKCKECGKGYRYPAYLSIHMRTHTGEKPYECKECGKAFNYSNSFQIHGRTHTGEKPYVCKECGKAFTQYSGLSMHVRSHSGDKPYECKECGKSFLTSSRLIQHIRTHTGEKPFVCVECGKAFAVSSNLSGHLRTHTEEKACECKICGKVFGYPSCLNNHMRTHSAQKPYTCKECGKAFNYSTHLKIHMRIHTGEKPYECKQCGKAFSHSSSFQIHERTHTGEKPYECKECGKAFTCSSSFRIHEKTHTEEKPYKCQQCGKAYSHPRSLRRHEQIH

SEQ ID NO: 6657 - protein, 405 aa, Homo sapiens
MGPPLAPRPAHVPGEAGPRRTRESRPGAVSFADVAVYFSPEEWECLRPAQRALYRDVMRETFGHLGALGFSVPKPAFISWVEGEVEAWSPEAQDPDGESSAAFSRGQGQEAGSRDGNEEKERLKKCPKQKEVAHEVAVKEWWPSVACPEFCNPRQSPMNPWLKDTLTRRLPHSCPDCGRNFSYPSLLASHQRVHSGERPFSCGQCQARFSQRRYLLQHQFIHTGEKPYPCPDCGRRFRQRGSLAIHRRAHTGEKPYACSDCKSRFTYPYLLAIHQRKHTGEKPYSCPDCSLRFAYTSLLAIHRRIHTGEKPYPCPDCGRRFTYSSLLLSHRRIHSDSRPFPCVECGKGFKRKTALEAHRWIHRSCSERRAWQQAVVGRSEPIPVLGGKDPPVHFRHFPDIFQECG

SEQ ID NO: 6658 - protein, 390 aa, Homo sapiens
MGPPLAPRPAHVPGEAGPRRTRESRPGAVSFADVAVYFSPEEWECLRPAQRALYRDVMRETFGHLGALGFSVPKPAFISWVEGEVEAWSPEAQDPDGSRDGNEEKERLKKCPKQKEVAHEVAVKEWWPSVACPEFCNPRQSPMNPWLKDTLTRRLPHSCPDCGRNFSYPSLLASHQRVHSGERPFSCGQCQARFSQRRYLLQHQFIHTGEKPYPCPDCGRRFRQRGSLAIHRRAHTGEKPYACSDCKSRFTYPYLLAIHQRKHTGEKPYSCPDCSLRFAYTSLLAIHRRIHTGEKPYPCPDCGRRFTYSSLLLSHRRIHSDSRPFPCVECGKGFKRKTALEAHRWIHRSCSERRAWQQAVVGRSEPIPVLGGKDPPVHFRHFPDIFQECG

SEQ ID NO: 6659 - protein, 505 aa, Homo sapiens
MPPTASLTRSPPTASQTRTLPRASRTRTPPRASLTRSPPTASLRRTPSRASRTRTPPRASLKRTPSRASLTRTLSRASLTRLKSRASHTRTPSRASLTRTPPTASRTRSLPRASRTRTPPRTSQRRMPPRTSQTRTPPRASLRRTPSRASRTRTPPRASLRRTPSRASLTRTPSRASLTRLKSRASHTRTPSRASLTRTPPTASLTRASRTRTPPRTSQTRTPPRASLRRTPSRASLTRTPSRASLTRTPSRASLTRLKSRASHTRTPSRASLTRTPPTASLTRTPPTASLTRTPPRASLTRSPPRASLTRTPPTASLTRSPPTASLTRTPPRASLTRSPPRASLTRTPSTASLTRTPSRASLTRSKSRASHTRTPSRASLTRTPPRASLTRTPPRASLTRSPPTASLTRMPPTASLTRSPPRASLTRTPPRASLTRSPSTASLTRTPPGTWLRRTPPRTSLTRTPPTASLTRTPYTASLTRTPYTASLMRMPYMTSLMTPYKAR

SEQ ID NO: 6660 - protein, 545 aa, Homo sapiens
MDCVIFEEVAVNFTPEEWALLDHAQRSLYRDVMLETCRNLASLDCYIYVRTSGSSSQRDVFGNGISNDEEIVKFTGSDSWSIFGENWRFDNTGDQHQIPQRHLRSQLGRLCESNEGHQCGETLSQTANLLVHKSYPTEAKPSECTKCGKAFENRQRSHTGQRPCKECGQACSCLSCQSPPMKTQTVEKPCNCQDSRTASVTYVKSLSSKKSYECQKCGKAFICPSSFRGHVNSHHGQKTHACKVCGKTFMYYSYLTRHVRTHTGEKPYECKECGKAFSCPSYFREHVRTHTGEKPYECKHCGKSFSCYSSFRDHVRTHTGEKPCQCKHCGKAFTCYSSLREHGRTHSGEKPYECKECGKAFRYPSSLRAHMRMHTGEKPYVCKQCGKAFGCPTYFRRHVKTHSGVKPYQCKECGKAYSFSSSLRIHVRTHTGEKPFECKHCGKAFSCHSSLREHVRTHSGEKPYECNQCGKAFSHAQYFQKHVRSHSGVKPYECTECGKAYSCSSSLRVHVRTHTGERPYECKQCGKTFRYLASLQAHVRTHAGA

SEQ ID NO: 6661 - protein, 300 aa, Homo sapiens
MHSLEKVTFEDVAIDFTQEEWDMMDTSKRKLYRDVMLENISHLVSLGYQISKSYIILQLEQGKELWREGRVFLQDQNPDRESALKKKHMISMHPIIRKDASTSMTMENSLILEDPFEYNDSGEDCTHSSTITQCLLTHSGKKPCVSKQCGKSLRNLLSPKPRKQIHTKGKSYQCNLCEKAYTNCFYLRRHKMTHTGERPYACHLCGKAFTQCSHLRRHEKTHTGERPYKCHQCGKAFIQSFNLRRHERTHLGQKCYECDKSGKAFSQSSGFRGNKIIHIGEKPHACLLCGKAFSLSSDLR

SEQ ID NO: 6662 - protein, 573 aa, Homo sapiens
MGPLQFRDVAIEFSLEEWHCLDMAQRNLYRDVMLENYRNLVFLGIVVSKPDLITHLEQGKKPSTMQRHEMVANPSVLCSHFNQDLWPEQSIKDSFQKLILRRHKKCGHDNLQLKKGCESVDKCKVHKRGYNGLNQCLTTTQSKMFQCDKHGKVFHQFSNTNRHKIRHTGKNPCKFTECGKAFNRSSTFTTHKKIHTGEKPYKCIECGKAFNRSSHLTTHKIIHTGEKRYKCEDCGKAFNRSSNLTTHKKIHTGEKPYKCEECGKAFKRSSILTTHKRIHTGEKPYKCEECGKVFKYLSSLSTHKIIHTGEKPYKCEECGKAFNWSSHLTTHKRIHTGEKPYKCEECGKGFKYSSTLTKHKIIHTGEKPYKCEECGEAFKYSCSLTAHKIIHTGKKPYKCEECGKVFKHSSPLSKHKRIHTGEKPYKCEECGKAFSRSSILTTHKIIHTGEKPYECEDCGKAFNRSSNLTKHKKIHTGEKPYKCEECGKAFKCSSILTTHKRIHTADKPYKCEECGKDFKYSSTLTRHKKIHTGGKPHKCNKCGKAFISSSNLSRHEIIHMGGNPYKCENVAKP

SEQ ID NO: 6663 - protein, 559 aa, Homo sapiens
MSATSVDTQRTKGQDNKVQNGSLHQKDTVHDNDFEPYLTGQSNQSNSYPSMSDPYLSSYYPPSIGFPYSLNEAPWSTAGDPPIPYLTTYGQLSNGDHHFMHDAVFGQPGGLGNNIYQHRFNFFPENPAFSAWGTSGSQGQQTQSSAYGSSYTYPPSSLGGTVVDGQPGFHSDTLSKAPGMNSLEQGMVGLKIGDVSSSAVKTVGSVVSSVALTGVLSGNGGTNVNMPVSKPTSWAAIASKPAKPQPKMKTKSGPVMGGGLPPPPIKHNMDIGTWDNKGPVPKAPVPQQAPSPQAAPQPQQVAQPLPAQPPALAQPQYQSPQQPPQTRWVAPRNRNAAFGQSGGAGSDSNSPGNVQPNSAPSVESHPVLEKLKAAHSYNPKEFEWNLKSGRVFIIKSYSEDDIHRSIKYSIWCSTEHGNKRLDSAFRCMSSKGPVYLLFSVNGSGHFCGVAEMKSPVDYGTSAGVWSQDKWKGKFDVQWIFVKDVPNNQLRHIRLENNDNKPVTNSRDTQEVPLEKAKQVLKIISSYKHTTSIFDDFAHYEKRQEEEEVVRKERQSRNKQ

SEQ ID NO: 6664 - protein, 197 aa, Homo sapiens
MLFLGSLGAWGTTSISTGSIFSLKTLRSQHGGQVGLKVSRPRAPRMGAATPTPRAPWVARWLMGSQAFTATPSARPPPPIKHNMDIGTWDNKGPVPKAPVPQQAPSPQAAPQPQQVAQPLPAQPPALAQPQYQSPQQPPQTRWVAPRNRNAAFGQSGGAGSDSNSPGNVQPNSAPSVESHPVLEKLKAAHSYNPKEF

SEQ ID NO: 6665 - protein, 1301 aa, Homo sapiens
MTMGDMKTPDFDDLLAAFDIPDMVDPKAAIESGHDDHESHMKQNAHGEDDSHAPSSSDVGVSVIVKNVRNIDSSEGGEKDGHNPTGNGLHNGFLTASSLDSYSKDGAKSLKGDVPASEVTLKDSTFSQFSPISSAEEFDDDEKIEVDDPPDKEDMRSSFRSNVLTGSAPQQDYDKLKALGGENSSKTGLSTSGNVEKNKAVKRETEASSINLSVYEPFKVRKAEDKLKESSDKVLENRVLDGKLSSEKNDTSLPSVAPSKTKSSSKLSSCIAAIAALSAKKAASDSCKEPVANSRESSPLPKEVNDSPRAADKSPESQNLIDGTKKPSLKQPDSPRSISSENSSKGSPSSPAGSTPAIPKVRIKTIKTSSGEIKRTVTRVLPEVDLDSGKKPSEQTASVMASVTSLLSSPASAAVLSSPPRAPLQSAVVTNAVSPAELTPKQVTIKPVATAFLPVSAVKTAGSQVINLKLANNTTVKATVISAASVQSASSAIIKAANAIQQQTVVVPASSLANAKLVPKTVHLANLNLLPQGAQATSELRQVLTKPQQQIKQAIINAAASQPPKKVSRVQVVSSLQSSVVEAFNKVLSSVNPVPVYIPNLSPPANAGITLPTRGYKCLECGDSFALEKSLTQHYDRRSVRIEVTCNHCTKNLVFYNKCSLLSHARGHKEKGVVMQCSHLILKPVPADQMIVSPSSNTSTSTSTLQSPVGAGTHTVTKIQSGITGTVISAPSSTPITPAMPLDEDPSKLCRHSLKCLECNEVFQDETSLATHFQQAADTSGQKTCTICQMLLPNQCSYASHQRIHQHKSPYTCPECGAICRSVHFQTHVTKNCLHYTRRVGFRCVHCNVVYSDVAALKSHIQGSHCEVFYKCPICPMAFKSAPSTHSHAYTQHPGIKIGEPKIIYKCSMCDTVFTLQTLLYRHFDQHIENQKVSVFKCPDCSLLYAQKQLMMDHIKSMHGTLKSIEGPPNLGINLPLSIKPATQNSANQNKEDTKSMNGKEKLEKKSPSPVKKSMETKKVASPGWTCWECDCLFMQRDVYISHVRKEHGKQMKKHPCRQCDKSFSSSHSLCRHNRIKHKGIRKVYACSHCPDSRRTFTKRLMLEKHVQLMHGIKDPDLKEMTDATNEEETEIKEDTKVPSPKRKLEEPVLEFRPPRGAITQPLKKLKINVFKVHKCAVCGFTTENLLQFHEHIPQHKSDGSSYQCRECGLCYTSHVSLSRHLFIVHKLKEPQPVSKQNGAGEDNQQENKPSHEDESPDGAVSDRKCKVCAKTFETEAALNTHMRTHGMAFIKSKRMSSAEK

SEQ ID NO: 6666 - protein, 956 aa, Homo sapiens
MASKRKSTTPCMIPVKTVVLQDASMEAQPAETLPEGPQQDLPPEASAASSEAAQNPSSTDGSTLANGHRSTLDGYLYSCKYCDFRSHDMTQFVGHMNSEHTDFNKDPTFVCSGCSFLAKTPEGLSLHNATCHSGEASFVWNVAKPDNHVVVEQSIPESTSTPDLAGEPSAEGADGQAEIIITKTPIMKIMKGKAEAKKIHTLKENVPSQPVGEALPKLSTGEMEVREGDHSFINGAVPVSQASASSAKNPHAANGPLIGTVPVLPAGIAQFLSLQQQPPVHAQHHVHQPLPTAKALPKVMIPLSSIPTYNAAMDSNSFLKNSFHKFPYPTKAELCYLTVVTKYPEEQLKIWFTAQRLKQGISWSPEEIEDARKKMFNTVIQSVPQPTITVLNTPLVASAGNVQHLIQAALPGHVVGQPEGTGGGLLVTQPLMANGLQATSSPLPLTVTSVPKQPGVAPINTVCSNTTSAVKVVNAAQSLLTACPSITSQAFLDASIYKNKKSHEQLSALKGSFCRNQFPGQSEVEHLTKVTGLSTREVRKWFSDRRYHCRNLKGSRAMIPGDHSSIIIDSVPEVSFSPSSKVPEVTCIPTTATLATHPSAKRQSWHQTPDFTPTKYKERAPEQLRALESSFAQNPLPLDEELDRLRSETKMTRREIDSWFSERRKKVNAEETKKAEENASQEEEEAAEDEGGEEDLASELRVSGENGSLEMPSSHILAERKVSPIKINLKNLRVTEANGRNEIPGLGACDPEDDESNKLAEQLPGKVSCKKTAQQRHLLRQLFVQTQWPSNQDYDSIMAQTGLPRPEVVRWFGDSRYALKNGQLKWYEDYKRGNFPPGLLVIAPGNRELLQDYYMTHKMLYEEDLQNLCDKTQMSSQQVKQWFAEKMGEETRAVADTGSEDQGPGTGELTAVHKGMGDTYSEVSENSESWEPRVPEASSEPFDTSSPQAGRQLETD

SEQ ID NO: 6667 - protein, 969 aa, Homo sapiens
MASKRKSTTPCMIPVKTVVLQDASMEAQPAETLPEGPQQDLPPEASAASSEAAQNPSSTDGSTLANGHRSTLDGYLYSCKYCDFRSHDMTQFVGHMNSEHTDFNKDPTFVCSGCSFLAKTPEGLSLHNATCHSGEASFVWNVAKPDNHVVVEQSIPESTSTPDLAGEPSAEGADGQAEIIITKTPIMKIMKGKAEAKKIHTLKENVPSQPVGEALPKLSTGEMEVREGDHSFINGAVPVSQASASSAKNPHAANGPLIGTVPVLPAGIAQFLSLQQQPPVHAQHHVHQPLPTAKALPKVMIPLSSIPTYNAAMDSNSFLKNSFHKFPYPTKAELCYLTVVTKYPEEQLKIWFTAQRLKQGISWSPEEIEDARKKMFNTVIQSVPQPTITVLNTPLVASAGNVQHLIQAALPGHVVGQPEGTGGGLLVTQPLMANGLQATSSPLPLTVTSVPKQPGVAPINTVCSNTTSAVKVVNAAQSLLTACPSITSQAFLDASIYKNKKSHEQLSALKGSFCRNQFPGQSEVEHLTKVTGLSTREVRKWFSDRRYHCRNLKGSRAMIPGDHSSIIIDSVPEVSFSPSSKVPEVTCIPTTATLATHPSAKRQSWHQTPDFTPTKYKERAPEQLRALESSFAQNPLPLDEELDRLRSETKMTRREIDSWFSERRKKVNAEETKKAEENASQEEEEAAEDEGGEEDLASELRVSGENGSLEMPSSHILAERKVSPIKINLKNLRVTEANGRNEIPGLGACDPEDDESNKLAEQLPGKVSCKKTAQQRHLLRQLFVQTQWPSNQDYDSIMAQTGLPRPEVVRWFGDSRYALKNGQLKWYEDYKRGNFPPGLLVIAPGNRELLQDYYMTHKMLYEEDLQNLCDKTQMSSQQKQTEFDLINVKDWPVWETACHVEEPNPTLCCHMPFPCPAAGHLGELPESSQTAQSLPLPSACPPPSKQQARWGSHQFFLPQCRTFPLPSNG

SEQ ID NO: 6668 - protein, 652 aa, Homo sapiens
MHPGGGPSRAERLELGLGRERPAKAIFLHRRPGEGGGRERCLRCGHVCVRRGPGPREAVPSGRPRPDTLTPPWVRQRAVTGTFCASWTPLRNRRAQRMATDMQRKRSSECLDGTLTPSDGQSMERAESPTPGMAQGMEPGAGQEGAMFVHARSYEDLTESEDGAASGDSHKEGTRGPPPLPTDMRQISQDFSELSTQLTGVARDLQEEMLPGSSEDWLEPPGAVGRPATEPPREGTTEGDEEDATEAWRLHQKHVFVLSEAGKPVYSRYGSEEALSSTMGVMVALVSFLEADKNAIRSIHADGYKVVFVRRSPLVLVAVARTRQSAQELAQELLYIYYQILSLLTGAQLSHIFQQKQNYDLRRLLSGSERITDNLLQLMARDPSFLMGAARCLPLAAAVRDTVSASLQQARARSLVFSILLARNQLVALVRRKDQFLHPIDLHLLFNLISSSSSFREGEAWTPVCLPKFNAAGFFHAHISYLEPDTDLCLLLVSTDREDFFAVSDCRRRFQERLRKRGAHLALREALRTPYYSVAQVGIPDLRHFLYKSKSSGLFTSPEIEAPYTSEEEQERLLGLYQYLHSRAHNASRPLKTIYYTGPNENLLAWVTGAFELYMCYSPLGTKASAVSAIHKLMRWIRKEEDRLFILTPLTY

SEQ ID NO: 6669 - protein, 393 aa, Homo sapiens
MATDMQRKRSSECLDGTLTPSDGQSMERAESPTPGMAQGMEPDGYKVVFVRRSPLVLVAVARTRQSAQELAQELLYIYYQILSLLTGAQLSHIFQQKQNYDLRRLLSGSERITDNLLQLMARDPSFLMGAARCLPLAAAVRDTVSASLQQARARSLVFSILLARNQLVALVRRKDQFLHPIDLHLLFNLISSSSSFREGEAWTPVCLPKFNAAGFFHAHISYLEPDTDLCLLLVSTDREDFFAVSDCRRRFQERLRKRGAHLALREALRTPYYSVAQVGIPDLRHFLYKSKSSGLFTSPEIEAPYTSEEEQERLLGLYQYLHSRAHNASRPLKTIYYTGPNENLLAWVTGAFELYMCYSPLGTKASAVSAIHKLMRWIRKEEDRLFILTPLTY

SEQ ID NO: 6670 - protein, 298 aa, Homo sapiens
MATDMQRKRSSECLDGTLTPSDGQSMERAESPTPGMAQGMEPDGYKVVFVRRSPLVLVAVARTRQSAQELAQELLYIYYQILSLLTGAQLSHIFQQKQNYDLRRLLSGSERITDNLLQLMARDPSFLMGAARCLPLAAAVRDTVSASLQQARARSLVFSILLARNQLVALVRRKDQFLHPIDLHLLFNLISSSSSFREGEAWTPVCLPKFNAAGFFHAHISYLEPDTDLCLLLVSTDREDFFAVSDCRRRFQERLRKRGAHLALREALRTPYYSVAQVGIPDLRHFLYKSKSSGLFTR

SEQ ID NO: 6671 - protein, 490 aa, Homo sapiens
MHPGGGPSRAERLELGLGRERPAKAIFLHRRPGEGGGRERCLRCGHVCVRRGPGPREAVPSGRPRPDTLTPPWVRQRAVTGTFCASWTPLRNRRAQRMATDMQRKRSSECLDGTLTPSDGQSMERAESPTPGMAQGMEPDGYKVVFVRRSPLVLVAVARTRQSAQELAQELLYIYYQILSLLTGAQLSHIFQQKQNYDLRRLLSGSERITDNLLQLMARDPSFLMGAARCLPLAAAVRDTVSASLQQARARSLVFSILLARNQLVALVRRKDQFLHPIDLHLLFNLISSSSSFREGEAWTPVCLPKFNAAGFFHAHISYLEPDTDLCLLLVSTDREDFFAVSDCRRRFQERLRKRGAHLALREALRTPYYSVAQVGIPDLRHFLYKSKSSGLFTSPEIEAPYTSEEEQERLLGLYQYLHSRAHNASRPLKTIYYTGPNENLLAWVTGAFELYMCYSPLGTKASAVSAIHKLMRWIRKEEDRLFILTPLTY

SEQ ID NO: 6672 - protein, 555 aa, Homo sapiens
MATDMQRKRSSECLDGTLTPSDGQSMERAESPTPGMAQGMEPGAGQEGAMFVHARSYEDLTESEDGAASGDSHKEGTRGPPPLPTDMRQISQDFSELSTQLTGVARDLQEEMLPGSSEDWLEPPGAVGRPATEPPREGTTEGDEEDATEAWRLHQKHVFVLSEAGKPVYSRYGSEEALSSTMGVMVALVSFLEADKNAIRSIHADGYKVVFVRRSPLVLVAVARTRQSAQELAQELLYIYYQILSLLTGAQLSHIFQQKQNYDLRRLLSGSERITDNLLQLMARDPSFLMGAARCLPLAAAVRDTVSASLQQARARSLVFSILLARNQLVALVRRKDQFLHPIDLHLLFNLISSSSSFREGEAWTPVCLPKFNAAGFFHAHISYLEPDTDLCLLLVSTDREDFFAVSDCRRRFQERLRKRGAHLALREALRTPYYSVAQVGIPDLRHFLYKSKSSGLFTSPEIEAPYTSEEEQERLLGLYQYLHSRAHNASRPLKTIYYTGPNENLLAWVTGAFELYMCYSPLGTKASAVSAIHKLMRWIRKEEDRLFILTPLTY

SEQ ID NO: 6673 - protein, 488 aa, Homo sapiens
MAPAAWLRSAAARALLPPMLLLLLQPPPLLARALPPDAHHLHAERRGPQPWHAALPSSPAPAPATQEAPRPASSLRPPRCGVPDPSDGLSARNRQKRFVLSGGRWEKTDLTYRILRFPWQLVQEQVRQTMAEALKVWSDVTPLTFTEVHEGRADIMIDFARYWHGDDLPFDGPGGILAHAFFPKTHREGDVHFDYDETWTIGDDQGTDLLQVAAHEFGHVLGLQHTTAAKALMSAFYTFRYPLSLSPDDCRGVQHLYGQPWPTVTSRTPALGPQAGIDTNEIAPLEPDAPPDACEASFDAVSTIRGELFFFKAGFVWRLRGGQLQPGYPALASRHWQGLPSPVDAAFEDAQGHIWFFQGAQYWVYDGEKPVLGPAPLTELGLVRFPVHAALVWGPEKNKIYFFRGRDYWRFHPSTRRVDSPVPRRATDWRGVPSEIDAAFQDADGYAYFLRGRLYWKFDPVKVKALEGFPRLVGPDFFGCAEPANTFL

SEQ ID NO: 6674 - protein, 362 aa, Homo sapiens
MAPKQDPKPKFQEGERVLCFHGPLLYEAKCVKVAIKDKQVKYFIHYSGWNKKSAVRPRRSEKSLKTHEDIVALFPVPEGAPSVHHPLLTSSWDEWVPESRVLKYVDTNLQKQRELQKANQEQYAEGKMRGAAPGKKTSGLQQKNVEVKTKKNKQKTPGNGDGGSTSETPQPPRKKRARVDPTVENEETFMNRVEVKVKIPEELKPWLVDDWDLITRQKQLFYLPAKKNVDSILEDYANYKKSRGNTDNKEYAVNEVVAGIKEYFNVMLGTQLLYKFERPQYAEILADHPDAPMSQVYGAPHLLRLFVRIGAMLAYTPLDEKSLALLLNYLHDFLKYLAKNSATLFSASDYEVAPPEYHRKAV

SEQ ID NO: 6675 - protein, 323 aa, Homo sapiens
MAPKQDPKPKFQEGERVLCFHGPLLYEAKCVKVAIKDKQVKYFIHYSGWNKNWDEWVPESRVLKYVDTNLQKQRELQKANQEQYAEGKMRGAAPGKKTSGLQQKNVEVKTKKNKQKTPGNGDGGSTSETPQPPRKKRARVDPTVENEETFMNRVEVKVKIPEELKPWLVDDWDLITRQKQLFYLPAKKNVDSILEDYANYKKSRGNTDNKEYAVNEVVAGIKEYFNVMLGTQLLYKFERPQYAEILADHPDAPMSQVYGAPHLLRLFVRIGAMLAYTPLDEKSLALLLNYLHDFLKYLAKNSATLFSASDYEVAPPEYHRKAV

SEQ ID NO: 6676 - protein, 235 aa, Homo sapiens
MRGAAPGKKTSGLQQKNVEVKTKKNKQKTPGNGDGGSTSETPQPPRKKRARVDPTVENEETFMNRVEVKVKIPEELKPWLVDDWDLITRQKQLFYLPAKKNVDSILEDYANYKKSRGNTDNKEYAVNEVVAGIKEYFNVMLGTQLLYKFERPQYAEILADHPDAPMSQVYGAPHLLRLFVRIGAMLAYTPLDEKSLALLLNYLHDFLKYLAKNSATLFSASDYEVAPPEYHRKAV

SEQ ID NO: 6677 - protein, 263 aa, Homo sapiens
MFGSSRGGVRGGQDQFNWEDVKTDKQRENYLGNSLMAPVGRWQKGRDLTWYAKGRAPCAGPSREEELAAVREAEREALLAALGYKNVKKQPTGLSKEDFAEVCKREGGDPEEKGVDRLLGLGSASGSVGRVAMSREDKEAAKLGLSVFTHHRVESGGPGTSAASARRKPRAEDQTESSCESHRKSKKEKKKKKKRKHKKEKKKKDKEHRRPAEATSSPTSPERPRHHHHDSDSNSPCCKRRKRGHSGDRRSPSRRWHDRGSEA

SEQ ID NO: 6678 - protein, 141 aa, Homo sapiens
MFGSSRGGVRGGQDQFNWEDVKTDKQRENYLGNSLMAPVGRWQKGRDLTWYAKGRAPCAGPSREEELAAVREAEREALLAALGYKNVKKQPTGLSKEDFAEVCKREGGDPEEKGVDRLLGLGSARCGRVSRGGQHWARLLG

SEQ ID NO: 6679 - protein, 155 aa, Homo sapiens
MFGSSRGGVRGGQDQFNWEDVKTDKQRENYLGNSLMAPVGRWQKGRDLTWYAKGRAPCAGPSREEELAAVREAEREALLAALGYKNVKKQPTGLSKEDFAEVCKREGGDPEEKGVDRLLGLGSASGSVGRVAMSREDKEAAKLGLSVFTVIPRPA

SEQ ID NO: 6680 - protein, 189 aa, Homo sapiens
MFGSSRGGVRGGQDQFNWEDVKTDKQRENYLGNSLMAPVGRWQKGRDLTWYAKGRAPCAGPSREEELAAVREAEREALLAALGYKNVKKQPTGLSKEDFAEVCKREGGDPEEKGVDRLLGLGSASGSVGRVAMSREDKEAAKLGLSVFTHHRVESGGPGTSAASARRKPRAEDQTESRGVSRVTLEERS

SEQ ID NO: 6681 - protein, 1318 aa, Homo sapiens
MDRQCSERPYSCTPTGRVSSAVSQNSRISPPVSTSMKDSSCMKVHQDSARRDRWSHPTTILLHKSQSSQATLMLQEHRMFMGEAYSAATGFKMLQDMNSADPFHLKYIIKKIKNMAHGSPKLVMETIHDYFIDNPEISSRHKFRLFQTLEMVIGASDVLEETWEKTFTRLALENMTKATELEDIYQDAASNMLVAICRHSWRVVAQHLETELLTGVFPHRSLLYVMGVLSSSEELFSQEDKACWEEQLIQMAIKSVPFLSTDVWSKELLWTLTTPSWTQQEQSPEKAFLFTYYGLILQAEKNGATVRRHLQALLETSHQWPKQREGMALTLGLAATRHLDDVWAVLDQFGRSRPIRWSLPSSSPKNSEDLRWKWASSTILLAYGQVAAKARAHILPWVDNIVSRMVFYFHYSSWDETLKQSFLTATLMLMGAVSRSEGAHSYEFFQTSELLQCLMVLMEKEPQDTLCTRSRQQAMHIASSLCKLRPPIDLERKSQLLSTCFRSVFALPLLDALEKHTCLFLEPPNIQLWPVARERAGWTHQGWGPRAVLHCSEHLQSLYSRTMEALDFMLQSLIMQNPTADELHFLLSHLYIWLASEKAHERQRAVHSCMILLKFLNHNGYLDPKEDFKRIGQLVGILGMLCQDPDRATQRCSLEGASHLYQLLMCHKTGEALQAESQAPKELSQAHSDGAPLWNSRDQKATPLGPQEMAKNHIFQLCSFQVIKDIMQQLTLAELSDLIWTAIDGLGSTSPFRVQAASEMLLTAVQEHGAKLEIVSSMAQAIRLRLCSVHIPQAKEKTLHAITLLARSHTCELVATFLNISIPLDSHTFQLWRALGAGQPTSHLVLTTLLACLQERPLPTGASDSSPCPKEKTYLRLLAAMNMLHELQFAREFKQAVQEGYPKLFLALLTQMHYVLELNLPSEPQPKQQAQEAAVPSPQSCSTSLEALKSLLSTTGHWHDFAHLELQGSWELFTTIHTYPKGVGLLARAMVQNHCRQIPAVLRQLLPSLQSPQERERKVAILILTKFLYSPVLLEVLPKQAALTVLAQGLHDPSPEVRVLSLQGLSNILFHPDKGSLLQGQLRPLLDGFFQSSDQVIVCIMGTVSDTLHRLGAQGTGSQSLGVAISTRSFFNDERDGIRAAAMALFGDLVAAMADRELSGLRTQVHQSMVPLLLHLKDQCPAVATQAKFTFYRCAVLLRWRLLHTLFCTLAWERGLSARHFLWTCLMTRSQEEFSIHLSQALSYLHSHSCHIKTWVTLFIGHTICYHPQAVFQMLNAVDTNLLFRTFEHLRSDPEPSIREFATSQLSFLQKVSARPKQ

SEQ ID NO: 6682 - protein, 486 aa, Homo sapiens
MSVTYDDSVGVEVSSDSFWEVGNYKRTVKRIDDGHRLCSDLMNCLHERARIEKAYAQQLTEWARRWRQLVEKGPQYGTVEKAWMAFMSEAERVSELHLEVKASLMNDDFEKIKNWQKEAFHKQMMGGFKETKEAEDGFRKAQKPWAKKLKEVEAAKKAHHAACKEEKLAISREANSKADPSLNPEQLKKLQDKIEKCKQDVLKTKEKYEKSLKELDQGTPQYMENMEQVFEQCQQFEEKRLRFFREVLLEVQKHLDLSNVAGYKAIYHDLEQSIRAADAVEDLRWFRANHGPGMAMNWPQFEEWSADLNRTLSRREKKKATDGVTLTGINQTGDQSLPSKPSSTLNVPSNPAQSAQSQSSYNPFEDEDDTGSTVSEKDDTKAKNVSSYEKTQSYPTDWSDDESNNPFSSTDANGDSNPFDDDATSGTEVRVRALYDYEGQEHDELSFKAGDELTKMEDEDEQGWCKGRLDNGQVGLYPANYVEAIQ

SEQ ID NO: 6683 - protein, 445 aa, Homo sapiens
MSVTYDDSVGVEVSSDSFWEVGNYKRTVKRIDDGHRLCSDLMNCLHERARIEKAYAQQLTEWARRWRQLVEKGPQYGTVEKAWMAFMSEAERVSELHLEVKASLMNDDFEKIKNWQKEAFHKQMMGGFKETKEAEDGFRKAQKPWAKKLKEVEAAKKAHHAACKEEKLAISREANSKADPSLNPEQLKKLQDKIEKCKQDVLKTKEKYEKSLKELDQGTPQYMENMEQVFEQCQQFEEKRLRFFREVLLEVQKHLDLSNVAGYKAIYHDLEQSIRAADAVEDLRWFRANHGPGMAMNWPQFEEWSADLNRTLSRREKKKATDGVTLTGINQTGDQSLPSKPSSVSSYEKTQSYPTDWSDDESNNPFSSTDANGDSNPFDDDATSGTEVRVRALYDYEGQEHDELSFKAGDELTKMEDEDEQGWCKGRLDNGQVGLYPANYVEAIQ

SEQ ID NO: 6684 - protein, 1255 aa, Homo sapiens
MTPGTQSPFFLLLLLTVLTVVTGSGHASSTPGGEKETSATQRSSVPSSTEKNAVSMTSSVLSSHSPGSGSSTTQGQDVTLAPATEPASGSAATWGQDVTSVPVTRPALGSTTPPAHDVTSAPDNKPAPGSTAPPAHGVTSAPDTRPAPGSTAPPAHGVTSAPDTRPAPGSTAPPAHGVTSAPDTRPAPGSTAPPAHGVTSAPDTRPAPGSTAPPAHGVTSAPDTRPAPGSTAPPAHGVTSAPDTRPAPGSTAPPAHGVTSAPDTRPAPGSTAPPAHGVTSAPDTRPAPGSTAPPAHGVTSAPDTRPAPGSTAPPAHGVTSAPDTRPAPGSTAPPAHGVTSAPDTRPAPGSTAPPAHGVTSAPDTRPAPGSTAPPAHGVTSAPDTRPAPGSTAPPAHGVTSAPDTRPAPGSTAPPAHGVTSAPDTRPAPGSTAPPAHGVTSAPDTRPAPGSTAPPAHGVTSAPDTRPAPGSTAPPAHGVTSAPDTRPAPGSTAPPAHGVTSAPDTRPAPGSTAPPAHGVTSAPDTRPAPGSTAPPAHGVTSAPDTRPAPGSTAPPAHGVTSAPDTRPAPGSTAPPAHGVTSAPDTRPAPGSTAPPAHGVTSAPDTRPAPGSTAPPAHGVTSAPDTRPAPGSTAPPAHGVTSAPDTRPAPGSTAPPAHGVTSAPDTRPAPGSTAPPAHGVTSAPDTRPAPGSTAPPAHGVTSAPDTRPAPGSTAPPAHGVTSAPDTRPAPGSTAPPAHGVTSAPDTRPAPGSTAPPAHGVTSAPDTRPAPGSTAPPAHGVTSAPDTRPAPGSTAPPAHGVTSAPDTRPAPGSTAPPAHGVTSAPDTRPAPGSTAPPAHGVTSAPDTRPAPGSTAPPAHGVTSAPDTRPAPGSTAPPAHGVTSAPDTRPAPGSTAPPAHGVTSAPDTRPAPGSTAPPAHGVTSAPDTRPAPGSTAPPAHGVTSAPDNRPALGSTAPPVHNVTSASGSASGSASTLVHNGTSARATTTPASKSTPFSIPSHHSDTPTTLASHSTKTDASSTHHSSVPPLTSSNHSTSPQLSTGVSFFFLSFHISNLQFNSSLEDPSTDYYQELQRDISEMFLQIYKQGGFLGLSNIKFRPGSVVVQLTLAFREGTINVHDVETQFNQYKTEAASRYNLTISDVSVSDVPFPFSAQSGAGVPGWGIALLVLVCVLVALAIVYLIALAVCQCRRKNYGQLDIFPARDTYHPMSEYPTYHTHGRYVPPSSTDRSPYEKVSAGNGGSSLSYTNPAVAATSANL

SEQ ID NO: 6685 - protein, 1264 aa, Homo sapiens
MTPGTQSPFFLLLLLTVLTATTAPKPATVVTGSGHASSTPGGEKETSATQRSSVPSSTEKNAVSMTSSVLSSHSPGSGSSTTQGQDVTLAPATEPASGSAATWGQDVTSVPVTRPALGSTTPPAHDVTSAPDNKPAPGSTAPPAHGVTSAPDTRPAPGSTAPPAHGVTSAPDTRPAPGSTAPPAHGVTSAPDTRPAPGSTAPPAHGVTSAPDTRPAPGSTAPPAHGVTSAPDTRPAPGSTAPPAHGVTSAPDTRPAPGSTAPPAHGVTSAPDTRPAPGSTAPPAHGVTSAPDTRPAPGSTAPPAHGVTSAPDTRPAPGSTAPPAHGVTSAPDTRPAPGSTAPPAHGVTSAPDTRPAPGSTAPPAHGVTSAPDTRPAPGSTAPPAHGVTSAPDTRPAPGSTAPPAHGVTSAPDTRPAPGSTAPPAHGVTSAPDTRPAPGSTAPPAHGVTSAPDTRPAPGSTAPPAHGVTSAPDTRPAPGSTAPPAHGVTSAPDTRPAPGSTAPPAHGVTSAPDTRPAPGSTAPPAHGVTSAPDTRPAPGSTAPPAHGVTSAPDTRPAPGSTAPPAHGVTSAPDTRPAPGSTAPPAHGVTSAPDTRPAPGSTAPPAHGVTSAPDTRPAPGSTAPPAHGVTSAPDTRPAPGSTAPPAHGVTSAPDTRPAPGSTAPPAHGVTSAPDTRPAPGSTAPPAHGVTSAPDTRPAPGSTAPPAHGVTSAPDTRPAPGSTAPPAHGVTSAPDTRPAPGSTAPPAHGVTSAPDTRPAPGSTAPPAHGVTSAPDTRPAPGSTAPPAHGVTSAPDTRPAPGSTAPPAHGVTSAPDTRPAPGSTAPPAHGVTSAPDTRPAPGSTAPPAHGVTSAPDTRPAPGSTAPPAHGVTSAPDTRPAPGSTAPPAHGVTSAPDTRPAPGSTAPPAHGVTSAPDTRPAPGSTAPPAHGVTSAPDTRPAPGSTAPPAHGVTSAPDNRPALGSTAPPVHNVTSASGSASGSASTLVHNGTSARATTTPASKSTPFSIPSHHSDTPTTLASHSTKTDASSTHHSSVPPLTSSNHSTSPQLSTGVSFFFLSFHISNLQFNSSLEDPSTDYYQELQRDISEMFLQIYKQGGFLGLSNIKFRPGSVVVQLTLAFREGTINVHDVETQFNQYKTEAASRYNLTISDVSVSDVPFPFSAQSGAGVPGWGIALLVLVCVLVALAIVYLIALAVCQCRRKNYGQLDIFPARDTYHPMSEYPTYHTHGRYVPPSSTDRSPYEKVSAGNGGSSLSYTNPAVAATSANL

SEQ ID NO: 6686 - protein, 1252 aa, Homo sapiens
MTPGTQSPFFLLLLLTVLTGSGHASSTPGGEKETSATQRSSVPSSTEKNAVSMTSSVLSSHSPGSGSSTTQGQDVTLAPATEPASGSAATWGQDVTSVPVTRPALGSTTPPAHDVTSAPDNKPAPGSTAPPAHGVTSAPDTRPAPGSTAPPAHGVTSAPDTRPAPGSTAPPAHGVTSAPDTRPAPGSTAPPAHGVTSAPDTRPAPGSTAPPAHGVTSAPDTRPAPGSTAPPAHGVTSAPDTRPAPGSTAPPAHGVTSAPDTRPAPGSTAPPAHGVTSAPDTRPAPGSTAPPAHGVTSAPDTRPAPGSTAPPAHGVTSAPDTRPAPGSTAPPAHGVTSAPDTRPAPGSTAPPAHGVTSAPDTRPAPGSTAPPAHGVTSAPDTRPAPGSTAPPAHGVTSAPDTRPAPGSTAPPAHGVTSAPDTRPAPGSTAPPAHGVTSAPDTRPAPGSTAPPAHGVTSAPDTRPAPGSTAPPAHGVTSAPDTRPAPGSTAPPAHGVTSAPDTRPAPGSTAPPAHGVTSAPDTRPAPGSTAPPAHGVTSAPDTRPAPGSTAPPAHGVTSAPDTRPAPGSTAPPAHGVTSAPDTRPAPGSTAPPAHGVTSAPDTRPAPGSTAPPAHGVTSAPDTRPAPGSTAPPAHGVTSAPDTRPAPGSTAPPAHGVTSAPDTRPAPGSTAPPAHGVTSAPDTRPAPGSTAPPAHGVTSAPDTRPAPGSTAPPAHGVTSAPDTRPAPGSTAPPAHGVTSAPDTRPAPGSTAPPAHGVTSAPDTRPAPGSTAPPAHGVTSAPDTRPAPGSTAPPAHGVTSAPDTRPAPGSTAPPAHGVTSAPDTRPAPGSTAPPAHGVTSAPDTRPAPGSTAPPAHGVTSAPDTRPAPGSTAPPAHGVTSAPDTRPAPGSTAPPAHGVTSAPDTRPAPGSTAPPAHGVTSAPDTRPAPGSTAPPAHGVTSAPDNRPALGSTAPPVHNVTSASGSASGSASTLVHNGTSARATTTPASKSTPFSIPSHHSDTPTTLASHSTKTDASSTHHSSVPPLTSSNHSTSPQLSTGVSFFFLSFHISNLQFNSSLEDPSTDYYQELQRDISEMFLQIYKQGGFLGLSNIKFRPGSVVVQLTLAFREGTINVHDVETQFNQYKTEAASRYNLTISDVSVSDVPFPFSAQSGAGVPGWGIALLVLVCVLVALAIVYLIALAVCQCRRKNYGQLDIFPARDTYHPMSEYPTYHTHGRYVPPSSTDRSPYEKVSAGNGGSSLSYTNPAVAATSANL

SEQ ID NO: 6687 - protein, 1243 aa, Homo sapiens
MTPGTQSPFFLLLLLTVLTGGEKETSATQRSSVPSSTEKNAVSMTSSVLSSHSPGSGSSTTQGQDVTLAPATEPASGSAATWGQDVTSVPVTRPALGSTTPPAHDVTSAPDNKPAPGSTAPPAHGVTSAPDTRPAPGSTAPPAHGVTSAPDTRPAPGSTAPPAHGVTSAPDTRPAPGSTAPPAHGVTSAPDTRPAPGSTAPPAHGVTSAPDTRPAPGSTAPPAHGVTSAPDTRPAPGSTAPPAHGVTSAPDTRPAPGSTAPPAHGVTSAPDTRPAPGSTAPPAHGVTSAPDTRPAPGSTAPPAHGVTSAPDTRPAPGSTAPPAHGVTSAPDTRPAPGSTAPPAHGVTSAPDTRPAPGSTAPPAHGVTSAPDTRPAPGSTAPPAHGVTSAPDTRPAPGSTAPPAHGVTSAPDTRPAPGSTAPPAHGVTSAPDTRPAPGSTAPPAHGVTSAPDTRPAPGSTAPPAHGVTSAPDTRPAPGSTAPPAHGVTSAPDTRPAPGSTAPPAHGVTSAPDTRPAPGSTAPPAHGVTSAPDTRPAPGSTAPPAHGVTSAPDTRPAPGSTAPPAHGVTSAPDTRPAPGSTAPPAHGVTSAPDTRPAPGSTAPPAHGVTSAPDTRPAPGSTAPPAHGVTSAPDTRPAPGSTAPPAHGVTSAPDTRPAPGSTAPPAHGVTSAPDTRPAPGSTAPPAHGVTSAPDTRPAPGSTAPPAHGVTSAPDTRPAPGSTAPPAHGVTSAPDTRPAPGSTAPPAHGVTSAPDTRPAPGSTAPPAHGVTSAPDTRPAPGSTAPPAHGVTSAPDTRPAPGSTAPPAHGVTSAPDTRPAPGSTAPPAHGVTSAPDTRPAPGSTAPPAHGVTSAPDTRPAPGSTAPPAHGVTSAPDTRPAPGSTAPPAHGVTSAPDTRPAPGSTAPPAHGVTSAPDTRPAPGSTAPPAHGVTSAPDNRPALGSTAPPVHNVTSASGSASGSASTLVHNGTSARATTTPASKSTPFSIPSHHSDTPTTLASHSTKTDASSTHHSSVPPLTSSNHSTSPQLSTGVSFFFLSFHISNLQFNSSLEDPSTDYYQELQRDISEMFLQIYKQGGFLGLSNIKFRPGSVVVQLTLAFREGTINVHDVETQFNQYKTEAASRYNLTISDVSVSDVPFPFSAQSGAGVPGWGIALLVLVCVLVALAIVYLIALAVCQCRRKNYGQLDIFPARDTYHPMSEYPTYHTHGRYVPPSSTDRSPYEKVSAGNGGSSLSYTNPAVAATSANL

SEQ ID NO: 6688 - protein, 1087 aa, Homo sapiens
MTPGTQSPFFLLLLLTVLTVVTGSGHASSTPGGEKETSATQRSSVPSSTEKNAVSMTSSVLSSHSPGSGSSTTQGQDVTLAPATEPASGSAATWGQDVTSVPVTRPALGSTTPPAHDVTSAPDNKPAPGSTAPPAHGVTSAPDTRPAPGSTAPPAHGVTSAPDTRPAPGSTAPPAHGVTSAPDTRPAPGSTAPPAHGVTSAPDTRPAPGSTAPPAHGVTSAPDTRPAPGSTAPPAHGVTSAPDTRPAPGSTAPPAHGVTSAPDTRPAPGSTAPPAHGVTSAPDTRPAPGSTAPPAHGVTSAPDTRPAPGSTAPPAHGVTSAPDTRPAPGSTAPPAHGVTSAPDTRPAPGSTAPPAHGVTSAPDTRPAPGSTAPPAHGVTSAPDTRPAPGSTAPPAHGVTSAPDTRPAPGSTAPPAHGVTSAPDTRPAPGSTAPPAHGVTSAPDTRPAPGSTAPPAHGVTSAPDTRPAPGSTAPPAHGVTSAPDTRPAPGSTAPPAHGVTSAPDTRPAPGSTAPPAHGVTSAPDTRPAPGSTAPPAHGVTSAPDTRPAPGSTAPPAHGVTSAPDTRPAPGSTAPPAHGVTSAPDTRPAPGSTAPPAHGVTSAPDTRPAPGSTAPPAHGVTSAPDTRPAPGSTAPPAHGVTSAPDTRPAPGSTAPPAHGVTSAPDTRPAPGSTAPPAHGVTSAPDTRPAPGSTAPPAHGVTSAPDTRPAPGSTAPPAHGVTSAPDTRPAPGSTAPPAHGVTSAPDTRPAPGSTAPPAHGVTSAPDTRPAPGSTAPPAHGVTSAPDTRPAPGSTAPPAHGVTSAPDTRPAPGSTAPPAHGVTSAPDTRPAPGSTAPPAHGVTSAPDTRPAPGSTAPPAHGVTSAPDTRPAPGSTAPPAHGVTSAPDTRPAPGSTAPPAHGVTSAPDTRPAPGSTAPPAHGVTSAPDTRPAPGSTAPPAHGVTSAPDNRPALGSTAPPVHNVTSASGSASGSASTLVHNGTSARATTTPASKSTPFSIPSHHSDTPTTLASHSTKTDASSTHHSSVPPLTSSNHSTSPQLSTGVSFFFLSFHISNLQFNSSLEDPSTDYYQELQRDISEMVSIGLSFPMLP

SEQ ID NO: 6689 - protein, 230 aa, Homo sapiens
MTPGTQSPFFLLLLLTVLTVVTGSGHASSTPGGEKETSATQRSSVPSSTEKNAIPAPTTTKSCRETFLKWPGSVVVQLTLAFREGTINVHDVETQFNQYKTEAASRYNLTISDVSVSDVPFPFSAQSGAGVPGWGIALLVLVCVLVALAIVYLIALAVCQCRRKNYGQLDIFPARDTYHPMSEYPTYHTHGRYVPPSSTDRSPYEKVSAGNGGSSLSYTNPAVAATSANL

SEQ ID NO: 6690 - protein, 255 aa, Homo sapiens
MTPGTQSPFFLLLLLTVLTVVTGSGHASSTPGGEKETSATQRSSVPSSTEKNAFNSSLEDPSTDYYQELQRDISEMFLQIYKQGGFLGLSNIKFRPGSVVVQLTLAFREGTINVHDVETQFNQYKTEAASRYNLTISDVSVSDVPFPFSAQSGAGVPGWGIALLVLVCVLVALAIVYLIALAVCQCRRKNYGQLDIFPARDTYHPMSEYPTYHTHGRYVPPSSTDRSPYEKVSAGNGGSSLSYTNPAVAATSANL

SEQ ID NO: 6691 - protein, 273 aa, Homo sapiens
MTPGTQSPFFLLLLLTVLTVVTGSGHASSTPGGEKETSATQRSSVPSSTEKNALSTGVSFFFLSFHISNLQFNSSLEDPSTDYYQELQRDISEMFLQIYKQGGFLGLSNIKFRPGSVVVQLTLAFREGTINVHDVETQFNQYKTEAASRYNLTISDVSVSDVPFPFSAQSGAGVPGWGIALLVLVCVLVALAIVYLIALAVCQCRRKNYGQLDIFPARDTYHPMSEYPTYHTHGRYVPPSSTDRSPYEKVSAGNGGSSLSYTNPAVAATSANL

SEQ ID NO: 6692 - protein, 168 aa, Homo sapiens
MTPGTQSPFFLLLLLTVLTVVTGSGHASSTPGGEKETSATQRSSVPSSTEKNALSTGVSFFFLSFHISNLQFNSSLEDPSTDYYQELQRDISEMAVCQCRRKNYGQLDIFPARDTYHPMSEYPTYHTHGRYVPPSSTDRSPYEKVSAGNGGSSLSYTNPAVAATSANL

SEQ ID NO: 6693 - protein, 203 aa, Homo sapiens
MTPGTQSPFFLLLLLTVLTVVTGSGHASSTPGGEKETSATQRSSVPSSTEKNAIPAPTTTKSCRETFLKCFCRFINKGVFWASPILSSVSDVPFPFSAQSGAGVPGWGIALLVLVCVLVALAIVYLIALAVCQCRRKNYGQLDIFPARDTYHPMSEYPTYHTHGRYVPPSSTDRSPYEKVSAGNGGSSLSYTNPAVAATSANL

SEQ ID NO: 6694 - protein, 264 aa, Homo sapiens
MTPGTQSPFFLLLLLTVLTATTAPKPATVVTGSGHASSTPGGEKETSATQRSSVPSSTEKNAFNSSLEDPSTDYYQELQRDISEMFLQIYKQGGFLGLSNIKFRPGSVVVQLTLAFREGTINVHDVETQFNQYKTEAASRYNLTISDVSVSDVPFPFSAQSGAGVPGWGIALLVLVCVLVALAIVYLIALAVCQCRRKNYGQLDIFPARDTYHPMSEYPTYHTHGRYVPPSSTDRSPYEKVSAGNGGSSLSYTNPAVAATSANL

SEQ ID NO: 6695 - protein, 159 aa, Homo sapiens
MTPGTQSPFFLLLLLTVLTATTAPKPATVVTGSGHASSTPGGEKETSATQRSSVPSSTEKNAFNSSLEDPSTDYYQELQRDISEMAVCQCRRKNYGQLDIFPARDTYHPMSEYPTYHTHGRYVPPSSTDRSPYEKVSAGNGGSSLSYTNPAVAATSANL

SEQ ID NO: 6696 - protein, 198 aa, Homo sapiens
MTPGTQSPFFLLLLLTVLTVVTGSGHASSTPGGEKETSATQRSSVPSSTEKNALSTGVSFFFLSFHISNLQFNSSLEDPSTDYYQELQRDISEMFLQIYKQGGFLGLSNIKFRPGSVVVQLTLAFREGTINVHDVETQFNQYKTEAASRYNLTISDVSGCLSVPPKELRAAGHLSSPGYLPSYERVPHLPHPWALCAP

SEQ ID NO: 6697 - protein, 96 aa, Homo sapiens
MTPGTQSPFFLLLLLTVLTVVTGSGHASSTPGGEKETSATQRSSVPSSTEKNAIPAPTTTKSCRETFLKCFCRFINKGVFWASPILSSGQDLWWYN

SEQ ID NO: 6698 - protein, 224 aa, Homo sapiens
MTPGTQSPFFLLLLLTVLTATTAPKPATVVTGSGHASSTPGGEKETSATQRSSVPSSTEKNAFRPGSVVVQLTLAFREGTINVHDVETQFNQYKTEAASRYNLTISDVSVSDVPFPFSAQSGAGVPGWGIALLVLVCVLVALAIVYLIALAVCQCRRKNYGQLDIFPARDTYHPMSEYPTYHTHGRYVPPSSTDRSPYEKVSAGNGGSSLSYTNPAVAATSANL

SEQ ID NO: 6699 - protein, 166 aa, Homo sapiens
MTPGTQSPFFLLLLLTVLTATTAPKPATVVTGSGHASSTPGGEKETSATQRSSVPSSTEKNASGAGVPGWGIALLVLVCVLVALAIVYLIALAVCQCRRKNYGQLDIFPARDTYHPMSEYPTYHTHGRYVPPSSTDRSPYEKVSAGNGGSSLSYTNPAVAATSANL

SEQ ID NO: 6700 - protein, 259 aa, Homo sapiens
MTPGTQSPFFLLLLLTVLTATTAPKPATVVTGSGHASSTPGGEKETSATQRSSVPSSTEKNAFNSSLEDPSTDYYQELQRDISEMFLQIYKQGGFLGLSNIKFRPGSVVVQLTLAFREGTINVHDVETQFNQYKTEAASRYNLTISDVSVSDVPFPFSAQSGAGVPGWGIALLVLVCVLVALAIVYLIALAVCQCRRKNYGQLDIFPARDTYHPMSEYPTYHTHGRYVPPSSTDRSPYEKRQNGWSTMPRGALPEESQG

SEQ ID NO: 6701 - protein, 5179 aa, Homo sapiens
MGLPLARLAAVCLALSLAGGSELQTEGRTRYHGRNVCSTWGNFHYKTFDGDVFRFPGLCDYNFASDCRGSYKEFAVHLKRGPGQAEAPAGVESILLTIKDDTIYLTRHLAVLNGAVVSTPHYSPGLLIEKSDAYTKVYSRAGLTLMWNREDALMLELDTKFRNHTCGLCGDYNGLQSYSEFLSDGVLFSPLEFGNMQKINQPDVVCEDPEEEVAPASCSEHRAECERLLTAEAFADCQDLVPLEPYLRACQQDRCRCPGGDTCVCSTVAEFSRQCSHAGGRPGNWRTATLCPKTCPGNLVYLESGSPCMDTCSHLEVSSLCEEHRMDGCFCPEGTVYDDIGDSGCVPVSQCHCRLHGHLYTPGQEITNDCEQCVCNAGRWVCKDLPCPGTCALEGGSHITTFDGKTYTFHGDCYYVLAKGDHNDSYALLGELAPCGSTDKQTCLKTVVLLADKKKNAVVFKSDGSVLLNQLQVNLPHVTASFSVFRPSSYHIMVSMAIGVRLQVQLAPVMQLFVTLDQASQGQVQGLCGNFNGLEGDDFKTASGLVEATGAGFANTWKAQSTCHDKLDWLDDPCSLNIESANYAEHWCSLLKKTETPFGRCHSAVDPAEYYKRCKYDTCNCQNNEDCLCAALSSYARACTAKGVMLWGWREHVCNKDVGSCPNSQVFLYNLTTCQQTCRSLSEADSHCLEGFAPVDGCGCPDHTFLDEKGRCVPLAKCSCYHRGLYLEAGDVVVRQEERCVCRDGRLHCRQIRLIGQSCTAPKIHMDCSNLTALATSKPRALSCQTLAAGYYHTECVSGCVCPDGLMDDGRGGCVVEKECPCVHNNDLYSSGAKIKVDCNTCTCKRGRWVCTQAVCHGTCSIYGSGHYITFDGKYYDFDGHCSYVAVQDYCGQNSSLGSFSIITENVPCGTTGVTCSKAIKIFMGRTELKLEDKHRVVIQRDEGHHVAYTTREVGQYLVVESSTGIIVIWDKRTTVFIKLAPSYKGTVCGLCGNFDHRSNNDFTTRDHMVVSSELDFGNSWKEAPTCPDVSTNPEPCSLNPHRRSWAEKQCSILKSSVFSICHSKVDPKPFYEACVHDSCSCDTGGDCECFCSAVASYAQECTKEGACVFWRTPDLCPIFCDYYNPPHECEWHYEPCGNRSFETCRTINGIHSNISVSYLEGCYPRCPKDRPIYEEDLKKCVTADKCGCYVEDTHYPPGASVPTEETCKSCVCTNSSQVVCRPEEGKILNQTQDGAFCYWEICGPNGTVEKHFNICSITTRPSTLTTFTTITLPTTPTSFTTTTTTTTPTSSTVLSTTPKLCCLWSDWINEDHPSSGSDDGDREPFDGVCGAPEDIECRSVKDPHLSLEQHGQKVQCDVSVGFICKNEDQFGNGPFGLCYDYKIRVNCCWPMDKCITTPSPPTTTPSPPPTTTTTLPPTTTPSPPTTTTTTPPPTTTPSPPITTTTTPLPTTTPSPPISTTTTPPPTTTPSPPTTTPSPPTTTPSPPTTTTTTPPPTTTPSPPMTTPITPPASTTTLPPTTTPSPPTTTTTTPPPTTTPSPPTTTPITPPTSTTTLPPTTTPSPPPTTTTTPPPTTTPSPPTTTTPSPPTITTTTPPPTTTPSPPTTTTTTPPPTTTPSPPTTTPITPPTSTTTLPPTTTPSPPPTTTTTPPPTTTPSPPTTTTPSPPITTTTTPPPTTTPSSPITTTPSPPTTTMTTPSPTTTPSSPITTTTTPSSTTTPSPPPTTMTTPSPTTTPSPPTTTMTTLPPTTTSSPLTTTPLPPSITPPTFSPFSTTTPTTPCVPLCNWTGWLDSGKPNFHKPGGDTELIGDVCGPGWAANISCRATMYPDVPIGQLGQTVVCDVSVGLICKNEDQKPGGVIPMAFCLNYEINVQCCECVTQPTTMTTTTTENPTPPTTTPITTTTTVTPTPTPTGTQTPTTTPITTTTTVTPTPTPTGTQTPTTTPITTTTTVTPTPTPTGTQTPTTTPITTTTTVTPTPTPTGTQTPTTTPITTTTTVTPTPTPTGTQTPTTTPITTTTTVTPTPTPTGTQTPTTTPITTTTTVTPTPTPTGTQTPTTTPITTTTTVTPTPTPTGTQTPTTTPITTTTTVTPTPTPTGTQTPTTTPITTTTTVTPTPTPTGTQTPTTTPITTTTTVTPTPTPTGTQTPTTTPITTTTTVTPTPTPTGTQTPTTTPITTTTTVTPTPTPTGTQTPTTTPITTTTTVTPTPTPTGTQTPTTTPITTTTTVTPTPTPTGTQTPTTTPITTTTTVTPTPTPTGTQTPTTTPITTTTTVTPTPTPTGTQTPTTTPITTTTTVTPTPTPTGTQTPTTTPITTTTTVTPTPTPTGTQTPTTTPITTTTTVTPTPTPTGTQTPTTTPITTTTTVTPTPTPTGTQTPTTTPITTTTTVTPTPTPTGTQTPTTTPITTTTTVTPTPTPTGTQTPTTTPITTTTTVTPTPTPTGTQTPTTTPITTTTTVTPTPTPTGTQTPTTTPITTTTTVTPTPTPTGTQTPTTTPITTTTTVTPTPTPTGTQTPTTTPITTTTTVTPTPTPTGTQTPTTTPITTTTTVTPTPTPTGTQTPTTTPITTTTTVTPTPTPTGTQTPTTTPITTTTTVTPTPTPTGTQTPTTTPITTTTTVTPTPTPTGTQTPTTTPITTTTTVTPTPTPTGTQTPTTTPITTTTTVTPTPTPTGTQTPTTTPITTTTTVTPTPTPTGTQTPTTTPITTTTTVTPTPTPTGTQTPTTTPITTTTTVTPTPTPTGTQTPTTTPITTTTTVTPTPTPTGTQTPTTTPITTTTTVTPTPTPTGTQTPTTTPITTTTTVTPTPTPTGTQTPTTTPITTTTTVTPTPTPTGTQTPTTTPITTTTTVTPTPTPTGTQTPTTTPITTTTTVTPTPTPTGTQTPTTTPITTTTTVTPTPTPTGTQTPTTTPITTTTTVTPTPTPTGTQTPTTTPITTTTTVTPTPTPTGTQTPTTTPITTTTTVTPTPTPTGTQTPTTTPITTTTTVTPTPTPTGTQTPTTTPITTTTTVTPTPTPTGTQTPTTTPITTTTTVTPTPTPTGTQTPTTTPITTTTTVTPTPTPTGTQTPTTTPITTTTTVTPTPTPTGTQTPTTTPITTTTTVTPTPTPTGTQTPTTTPITTTTTVTPTPTPTGTQTPTTTPITTTTTVTPTPTPTGTQTPTTTPITTTTTVTPTPTPTGTQTPTTTPITTTTTVTPTPTPTGTQTPTTTPITTTTTVTPTPTPTGTQTPTTTPITTTTTVTPTPTPTGTQTPTTTPITTTTTVTPTPTPTGTQTPTTTPITTTTTVTPTPTPTGTQTPTTTPITTTTTVTPTPTPTGTQTPTTTPITTTTTVTPTPTPTGTQTPTTTPITTTTTVTPTPTPTGTQTPTTTPITTTTTVTPTPTPTGTQTPTTTPITTTTTVTPTPTPTGTQTPTTTPITTTTTVTPTPTPTGTQTPTTTPITTTTTVTPTPTPTGTQTPTTTPITTTTTVTPTPTPTGTQTPTTTPITTTTTVTPTPTPTGTQTPTTTPITTTTTVTPTPTPTGTQTPTTTPITTTTTVTPTPTPTGTQTPTTTPITTTTTVTPTPTPTGTQTPTTTPITTTTTVTPTPTPTGTQTPTTTPITTTTTVTPTPTPTGTQTPTTTPITTTTTVTPTPTPTGTQTPTTTPITTTTTVTPTPTPTGTQTPTTTPITTTTTVTPTPTPTGTQTPTTTPITTTTTVTPTPTPTGTQTPTTTPITTTTTVTPTPTPTGTQTPTTTPITTTTTVTPTPTPTGTQTPTTTPITTTTTVTPTPTPTGTQTPTTTPITTTTTVTPTPTPTGTQTPTTTPITTTTTVTPTPTPTGTQTPTTTPITTTTTVTPTPTPTGTQTPTTTPITTTTTVTPTPTPTGTQTPTTTPITTTTTVTPTPTPTGTQTPTTTPITTTTTVTPTPTPTGTQTPTTTPITTTTTVTPTPTPTGTQTPTTTPITTTTTVTPTPTPTGTQTPTTTPITTTTTVTPTPTPTGTQTPTTTPITTTTTVTPTPTPTGTQTPTTTPITTTTTVTPTPTPTGTQTPTTTPITTTTTVTPTPTPTGTQTPTTTPITTTTTVTPTPTPTGTQTPTTTPITTTTTVTPTPTPTGTQTPTTTPITTTTTVTPTPTPTGTQTPTTTPITTTTTVTPTPTPTGTQTPTTTPITTTTTVTPTPTPTGTQTPTTTPITTTTTVTPTPTPTGTQTGPPTHTSTAPIAELTTSNPPPESSTPQTSRSTSSPLTESTTLLSTLPPAIEMTSTAPPSTPTAPTTTSGGHTLSPPPSTTTSPPGTPTRGTTTGSSSAPTPSTVQTTTTSAWTPTPTPLSTPSIIRTTGLRPYPSSVLICCVLNDTYYAPGEEVYNGTYGDTCYFVNCSLSCTLEFYNWSCPSTPSPTPTPSKSTPTPSKPSSTPSKPTPGTKPPECPDFDPPRQENETWWLCDCFMATCKYNNTVEIVKVECEPPPMPTCSNGLQPVRVEDPDGCCWHWECDCYCTGWGDPHYVTFDGLYYSYQGNCTYVLVEEISPSVDNFGVYIDNYHCDPNDKVSCPRTLIVRHETQEVLIKTVHMMPMQVQVQVNRQAVALPYKKYGLEVYQSGINYVVDIPELGVLVSYNGLSFSVRLPYHRFGNNTKGQCGTCTNTTSDDCILPSGEIVSNCEAAADQWLVNDPSKPHCPHSSSTTKRPAVTVPGGGKTTPHKDCTPSPLCQLIKDSLFAQCHALVPPQHYYDACVFDSCFMPGSSLECASLQAYAALCAQQNICLDWRNHTHGACLVECPSHREYQACGPAEEPTCKSSSSQQNNTVLVEGCFCPEGTMNYAPGFDVCVKTCGCVGPDNVPREFGEHFEFDCKNCVCLEGGSGIICQPKRCSQKPVTHCVEDGTYLATEVNPADTCCNITVCKCNTSLCKEKPSVCPLGFEVKSKMVPGRCCPFYWCESKGVCVHGNAEYQPGSPVYSSKCQDCVCTDKVDNNTLLNVIACTHVPCNTSCSPGFELMEAPGECCKKCEQTHCIIKRPDNQHVILKPGDFKSDPKNNCTFFSCVKIHNQLISSVSNITCPNFDASICIPGSITFMPNGCCKTCTPRNETRVPCSTVPVTTEVSYAGCTKTVLMNHCSGSCGTFVMYSAKAQALDHSCSCCKEEKTSQREVVLSCPNGGSLTHTYTHIESCQCQDTVCGLPTGTSRRARRSPRHLGSG

SEQ ID NO: 6702 - protein, 229 aa, Homo sapiens
MNIRNAQPDDLMNMQHCNLLCLPENYQMKYYLYHGLSWPQLSYIAEDEDGKIVGYVLAKMEEEPDDVPHGHITSLAVKRSHRRLGLAQKLMDQASRAMIENFNAKYVSLHVRKSNRPALHLYSNTLNFQISEVEPKYYADGEDAYAMKRDLSQMADELRRQMDLKKGGYVVLGSRENQETQGSTLSDSEEACQQKNPATEESGSDSKEPKESVESTNVQDSSESSDSTS

SEQ ID NO: 6703 - protein, 369 aa, Homo sapiens
MTLEAIRYSRGSLQILDQLLLPKQSRYEAVGSVHQAWEAIRAMKVRGAPAIALVGCLSLAVELQAGAGGPGLAALVAFVRDKLSFLVTARPTAVNMARAARDLADVAAREAEREGATEEAVRERVICCTEDMLEKDLRDNRSIGDLGARHLLERVAPSGGKVTVLTHCNTGALATAGYGTALGVIRSLHSLGRLEHAFCTETRPYNQGARLTAFELVYEQIPATLITDSMVAAAMAHRGVSAVVVGADRVVANGDTANKVGTYQLAIVAKHHGIPFYVAAPSSSCDLRLETGKEIIIEERPGQELTDVNGVRIAAPGIGVWNPAFDVTPHDLITGGIITELGVFAPEELRTALTTTISSRDGTLDGPQM

SEQ ID NO: 6704 - protein, 322 aa, Homo sapiens
MTLEAIRYSRGSLQILDQLLLPKQSRYEAVGSVHQAWEAIRAMKVRGAPAIALVGCLSLAVELQAGAGGPGLAALVAFVRDKLSFLVTARPTAVNMARAARDLADVAAREAEREGATEEAVRERRETELCEHWEEHTRQRELPLRGPLGGTVLETRPYNQGARLTAFELVYEQIPATLITDSMVAAAMAHRGVSAVVVGADRVVANGDTANKVGTYQLAIVAKHHGIPFYVAAPSSSCDLRLETGKEIIIEERPGQELTDVNGVRIAAPGIGVWNPAFDVTPHDLITGGIITELGVFAPEELRTALTTTISSRDGTLDGPQM

SEQ ID NO: 6705 - protein, 837 aa, Homo sapiens
MSLLLSFYLLGLLVSSGQALLQVTISLSKVELSVGESKFFTCTAIGEPESIDWYNPQGEKIISTQRVVVQKEGVRSRLTIYNANIEDAGIYRCQATDAKGQTQEATVVLEIYQKLTFREVVSPQEFKQGEDAEVVCRVSSSPAPAVSWLYHNEEVTTISDNRFAMLANNNLQILNINKSDEGIYRCEGRVEARGEIDFRDIIVIVNVPPAISMPQKSFNATAERGEEMTFSCRASGSPEPAISWFRNGKLIEENEKYILKGSNTELTVRNIINSDGGPYVCRATNKAGEDEKQAFLQVFVQPHIIQLKNETTYENGQVTLVCDAEGEPIPEITWKRAVDGFTFTEGDKSLDGRIEVKGQHGSSSLHIKDVKLSDSGRYDCEAASRIGGHQKSMYLDIEYAPKFISNQTIYYSWEGNPINISCDVKSNPPASIHWRRDKLVLPAKNTTNLKTYSTGRKMILEIAPTSDNDFGRYNCTATNHIGTRFQEYILALADVPSSPYGVKIIELSQTTAKVSFNKPDSHGGVPIHHYQVDVKEVASEIWKIVRSHGVQTMVVLNNLEPNTTYEIRVAAVNGKGQGDYSKIEIFQTLPVREPSPPSIHGQPSSGKSFKLSITKQDDGGAPILEYIVKYRSKDKEDQWLEKKVQGNKDHIILEHLQWTMGYEVQITAANRLGYSEPTVYEFSMPPKPNIIKDTLFNGLGLGAVIGLGVAALLLILVVTDVSCFFIRQCGLLMCITRRMCGKKSGSSGKSKELEEGKAAYLKDGSKEPIVEMRTEDERVTNHEDGSPVNEPNETTPLTEPEKLPLKEEDGKEALNPETIEIKVSNDIIQSKEDDSKA

SEQ ID NO: 6706 - protein, 424 aa, Homo sapiens
MVRSDSGGQVYLDYHNRQGLFVDWKYNEALYLEEGQPETYYRTALLQVTISLSKVELSVGESKFFTCTAIGEPESIDWYNPQGEKIISTQRVVVQKEGVRSRLTIYNANIEDAGIYRCQATDAKGQTQEATVVLEIYQKLTFREVVSPQEFKQGEDAEVVCRVSSSPAPAVSWLYHNEEVTTISDNRFAMLANNNLQILNINKSDEGIYRCEGRVEARGEIDFRDIIVIVNVPPAISMPQKSFNATAERGEEMTFSCRASGSPEPAISWFRNGKLIEENEKYILKGSNTELTVRNIINSDGGPYVCRATNKAGEDEKQAFLQVFVQPHIIQLKNETTYENGQVTLVCDAEGEPIPEITWKRAVDGFTFTEGDKSLDGRIEVKGQHGSSSLHIKDVKLSDSGRYDCEAASRIGGHQKSMYLDIES

SEQ ID NO: 6707 - protein, 972 aa, Homo sapiens
MATRGHVQDPNDRRLRPIYDYLDNGNNKMAIQQADKLLKKHKDLHCAKVLKAIGLQRTGKQEEAFTLAQEVAALEPTDDNSLQALTILYREMHRPELVTKLYEAAVKKVPNSEEYHSHLFMAYARVGEYKKMQQAGMALYKIVPKNPYYFWSVMSLIMQSISAQDENLSKTMFLPLAERMVEKMVKEDKIEAEAEVELYYMILERLGKYQEALDVIRGKLGEKLTSEIQSRENKCMAMYKKLSRWPECNALSRRLLLKNSDDWQFYLTYFDSVFRLIEEAWSPPAEGEHSLEGEVHYSAEKAVKFIEDRITEESKSSRHLRGPHLAKLELIRRLRSQGCNDEYKLGDPEELMFQYFKKFGDKPCCFTDLKVFVDLLPATQCTKFINQLLGVVPLSTPTEDKLALPADIRALQQHLCVVQLTRLLGLYHTMDKNQKLSVVRELMLRYQHGLEFGKTCLKTELQFSDYYCLLAVHALIDVWRETGDETTVWQALTLLEEGLTHSPSNAQFKLLLVRIYCMLGAFEPVVDLYSSLDAKHIQHDTIGYLLTRYAESLGQYAAASQSCNFALRFFHSNQKDTSEYIIQAYKYGAFEKIPEFIAFRNRLNNSLHFAQVRTERMLLDLLLEANISTSLAESIKSMNLRPEEDDIPWEDLRDNRDLNVFFSWDPKDRDVSEEHKKLSLEEETLWLRIRSLTLRLISGLPSLNHPVEPKNSEKTAENGVSSRIDILRLLLQQLEATLETGKRFIEKDIQYPFLGPVPTRMGGFFNSGCSQCQISSFYLVNDIYELDTSGLEDTMEIQERIENSFKSLLDQLKDVFSKCKGDLLEVKDGNLKTHPTLLENLVFFVETISVILWVSSYCESVLRPYKLNLQKKKKKKKETSIIMPPVFTSFQDYVTGLQTLISNVVDHIKGLETHLIALKLEELILEDTSLSPEERKFSKTVQGKVQSSYLHSLLEMGELLKKRLETTKKLKI

SEQ ID NO: 6708 - protein, 859 aa, Homo sapiens
MATRGHVQDPNDRRLRPIYDYLDNGNNKMAIQQADKLLKKHKDLHCAKVLKAIGLQRTGKQEEAFTLAQEVAALEPTDDNSLQALTILYREMHRPELVTKLYEAAVKKVPNSEEYHSHLFMAYARVGEYKKMQQAGMALYKIVPKNPYYFWSVMSLIMQSISAQDENLSKTMFLPLAERMVEKMVKEDKIEAEAEVELYYMILERLGKYQEALDVIRGKLGEKLTSEIQSRENKCMAMYKKLSRWPECNALSRRLLLKNSDDWQFYLTYFDSVFRLIEEAWSPPAEGEHSLEGEVHYSAEKAVKFIEDRITEESKSSRHLRGPHLAKLELIRRLRSQGCNDEYKLGDPEELMFQYFKKFGDKPCCFTDLKVFVDLLPATQCTKFINQLLGVVPLSTPTEDKLALPADIRALQQHLCVVQLTRLLGLYHTMDKNQKLSVVRELMLRYQHGLEFGKTCLKTELQFSDYYCLLAVHALIDVWRETGDETTVWQALTLLEEGLTHSPSNAQFKLLLVRIYCMLGAFEPVVDLYSSLDAKHIQHDTIGYLLTRYAESLGQYAAASQSCNFALRFFHSNQKDTSEYIIQAYKYGAFEKIPEFIAFRNRLNNSLHFAQVRTERMLLDLLLEANISTSLAESIKSMNLRPEEDDIPWEDLRDNRDLNVFFSWDPKDRDVSEEHKKLSLEEETLWLRIRSLTLRLISGLPSLNHPVEPKNSEKTAENGVSSRIDILRLLLQQLEATLETGKRFIEKDIQYPFLGPVPTRMGGFFNSGCSQCQISSFYLVNDIYELDTSGLEDTMEIQERIENSFKSLLDQLKDVFSKCKGDLLEVKDGNLKTHPTLLENLVFFVEVSFCSLPKRHCCS

SEQ ID NO: 6709 - protein, 82 aa, Homo sapiens
MASSSGAGAAAAAAAANLNAVRETMDVLLEISRILNTGLDMETLSICVRLCEQGINPEALSSVIKELRKATEALKAAENMTS

SEQ ID NO: 6710 - protein, 1939 aa, Homo sapiens
MSSDSEMAIFGEAAPFLRKSERERIEAQNKPFDAKTSVFVVDPKESFVKATVQSREGGKVTAKTEAGATVTVKDDQVFPMNPPKYDKIEDMAMMTHLHEPAVLYNLKERYAAWMIYTYSGLFCVTVNPYKWLPVYNAEVVTAYRGKKRQEAPPHIFSISDNAYQFMLTDRENQSILITGESGAGKTVNTKRVIQYFATIAVTGEKKKEEVTSGKMQGTLEDQIISANPLLEAFGNAKTVRNDNSSRFGKFIRIHFGTTGKLASADIETYLLEKSRVTFQLKAERSYHIFYQIMSNKKPDLIEMLLITTNPYDYAFVSQGEITVPSIDDQEELMATDSAIEILGFTSDERVSIYKLTGAVMHYGNMKFKQKQREEQAEPDGTEVADKAAYLQNLNSADLLKALCYPRVKVGNEYVTKGQTVQQVYNAVGALAKAVYDKMFLWMVTRINQQLDTKQPRQYFIGVLDIAGFEIFDFNSLEQLCINFTNEKLQQFFNHHMFVLEQEEYKKEGIEWTFIDFGMDLAACIELIEKPMGIFSILEEECMFPKATDTSFKNKLYEQHLGKSNNFQKPKPAKGKPEAHFSLIHYAGTVDYNIAGWLDKNKDPLNETVVGLYQKSAMKTLALLFVGATGAEAEAGGGKKGGKKKGSSFQTVSALFRENLNKLMTNLRSTHPHFVRCIIPNETKTPGAMEHELVLHQLRCNGVLEGIRICRKGFPSRILYADFKQRYKVLNASAIPEGQFIDSKKASEKLLGSIDIDHTQYKFGHTKVFFKAGLLGLLEEMRDEKLAQLITRTQAMCRGFLARVEYQKMVERRESIFCIQYNVRAFMNVKHWPWMKLYFKIKPLLKSAETEKEMANMKEEFEKTKEELAKTEAKRKELEEKMVTLMQEKNDLQLQVQAEADSLADAEERCDQLIKTKIQLEAKIKEVTERAEDEEEINAELTAKKRKLEDECSELKKDIDDLELTLAKVEKEKHATENKVKNLTEEMAGLDETIAKLTKEKKALQEAHQQTLDDLQAEEDKVNTLTKAKIKLEQQVDDLEGSLEQEKKIRMDLERAKRKLEGDLKLAQESTMDIENDKQQLDEKLKKKEFEMSGLQSKIEDEQALGMQLQKKIKELQARIEELEEEIEAERASRAKAEKQRSDLSRELEEISERLEEAGGATSAQIEMNKKREAEFQKMRRDLEEATLQHEATAATLRKKHADSVAELGEQIDNLQRVKQKLEKEKSEMKMEIDDLASNMETVSKAKGNLEKMCRALEDQLSEIKTKEEEQQRLINDLTAQRARLQTESGEYSRQLDEKDTLVSQLSRGKQAFTQQIEELKRQLEEEIKAKSALAHALQSSRHDCDLLREQYEEEQEAKAELQRAMSKANSEVAQWRTKYETDAIQRTEELEEAKKKLAQRLQDAEEHVEAVNAKCASLEKTKQRLQNEVEDLMIDVERTNAACAALDKKQRNFDKILAEWKQKCEETHAELEASQKESRSLSTELFKIKNAYEESLDQLETLKRENKNLQQEISDLTEQIAEGGKRIHELEKIKKQVEQEKSELQAALEEAEASLEHEEGKILRIQLELNQVKSEVDRKIAEKDEEIDQMKRNHIRIVESMQSTLDAEIRSRNDAIRLKKKMEGDLNEMEIQLNHANRMAAEALRNYRNTQAILKDTQLHLDDALRSQEDLKEQLAMVERRANLLQAEIEELRATLEQTERSRKIAEQELLDASERVQLLHTQNTSLINTKKKLETDISQIQGEMEDIIQEARNAEEKAKKAITDAAMMAEELKKEQDTSAHLERMKKNLEQTVKDLQHRLDEAEQLALKGGKKQIQKLEARVRELEGEVESEQKRNVEAVKGLRKHERKVKELTYQTEEDRKNILRLQDLVDKLQAKVKSYKRQAEEAEEQSNVNLSKFRRIQHELEEAEERADIAESQVNKLRVKSREVHTKIISEE

SEQ ID NO: 6711 - protein, 302 aa, Homo sapiens
MHCGPPDMVCETKIVAAEDHEALPGAKKDALLAAAGAMWPPLPAAPGPAAAPPAPPPAPVAQPHGGAGGAGPPGGRGVCIREFRAAEQEAARRIFYDGIMERIPNTAFRGLRQHPRAQLLYALLAALCFAVSRSLLLTCLVPAALLGLRYYYSRKVIRAYLECALHTDMADIEQYYMKPPGSCFWVAVLDGNVVGIVAARAHEEDNTVELLRMSVDSRFRGKGIAKALGRKVLEFAVVHNYSAVVLGTTAVKVAAHKLYESLGFRHMGASDHYVLPGMTLSLAERLFFQVRYHRYRLQLREE

SEQ ID NO: 6712 - protein, 158 aa, Homo sapiens
MNKQRGTYSEVSLAQDPKRQQRKLKGNKISISGTKQEIFQVELNLQNASSDHQGNDKTYHCKGLLPPPEKLTAEVLGIICIVLMATVLKTIVLIPCIGVLEQNNFSLNRRMQKARHCGHCPEEWITYSNSCYYIGKERRTWEERVCWPVLRRTLICFL

SEQ ID NO: 6713 - protein, 1746 aa, Homo sapiens
MSACNTFTEHVWKPGECKNCFKPKSLHQLPPDPEKAPITHGNVKTNANHSNNHRIRNTGNFRPPVAKKPTIAVKPTMIVADGQSICGELSIQEHCENKPVIIGWNRNRAALSQKPLNNNNEDDEGISHVPKPYGNNDSAKKMSDNNNGLTEVLKEIAGLDTAPQIRGNETNSRETFLGRINDCYKRSLERKLPPSCMIGGIKETQGKHVILSGSTEVISNEGGRFCYPEFSSGEESEEDVLFSNMEEEHESWDESDEELLAMEIRMRGQPRFANFRANTLSPVRFFVDKKWNTIPLRNKSLQRICAVDYDDSYDEILNGYEENSVVSYGQGSIQSMVSSDSTSPDSSLTEESRSETASSLSQKICNGGLSPGNPGDSKDMKEIEPNYESPSSNNQDKDSSQASKSSIKVPETHKAVLALRLEEKDGKIAVQTEKEESKASTDVAGQAVTINLVPTEEQAKPYRVVNLEQPLCKPYTVVDVSAAMASEHLEGPVNSPKTKSSSSTPNSPVTSSSLTPGQISAHFQKSSAIRYQEVWTSSTSPRQKIPKVELITSGTGPNVPPRKNCHKSAPTSPTATNISSKTIPVKSPNLSEIKFNSYNNAGMPPFPIIIHDEPTYARSSKNAIKVPIVINPNAYDNLAIYKSFLGTSGELSVKEKTTSVISHTYEEIETESKVPDNTTSKTTDCLQTKGFSNSTEHKRGSVAQKVQEFNNCLNRGQSSPQRSYSSSHSSPAKIQRATQEPVAKIEGTQESQMVGSSSTREKASTVLSQIVASIQPPQSPPETPQSGPKACSVEELYAIPPDADVAKSTPKSTPVRPKSLFTSQPSGEAEAPQTTDSPTTKVQKDPSIKPVTPSPSKLVTSPQSEPPAPFPPPRSTSSPYHAGNLLQRHFTNWTKPTSPTRSTEAESVLHSEGSRRAADAKPKRWISFKSFFRRRKTDEEDDKEKEREKGKLVGLDGTVIHMLPPPPVQRHHWFTEAKGESSEKPAIVFMYRCDPAQGQLSVDQSKARTDQAAVMEKGRAENALLQDSEKKRSHSSPSQIPKKILSHMTHEVTEDFSPRDPRTVVGKQDGRGCTSVTTALSLPELEREDGKEDISDPMDPNPCSATYSNLGQSRAAMIPPKQPRQPKGAVDDAIAFGGKTDQEAPNASQPTPPPLPKKMIIRANTEPISKDLQKSMESSLCVMANPTYDIDPNWDASSAGSSISYELKGLDIESYDSLERPLRKERPVPSAANSISSLTTLSIKDRFSNSMESLSSRRGPSCRQGRGIQKPQRQALYRGLENREEVVGKIRSLHTDALKKLAVKCEDLFMAGQKDQLRFGVDSWSDFRLTSDKPCCEAGDAVYYTASYAKDPLNNYAVKICKSKAKESQQYYHSLAVRQSLAVHFNIQQDCGHFLAEVPNRLLPWEDPDDPEKDEDDMEETEEDAKGETDGKNPKPCSEAASSQKENQGVMSKKQRSHVVVITREVPCLTVADFVRDSLAQHGKSPDLYERQVCLLLLQLCSGLEHLKPYHVTHCDLRLENLLLVHYQPGGTAQGFGPAEPSPTSSYPTRLIVSNFSQAKQKSHLVDPEILRDQSRLAPEIITATQYKKCDEFQTGILIYEMLHLPNPFDENPELKEREYTRADLPRIPFRSPYSRGLQQLASCLLNPNPSERILISDAKGILQCLLWGPREDLFQTFTACPSLVQRNTLLQNWLDIKRTLLMIKFAEKSLDREGGISLEDWLCAQYLAFATTDSLSCIVKILQHR

SEQ ID NO: 6714 - protein, 351 aa, Homo sapiens
MEDSQETSPSSNNSSEELSSALHLSKGMSIFLDILRRADKNDDGKLSFEEFKAYFADGVLSGEELHELFHTIDTHNTNNLDTEELCEYFSQHLGEYENVLAALEDLNLSILKAMGKTKKDYQEASNLEQFVTRFLLKETLNQLQSLQNSLECAMETTEEQTRQERQGPAKPEVLSIQWPGKRSSRRVQRHNSFSPNSPQFNVSGPGLLEEDNQWMTQINRLQKLIDRLEKKDLKLEPPEEEIIEGNTKSHIMLVQRQMSVIEEDLEEFQLALKHYVESASSQSGCLRISIQKLSNESRYMIYEFWENSSVWNSHLQTNYSKTFQRSNVDFLETPELTSTMLVPASWWILNN

SEQ ID NO: 6715 - protein, 100 aa, Homo sapiens
MLVQRQMSVIEEDLEEFQLALKHYVESASSQSGCLRISIQKLSNESRYMIYEFWENSSVWNSHLQTNYSKTFQRSNVDFLETPELTSTMLVPASWWILNN

SEQ ID NO: 6716 - protein, 106 aa, Homo sapiens
MPFLDIQKRFGLNIDRWLTIQSGEQPYKMAGRCHAFEKEWIECAHGIGYTRAEKECKIEYDDFVECLLRQKTMRRAGTIRKQRDKLIKEGKYTPPPHHIGKGEPRP

SEQ ID NO: 6717 - protein, 1610 aa, Homo sapiens
MKKEGSSGSFRLQPNTGSLSRAVSWINFSSLSRQTKRLFRSDGELSVCGQQVEVDDENWIYRAQPRKAVSNLDEESRWTVHYTAPWHQQENVFLPTTRPPCVEDLHRQAKLNLKSVLRECDKLRHDGYRSSQYYSQGPTFAANASPFCDDYQDEDEETDQKCSLSSSEEERFISIRRPKTPASSDFSDLNTQTNWTKSLPLPTPEEKMRQQAQTVQADVVPINITASGTGQDDADGHSVYTPDHYSTLGRFNSCRSAGQRSETRDSSCQTEDVKVVPPSMRRIRAQKGQGIAAQMGHFSGSSGNMSVLSDSAGIVFPSRLDSDAGFHSLPRSGARANIQSLEPRLGALGPAGDMNGTFLYQRGHPQADENLGHLGGASGTGTLLRPKSQELRHFESENIMSPACVVSPHATYSTSIIPNATLSSSSEVIAIPTAQSAGQRESKSSGSSHARIKSRDHLISRHAVKGDPQSPGRHWNEGHATILSQDLDPHSPGEPALLSLCDSAVPLNAPANRENGSQAMPYNCRNNLAFPAHPQDVDGKSESSYSGGGGHSSSEPWEYKSSGNGRASPLKPHLATPGYSTPTSNMSSCSLDQTSNKEDAGSLYSEDHDGYCASVHTDSGHGSGNLCNSSDGFGNPRHSVINVFVGRAQKNQGDRSNYQDKSLSRNISLKKAKKPPLPPSRTDSLRRIPKKSSQCNGQVLNESLIATLQHSLQLSLPGKSGSSPSQSPCSDLEEPWLPRSRSQSTVSAGSSMTSATTPNVYSLCGATPSQSDTSSVKSEYTDPWGYYIDYTGMQEDPGNPAGGCSTSSGVPTGNGPVRHVQEGSRATMPQVPGGSVKPKIMSPEKSHRVISPSSGYSSQSNTPTALTPVPVFLKSVSPANGKGKPKPKVPERKSSLISSVSISSSSTSLSSSTSTEGSGTMKKLDPAVGSPPAPPPPPVPSPPFPCPADRSPFLPPPPPVTDCSQGSPLPHSPVFPPPPPEALIPFCSPPDWCLSPPRPALSPILPDSPVSLPLPPPLLPSSEPPPAPPLDPKFMKDTRPPFTNSGQPESSRGSLRPPSTKEETSRPPMPLITTEALQMVQLRPVRKNSGAEAAQLSERTAQEQRTPVAPQYHLKPSAFLKSRNSTNEMESESQPASVTSSLPTPAKSSSQGDHGSAAERGGPVSRSPGAPSAGEAEARPSPSTTPLPDSSPSRKPPPISKKPKLFLVVPPPQKDFAVEPAENVSEALRAVPSPTTGEEGSVHSREAKESSAAQAGSHATHPGTSVLEGGAAGSMSPSRVEANVPMVQPDVSPAPKQEEPAENSADTGGDGESCLSQQDGAAGVPETNAAGSSSEACDFLKEDGNDEVMTPSRPRTTEDLFAAIHRSKRKVLGRRDSDDDHSRNHSPSPPVTPTGAAPSLASPKQVGSIQRSIRKSSTSSDNFKALLLKKGSRSDTSARMSAAEMLKNTDPRFQRSRSEPSPDAPESPSSCSPSKNRRAQEEWAKNEGLMPRSLSFSGPRYGRSRTPPSAASSRYSMRNRIQSSPMTVISEGEGEAVEPVDSIARGALGAAEGCSLDGLAREEMDEGGLLCGEGPAASLQPQAPGPVDGTASAEGREPSPQCGGSLSEES

SEQ ID NO: 6718 - protein, 1606 aa, Homo sapiens
MVVFINAKIKSLIKLFKKKTVSNLDEESRWTVHYTAPWHQQENVFLPTTRPPCVEDLHRQAKLNLKSVLRECDKLRHDGYRSSQYYSQGPTFAANASPFCDDYQDEDEETDQKCSLSSSEEERFISIRRPKTPASSDFSDLNTQTNWTKSLPLPTPEEKMRQQAQTVQADVVPINITGENFDRQASLRRSLIYTDTLVRRPKKVKRRKTITGVPDNIQKELASGTGQDDADGHSVYTPDHYSTLGRFNSCRSAGQRSETRDSSCQTEDVKVVPPSMRRIRAQKGQGIAAQMGHFSGSSGNMSVLSDSAGIVFPSRLDSDAGFHSLPRSGARANIQSLEPRLGALGPAGDMNGTFLYQRGHPQADENLGHLGGASGTGTLLRPKSQELRHFESENIMSPACVVSPHATYSTSIIPNATLSSSSEVIAIPTAQSAGQRESKSSGSSHARIKSRDHLISRHAVKGDPQSPGRHWNEGHATILSQDLDPHSPGEPALLSLCDSAVPLNAPANRENGSQAMPYNCRNNLAFPAHPQDVDGKSESSYSGGGGHSSSEPWEYKSSGNGRASPLKPHLATPGYSTPTSNMSSCSLDQTSNKEDAGSLYSEDHDGYCASVHTDSGHGSGNLCNSSDGFGNPRHSVINVFVGRAQKNQGDRSNYQDKSLSRNISLKKAKKPPLPPSRTDSLRRIPKKSSQCNGQVLNESLIATLQHSLQLSLPGKSGSSPSQSPCSDLEEPWLPRSRSQSTVSAGSSMTSATTPNVYSLCGATPSQSDTSSVKSEYTDPWGYYIDYTGMQEDPGNPAGGCSTSSGVPTGNGPVRHVQEGSRATMPQVPGGSVKPKIMSPEKSHRVISPSSGYSSQSNTPTALTPVPVFLKSVSPANGKGKPKPKVPERKSSLISSVSISSSSTSLSSSTSTEGSGTMKKLDPAVGSPPAPPPPPVPSPPFPCPADRSPFLPPPPPVTDCSQGSPLPHSPVFPPPPPEALIPFCSPPDWCLSPPRPALSPILPDSPVSLPLPPPLLPSSEPPPAPPLDPKFMKDTRPPFTNSGQPESSRGSLRPPSTKEETSRPPMPLITTEALQMVQLRPVRKNSGAEAAQLSERTAQEQRTPVAPQYHLKPSAFLKSRNSTNEMESESQPASVTSSLPTPAKSSSQGDHGSAAERGGPVSRSPGAPSAGEAEARPSPSTTPLPDSSPSRKPPPISKKPKLFLVVPPPQKDFAVEPAENVSEALRAVPSPTTGEEGSVHSREAKESSAAQAGSHATHPGTSVLEGGAAGSMSPSRVEANVPMVQPDVSPAPKQEEPAENSADTGGDGESCLSQQDGAAGVPETNAAGSSSEACDFLKEDGNDEVMTPSRPRTTEDLFAAIHRSKRKVLGRRDSDDDHSRNHSPSPPVTPTGAAPSLASPKQVGSIQRSIRKSSTSSDNFKALLLKKGSRSDTSARMSAAEMLKNTDPRFQRSRSEPSPDAPESPSSCSPSKNRRAQEEWAKNEGLMPRSLSFSGPRYGRSRTPPSAASSRYSMRNRIQSSPMTVISEGEGEAVEPVDSIARGALGAAEGCSLDGLAREEMDEGGLLCGEGPAASLQPQAPGPVDGTASAEGREPSPQCGGSLSEES

SEQ ID NO: 6719 - protein, 519 aa, Homo sapiens
MTSTFNPRECKLSKQEGQNYGFFLRIEKDTEGHLVRVVEKCSPAEKAGLQDGDRVLRINGVFVDKEEHMQVVDLVRKSGNSVTLLVLDGDSYEKAVKTRVDLKELGQSQKEQGLSDNILSPVMNGGVQTWTQPRLCYLVKEGGSYGFSLKTVQGKKGVYMTDITPQGVAMRAGVLADDHLIEVNGENVEDASHEEVVEKVKKSGSRVMFLLVDKETDKRHVEQKIQFKRETASLKLLPHQPRIVEMKKGSNGYGFYLRAGSEQKGQIIKDIDSGSPAEEAGLKNNDLVVAVNGESVETLDHDSVVEMIRKGGDQTSLLVVDKETDNMYRLAHFSPFLYYQSQELPNGSVKEAPAPTPTSLEVSSPPDTTEEVDHKPKLCRLAKGENGYGFHLNAIRGLPGSFIKEVQKGGPADLAGLEDEDVIIEVNGVNVLDEPYEKVVDRIQSSGKNVTLLVCGKKAYDYFQAKKIPIVSSLADPLDTPPDSKEGIVVESNHDSHMAKERAHSTASHSSSNSEDTEM

SEQ ID NO: 6720 - protein, 408 aa, Homo sapiens
MTSTFNPRECKLSKQEGQNYGFFLRIEKDTEGHLVRVVEKCSPAEKAGLQDGDRVLRINGVFVDKEEHMQVVDLVRKSGNSVTLLVLDGDSYEKAVKTRVDLKELGQSQKEQGLSDNILSPVMNGGVQTWTQPRLCYLVKEGGSYGFSLKTVQGQIIKDIDSGSPAEEAGLKNNDLVVAVNGESVETLDHDSVVEMIRKGGDQTSLLVVDKETDNMYRLAHFSPFLYYQSQELPNGSVKEAPAPTPTSLEVSSPPDTTEEVDHKPKLCRLAKGENGYGFHLNAIRGLPGSFIKEVQKGGPADLAGLEDEDVIIEVNGVNVLDEPYEKVVDRIQSSGKNVTLLVCGKKAYDYFQAKKIPIVSSLADPLDTPPDSKEGIVVESNHDSHMAKERAHSTASHSSSNSEDTEM

SEQ ID NO: 6721 - protein, 493 aa, Homo sapiens
MALFGALFLALLAGAHAEFPGCKIRVTSKALELVKQEGLRFLEQELETITIPDLRGKEGHFYYNISEVKVTELQLTSSELDFQPQQELMLQITNASLGLRFRRQLLYWFFYDGGYINASAEGVSIRTGLELSRDPAGRMKVSNVSCQASVSRMHAAFGGTFKKVYDFLSTFITSGMRFLLNQQICPVLYHAGTVLLNSLLDTVPVRSSVDELVGIDYSLMKDPVASTSNLDMDFRGAFFPLTERNWSLPNRAVEPQLQEEERMVYVAFSEFFFDSAMESYFRAGALQLLLVGDKVPHDLDMLLRATYFGSIVLLSPAVIDSPLKLELRVLAPPRCTIKPSGTTISVTASVTIALVPPDQPEVQLSSMTMDARLSAKMALRGKALRTQLDLRRFRIYSNHSALESLALIPLQAPLKTMLQIGVMPMLNERTWRGVQIPLPEGINFVHEVVTNHAGFLTIGADLHFAKGLREVIEKNRPADVRASTAPTPSTAAV

SEQ ID NO: 6722 - protein, 441 aa, Homo sapiens
MALFGALFLALLAGAHAEFPGCKIRVTSKALELVKQEGLRFLEQELETITIPDLRGKEGHFYYNISEVKVTELQLTSSELDFQPQQELMLQITNASLGLRFRRQLLYWFLKVYDFLSTFITSGMRFLLNQQICPVLYHAGTVLLNSLLDTVPVRSSVDELVGIDYSLMKDPVASTSNLDMDFRGAFFPLTERNWSLPNRAVEPQLQEEERMVYVAFSEFFFDSAMESYFRAGALQLLLVGDKVPHDLDMLLRATYFGSIVLLSPAVIDSPLKLELRVLAPPRCTIKPSGTTISVTASVTIALVPPDQPEVQLSSMTMDARLSAKMALRGKALRTQLDLRRFRIYSNHSALESLALIPLQAPLKTMLQIGVMPMLNERTWRGVQIPLPEGINFVHEVVTNHAGFLTIGADLHFAKGLREVIEKNRPADVRASTAPTPSTAAV

SEQ ID NO: 6723 - protein, 398 aa, Homo sapiens
MALFGALFLALLAGAHAEFPGCKIRVTSKALELVKQEGLRFLEQELETITIPDLRGKEGHFYYNISEKVYDFLSTFITSGMRFLLNQQICPVLYHAGTVLLNSLLDTVPVRSSVDELVGIDYSLMKDPVASTSNLDMDFRGAFFPLTERNWSLPNRAVEPQLQEEERMVYVAFSEFFFDSAMESYFRAGALQLLLVGDKVPHDLDMLLRATYFGSIVLLSPAVIDSPLKLELRVLAPPRCTIKPSGTTISVTASVTIALVPPDQPEVQLSSMTMDARLSAKMALRGKALRTQLDLRRFRIYSNHSALESLALIPLQAPLKTMLQIGVMPMLNERTWRGVQIPLPEGINFVHEVVTNHAGFLTIGADLHFAKGLREVIEKNRPADVRASTAPTPSTAAV

SEQ ID NO: 6724 - protein, 405 aa, Homo sapiens
MLQITNASLGLRFRRQLLYWFFYDGGYINASAEGVSIRTGLELSRDPAGRMKVSNVSCQASVSRMHAAFGGTFKKVYDFLSTFITSGMRFLLNQQICPVLYHAGTVLLNSLLDTVPVRSSVDELVGIDYSLMKDPVASTSNLDMDFRGAFFPLTERNWSLPNRAVEPQLQEEERMVYVAFSEFFFDSAMESYFRAGALQLLLVGDKVPHDLDMLLRATYFGSIVLLSPAVIDSPLKLELRVLAPPRCTIKPSGTTISVTASVTIALVPPDQPEVQLSSMTMDARLSAKMALRGKALRTQLDLRRFRIYSNHSALESLALIPLQAPLKTMLQIGVMPMLNERTWRGVQIPLPEGINFVHEVVTNHAGFLTIGADLHFAKGLREVIEKNRPADVRASTAPTPSTAAV

SEQ ID NO: 6725 - protein, 169 aa, Homo sapiens
MICLVLTIFANLFPAACTGAHERTFLAVKPDGVQRRLVGEIVRRFERKGFKLVALKLVQASEELLREHYAELRERPFYGRLVKYMASGPVVAMVWQGLDVVRTSRALIGATNPADAPPGTIRGDFCIEVGKNLIHGSDSVESARREIALWFRADELLCWEDSAGHWLYE

SEQ ID NO: 6726 - protein, 568 aa, Homo sapiens
MVLLHWCLLWLLFPLSSRTQKLPTRDEELFQMQIRDKAFFHDSSVIPDGAEISSYLFRDTPKRYFFVVEEDNTPLSVTVTPCDAPLEWKLSLQELPEDRSGEGSGDLEPLEQQKQQIINEEGTELFSYKGNDVEYFISSSSPSGLYQLDLLSTEKDTHFKVYATTTPESDQPYPELPYDPRVDVTSLGRTTVTLAWKPSPTASLLKQPIQYCVVINKEHNFKSLCAVEAKLSADDAFMMAPKPGLDFSPFDFAHFGFPSDNSGKERSFQAKPSPKLGRHVYSRPKVDIQKICIGNKNIFTVSDLKPDTQYYFDVFVVNINSNMSTAYVGTFARTKEEAKQKTVELKDGKITDVFVKRKGAKFLRFAPVSSHQKVTFFIHSCLDAVQIQVRRDGKLLLSQNVEGIQQFQLRGKPKAKYLVRLKGNKKGASMLKILATTRPTKQSFPSLPEDTRIKAFDKLRTCSSATVAWLGTQERNKFCIYKKEVDDNYNEDQKKREQNQCLGPDIRKKSEKVLCKYFHSQNLQKAVTTETIKGLQPGKSYLLDVYVIGHGGHSVKYQSKVVKTRKFC

SEQ ID NO: 6727 - protein, 340 aa, Homo sapiens
MLTQLKAKSEGKLAKQICKVVLDHFEKQYSKELGDAWNTVREILTSPSCWQYAVLLNRFNYPFELEKDLHLKGYHTLSQGSLPNYPKSVKCYLSRTPGRIPSERHQIGNLKKYYLLNAASLLPVLALELRDGEKVLDLCAAPGGKSIALLQCACPGYLHCNEYDSLRLRWLRQTLESFIPQPLINVIKVSELDGRKMGDAQPEMFDKVLVDAPCSNDRSWLFSSDSQKASCRISQRRNLPLLQIELLRSAIKALRPGGILVYSTCTLSKAENQDVISEILNSHGNIMPMDIKGIARTCSHDFTFAPTGQECGLLVIPDKGKAWGPMYVAKLKKSWSTGKW

SEQ ID NO: 6728 - protein, 197 aa, Homo sapiens
MQRWKAAALASVLCSSVLSIWMCREGLLLSHRLGPALVPLHRLPRTLDARIARLAQYRALLQGAPDAMELRELTPWAGRPPGPRRRAGPRRRRARARLGARPCGLRELEVRVSELGLGYASDETVLFRYCAGACEAAARVYDLGLRRLRQRRRLRRERVRAQPCCRPTAYEDEVSFLDAHSRYHTVHELSARECACV

SEQ ID NO: 6729 - protein, 228 aa, Homo sapiens
MIRLGGWCARRLCSAAVPAGRRGAAGGLGLAGGRALRVLVDMDGVLADFEGGFLRKFRARFPDQPFIALEDRRGFWVSEQYGRLRPGLSEKAISIWESKNFFFELEPLPGAVEAVKEMASLQNTDVFICTSPIKMFKYCPYEKYAWVEKYFGPDFLEQIVLTRDKTVVSADLLIDDRPDITGAEPTPSWEHVLFTACHNQHLQLQPPRRRLHSWADDWKAILDSKRPC

SEQ ID NO: 6730 - protein, 306 aa, Homo sapiens
MSSEKSGLPDSVPHTSPPPYNAPQPPAEPPAPPPQAAPSSHHHHHHHYHQSGTATLPRLGAGGLASSAATAQRGPSSSATLPRPPHHAPPGPAAGAPPPGCATLPRMPPDPYLQETRFEGPLPPPPPAAAAPPPPAPAQTAQAPGFVVPTHAGTVGTLPLGGYVAPGYPLQLQPCTAYVPVYPVGTPYAGGTPGGTGVTSTLPPPPQGPGLALLEPRRPPHDYMPIAVLTTICCFWPTGIIAIFKAVQVRTALARGDMVSAEIASREARNFSFISLAVGIAAMVLCTILTVVIIIAAQHHENYWDP

SEQ ID NO: 6731 - protein, 225 aa, Homo sapiens
MPGTQTPAPAEDPHSGCRDPVPARPQACHPKSQETRFEGPLPPPPPAAAAPPPPAPAQTAQAPGFVVPTHAGTVGTLPLGGYVAPGYPLQLQPCTAYVPVYPVGTPYAGGTPGGTGVTSTLPPPPQGPGLALLEPRRPPHDYMPIAVLTTICCFWPTGIIAIFKAVQVRTALARGDMVSAEIASREARNFSFISLAVGIAAMVLCTILTVVIIIAAQHHENYWDP

SEQ ID NO: 6732 - protein, 413 aa, Homo sapiens
MENMLLWLIFFTPGWTLIDGSEMEWDFMWHLRKVPRIVSERTFHLTSPAFEADAKMMVNTVCGIECQKELPTPSLSELEDYLSYETVFENGTRTLTRVKVQDLVLEPTQNITTKGVSVRRKRQVYGTDSRFSILDKRFLTNFPFSTAVKLSTGCSGILISPQHVLTAAHCVHDGKDYVKGSKKLRVGLLKMRNKSGGKKRRGSKRSRREASGGDQREGTREHLRERAKGGRRRKKSGRGQRIAEGRPSFQWTRVKNTHIPKGWARGGMGDATLDYDYALLELKRAHKKKYMELGISPTIKKMPGGMIHFSGFDNDRADQLVYRFCSVSDESNDLLYQYCDAESGSTGSGVYLRLKDPDKKNWKRKIIAVYSGHQWVDVHGVQKDYNVAVRITPLKYAQICLWIHGNDANCAYG

SEQ ID NO: 6733 - protein, 277 aa, Homo sapiens
MEAPGPAQAAAAESNSREVTEDAADWAPALCPSPEARSPEAPAYRLQDCDALVTMGTGTFGRVHLVKEKTAKHFFALKVMSIPDVIRRKQEQHVHNEKSVLKEVSHPFLIRLFWTWHEERFLYMLMEYVPGGELFSYLRNRGHFSSTTGLFYSAEIICAIEYLHSKEIVYRDLKPENILLDRDGHIKLTDFGFAKKLVDRTWTLCGTPEYLAPEVIQSKGHGRAVDWWALGILIFEMLSGFPPFFDDNPFGIYQKILAGKLYFPRHLDFHVKTGRMM

SEQ ID NO: 6734 - protein, 569 aa, Homo sapiens
MRDNTSPISVILVSSGSRGNKLLFRYPFQRSQEHPASQTSKPRSRYAASNTGDHADEQDGDSRFSDVILATILATKSEMCGQKFELKIDNVRFVGHPTLLQHALGQISKTDPSPKREAPTMILFNVVFALRANADPSVINCLHNLSRRIATVLQHEERRCQYLTREAKLILALQDEVSAMADGNEGPQSPFHHILPKCKLARDLKEAYDSLCTSGVVRLHINSWLEVSFCLPHKIHYAASSLIPPEAIERSLKAIRPYHALLLLSDEKSLLGELPIDCSPALVRVIKTTSAVKNLQQLAQDADLALLQVFQLAAHLVYWGKAIIIYPLCENNVYMLSPNASVCLYSPLAEQFSHQFPSHDLPSVLAKFSLPVSLSEFRNPLAPAVQETQLIQMVVWMLQRRLLIQLHTYVCLMASPSEEEPRPREDDVPFTARVGGRSLSTPNALSFGSPTSSDDMTLTSPSMDNSSAELLPSGDSPLNQRMTENLLASLSEHERAAILSVPAAQNPEDLRMFARLLHYFRGRHHLEEIMYNENTRRSQLLMLFDKFRSVLVVTTHEDPVIAVFQALLP

SEQ ID NO: 6735 - protein, 432 aa, Homo sapiens
MVKLSIVLTPQFLSHDQGQLTKELQQHVKSVTCPCEYLRKVINSLAVYRHRETDFGVGVRDHPGQHGKTPSPQKLDNLIIIIIGFLRCYTFNILFCTSCLCVSFLKTIFWSRNGHDGSMDVQQRAWRSNRSRQKGLRSICMHTKKRVSSFRGNKIGLKDVITLRRHVETKVRAKIRKRKVTTKINRHDKINGKRKTARKQKMFQRAQELRRRAEDYHKCKIPPSARKPLCNWVRMAAAEHRHSSGLPYWLYLTAETLKNRMGRQPPPPTQQHSITDNSLSLKTPPECLLTPLPPSVDDNIKECPLAPLPPSPLPPSVDDNLKECLFVPLPPSPLPPSVDDNLKECLFVPLPPSPLPPSVDDNLKTPPLATQEAEVEKPPKPKRWRVDEVEQSPKPKRQREAEAQQLPKPKRRRLSKLRTRHCTQAWAIRINP

SEQ ID NO: 6736 - protein, 308 aa, Homo sapiens
MDTGNKTLPQDFLLLGFPGSQTLQLSLFMLFLVMYILTVSGNVAILMLVSTSHQLHTPMYFFLSNLSFLEIWYTTAAVPKALAILLGRSQTISFTSCLLQMYFVFSLGCTEYFLLAAMAYDRCLAICYPLHYGAIMSSLLSAQLALGSWVCGFVAIAVPTALISGLSFCGPRAINHFFCDIAPWIALACTNTQAVELVAFVIAVVVILSSCLITFVSYVYIISTILRIPSASGRSKAFSTCSSHLTVVLIWYGSTVFLHVRTSIKDALDLIKAVHVLNTVVTPVLNPFIYTLRNKEVRETLLKKWKGK

SEQ ID NO: 6737 - protein, 481 aa, Homo sapiens
MKGRGMLVLLLHAVVLGLPSAWAVGACARACPAACACSTVERGCSVRCDRAGLLRVPAELPCEAVSIDLDRNGLRFLGERAFGTLPSLRRLSLRHNNLSFITPGAFKGLPRLAELRLAHNGDLRYLHARTFAALSRLRRLDLAACRLFSVPERLLAELPALRELAAFDNLFRRVPGALRGLANLTHAHLERGRIEAVASSSLQGLRRLRSLSLQANRVRAVHAGAFGDCGVLEHLLLNDNLLAELPADAFRGLRRLRTLNLGGNALDRVARAWFADLAELELLYLDRNSIAFVEEGAFQNLSGLLALHLNGNRLTVLAWVAFQPGFFLGRLFLFRNPWCCDCRLEWLRDWMEGSGRVTDVPCASPGSVAGLDLSQVTFGRSSDGLCVDPEELNLTTSSPGPSPEPAATTVSRFSSLLSKLLAPRVPVEEAANTTGGLANASLSDSLSSRGVGGAGRQPWFLLASCLLPSVAQHVVFGLQMD

SEQ ID NO: 6738 - protein, 254 aa, Homo sapiens
MTEEVWMGTWRPHRPRGPIMALYSSPGPKYLIPPTTGFMKHTPTKLRAPAYSFRGAPMLLAENCSPGPRYNVNPKILRTGKDLGPAYSILGRYQTKTMLTPGPGDYFPEKSTKYVFDSAPSHSISARTKAFRVDSTPGPAAYMLPMVMGPNTVGKASQPSFSIKGRSKLGGFSDDLHKTPGPAAYRQTDVRVTKFKAPQYTMAARVEPPGDKTLKPGPGAHSPEKVTLTKPCAPVVTFGIKHSDYMTPLLVDVE

SEQ ID NO: 6739 - protein, 138 aa, Homo sapiens
MTEEVWMGTWRPHRPRGPIMALYSSPGPKYLIPPTTGFMKHTPTKLRAPAYSFRGAPMLLAENCSPGPRYNVNPKILRTGKDLGPAYSILGRYQTKTMLTPGPALKSAFPSWTPRDPTWSPPVLEPRGPTPRMLGSPP

SEQ ID NO: 6740 - protein, 207 aa, Homo sapiens
MTEEVWMGTWRPHRPRGPIMALYSSPGPKYLIPPTTGFMKHTPTKLRAPAYSFRGAPMLLAENCSPGPRYNVNPKILRTGKDLGPAYSILGRYQTKTMLTPGPGDYFPEKSTKYVFDSAPSHSISARTKAFRVDSTPGPAAYMLPMVMGPNTVGKASQPSFSIKGRSKLGGFSDDLHKVTLTKPCAPVVTFGIKHSDYMTPLLVDVE

SEQ ID NO: 6741 - protein, 369 aa, Homo sapiens
MVKLSIVLTPRFLSHDQGQLTKELQQHVKSVTCPCEYLRKVINTLADHRHRGTDFGGSPWLLIITVFLRSYKFAISLCTSYLCVSFLKTIFPSQNGHDGSTDVQQRARRSNRRRQEGIKIVLEDIFTLWRQVETKVRAKICKMKVTTKVNRHDKINGKRKTAKEHLRKLSMKEREHGEKERQVSEAEENGKLDMKEIHTYMEMFQRAQALRRRAEDYYRCKITPSARKPLCNRVRMAAAEHRHSSGLPYWPYLTAETLKNRMGHQPPPPTQQHSIIDNSLSLKTPPECLLTPLPPSALPSADDNLKTPAECLLYPLPPSADDNLKTPPECLLTPLPPSAPPSADDNLKTPPKCVCSLPFHPQRMIISRN

SEQ ID NO: 6742 - protein, 453 aa, Homo sapiens
MLSRSRCVSRAFSRSLSAFQKGNCPLGRRSLPGVSLCQGPGYPNSRKVVINNSVFSVRFFRTTAVCKDDLVTVKTPAFAESVTEGDVRWEKAVGDTVAEDEVVCEIETDKTSVQVPSPANGVIEALLVPDGGKVEGGTPLFTLRKTGAAPAKAKPAEAPAAAAPKAEPTAAAVPPPAAPIPTQMPPVPSPSQPPSGKPVSAVKPTVAPPLAEPGAGKGLRSEHREKMNRMRQRIAQRLKEAQNTCAMLTTFNEIDMSNIQEMRARHKEAFLKKHNLKLGFMSAFVKASAFALQEQPVVNAVIDDTTKEVVYRDYIDISVAVATPRGLVVPVIRNVEAMNFADIERTITELGEKARKNELAIEDMDGGTFTISNGGVFGSLFGTPIINPPQSAILGMHGIFDRPVAIGGKVEVRPMMYVALTYDHRLIDGREAVTFLRKIKAAVEDPRVLLLDL

SEQ ID NO: 6743 - protein, 367 aa, Homo sapiens
MTWLQSKPQRLQNLSQREMSGGRKTSVQVPSPANGVIEALLVPDGGKVEGGTPLFTLRKTGAAPAKAKPAEAPAAAAPKAEPTAAAVPPPAAPIPTQMPPVPSPSQPPSGKPVSAVKPTVAPPLAEPGAGKGLRSEHREKMNRMRQRIAQRLKEAQNTCAMLTTFNEIDMSNIQEMRARHKEAFLKKHNLKLGFMSAFVKASAFALQEQPVVNAVIDDTTKEVVYRDYIDISVAVATPRGLVVPVIRNVEAMNFADIERTITELGEKARKNELAIEDMDGGTFTISNGGVFGSLFGTPIINPPQSAILGMHGIFDRPVAIGGKVEVRPMMYVALTYDHRLIDGREAVTFLRKIKAAVEDPRVLLLDL

SEQ ID NO: 6744 - protein, 719 aa, Homo sapiens
MGNGESQLSSVPAQKLGWFIQEYLKPYEECQTLIDEMVNTICDVLQEPEQFPLVQGVAIGGSYGRKTVLRGNSDGTLVLFFSDLKQFQDQKRSQRDILDKTGDKLKFCLFTKWLKNNFEIQKSLDGFTIQVFTKNQRISFEVLAAFNALSLNDNPSPWIYRELKRSLDKTNASPGEFAVCFTELQQKFFDNRPGKLKDLILLIKHWHQQCQKKIKDLPSLSPYALELLTVYAWEQGCRKDNFDIAEGVRTVLELIKCQEKLCIYWMVNYNFEDETIRNILLHQLQSARPVILDPVDPTNNVSGDKICWQWLKKEAQTWLTSPNLDNELPAPSWNVLPAPLFTTPGHLLDKFIKEFLQPNKCFLEQIDSAVNIIRTFLKENCFRQSTAKIQIVRGGSTAKGTALKTGSDADLVVFHNSLKSYTSQKNERHKIVKEIHEQLKAFWREKEEELEVSFEPPKWKAPRVLSFSLKSKVLNESVSFDVLPAFNALGQLSSGSTPSPEVYAGLIDLYKSSDLPGGEFSTCFTVLQRNFIRSRPTKLKDLIRLVKHWYKECERKLKPKGSLPPKYALELLTIYAWEQGSGVPDFDTAEGFRTVLELVTQYQQLCIFWKVNYNFEDETVRKFLLSQLQKTRPVILDPAEPTGDVGGGDRWCWHLLAKEAKEWLSSPCFKDGTGNPIPPWKVPTMQTPGSCGARIHPIVNEMFSSRSHRILNNNSKRNF

SEQ ID NO: 6745 - protein, 687 aa, Homo sapiens
MGNGESQLSSVPAQKLGWFIQEYLKPYEECQTLIDEMVNTICDVLQEPEQFPLVQGVAIGGSYGRKTVLRGNSDGTLVLFFSDLKQFQDQKRSQRDILDKTGDKLKFCLFTKWLKNNFEIQKSLDGFTIQVFTKNQRISFEVLAAFNALSLNDNPSPWIYRELKRSLDKTNASPGEFAVCFTELQQKFFDNRPGKLKDLILLIKHWHQQCQKKIKDLPSLSPYALELLTVYAWEQGCRKDNFDIAEGVRTVLELIKCQEKLCIYWMVNYNFEDETIRNILLHQLQSARPVILDPVDPTNNVSGDKICWQWLKKEAQTWLTSPNLDNELPAPSWNVLPAPLFTTPGHLLDKFIKEFLQPNKCFLEQIDSAVNIIRTFLKENCFRQSTAKIQIVRGGSTAKGTALKTGSDADLVVFHNSLKSYTSQKNERHKIVKEIHEQLKAFWREKEEELEVSFEPPKWKAPRVLSFSLKSKVLNESVSFDVLPAFNALGQLSSGSTPSPEVYAGLIDLYKSSDLPGGEFSTCFTVLQRNFIRSRPTKLKDLIRLVKHWYKECERKLKPKGSLPPKYALELLTIYAWEQGSGVPDFDTAEGFRTVLELVTQYQQLCIFWKVNYNFEDETVRKFLLSQLQKTRPVILDPAEPTGDVGGGDRWCWHLLAKEAKEWLSSPCFKDGTGNPIPPWKVPVKVI

SEQ ID NO: 6746 - protein, 172 aa, Homo sapiens
MGNGESQLSSVPAQKLGWFIQEYLKPYEECQTLIDEMVNTICDVLQEPEQFPLVQGVAIGGSYGRKTVLRGNSDGTLVLFFSDLKQFQDQKRSQRDILDKTGDKLKFCLFTKWLKNNFEIQKSLDGFTIQVFTKNQRISFEVLAAFNALSKHCWVSGEKSQRSGCQTALCNL

SEQ ID NO: 6747 - protein, 313 aa, Homo sapiens
MAGENHTTLPEFLLLGFSDLKALQGPLFWVVLLVYLVTLLGNSLIILLTQVSPALHSPMYFFLRQLSVVELFYTTDIVPRTLANLGSPHPQAISFQGCAAQMYVFIVLGISECCLLTAMAYDRYVAICQPLRYSTLLSPRACMAMVGTSWLTGIITATTHASLIFSLPFRSHPIIPHFLCDILPVLRLASAGKHRSEISVMTATIVFIMIPFSLIVTSYIRILGAILAMASTQSRRKVFSTCSSHLLVVSLFFGTASITYIRPQAGSSVTTDRVLSLFYTVITPMLNPIIYTLRNKDVRRALRHLVKRQRPSP

SEQ ID NO: 6748 - protein, 390 aa, Homo sapiens
MRKMLAAVSRVLSGASQKPASRVLVASRNFANDATFEIKKCDLHRLEEGPPVTTVLTREDGLKYYRMMQTVRRMELKADQLYKQKIIRGFCHLCDGQEACCVGLEAGINPTDHLITAYRAHGFTFTRGLSVREILAELTGRKGGCAKGKGGSMHMYAKNFYGGNGIVGAQVPLGAGIALACKYNGKDEVCLTLYGDGAANQGQIFEAYNMAALWKLPCIFICENNRYGMGTSVERAAASTDYYKRGDFIPGLRVDGMDILCVREATRFAAAYCRSGKGPILMELQTYRYHGHSMSDPGVSYRTREEIQEVRSKSDPIMLLKDRMVNSNLASVEELKEIDVEVRKEIEDAAQFATADPEPPLEELGYHIYSSDPPFEVRGANQWIKFKSVS

SEQ ID NO: 6749 - protein, 397 aa, Homo sapiens
MRKMLAAVSRVLSGASQKPASRVLVASRNFANDATFEIKKCDLHRLEEGPPVTTVLTREDGLKYYRMMQTVRRMELKADQLYKQKIIRGFCHLCDGQFLLPLTQEACCVGLEAGINPTDHLITAYRAHGFTFTRGLSVREILAELTGRKGGCAKGKGGSMHMYAKNFYGGNGIVGAQVPLGAGIALACKYNGKDEVCLTLYGDGAANQGQIFEAYNMAALWKLPCIFICENNRYGMGTSVERAAASTDYYKRGDFIPGLRVDGMDILCVREATRFAAAYCRSGKGPILMELQTYRYHGHSMSDPGVSYRTREEIQEVRSKSDPIMLLKDRMVNSNLASVEELKEIDVEVRKEIEDAAQFATADPEPPLEELGYHIYSSDPPFEVRGANQWIKFKSVS

SEQ ID NO: 6750 - protein, 359 aa, Homo sapiens
MRKMLAAVSRVLSGASQKPASRVLVASRNFANDATFEIKKCDLHRLEEGPPVTTVLTREDGLKYYRMMQTVRRMELKADQLYKQKIIRGFCHLCDGQEACCVGLEAGINPTDHLITAYRAHGFTFTRGLSVREILAELTGRKGGCAKGKGGSMHMYAKNFYGGNGIVGAQGQIFEAYNMAALWKLPCIFICENNRYGMGTSVERAAASTDYYKRGDFIPGLRVDGMDILCVREATRFAAAYCRSGKGPILMELQTYRYHGHSMSDPGVSYRTREEIQEVRSKSDPIMLLKDRMVNSNLASVEELKEIDVEVRKEIEDAAQFATADPEPPLEELGYHIYSSDPPFEVRGANQWIKFKSVS

SEQ ID NO: 6751 - protein, 428 aa, Homo sapiens
MRKMLAAVSRVLSGASQKPRHGLATLPSLVSISRLKQSSHLGLPKCWDYSHSLKTRQASRVLVASRNFANDATFEIKKCDLHRLEEGPPVTTVLTREDGLKYYRMMQTVRRMELKADQLYKQKIIRGFCHLCDGQEACCVGLEAGINPTDHLITAYRAHGFTFTRGLSVREILAELTGRKGGCAKGKGGSMHMYAKNFYGGNGIVGAQVPLGAGIALACKYNGKDEVCLTLYGDGAANQGQIFEAYNMAALWKLPCIFICENNRYGMGTSVERAAASTDYYKRGDFIPGLRVDGMDILCVREATRFAAAYCRSGKGPILMELQTYRYHGHSMSDPGVSYRTREEIQEVRSKSDPIMLLKDRMVNSNLASVEELKEIDVEVRKEIEDAAQFATADPEPPLEELGYHIYSSDPPFEVRGANQWIKFKSVS

SEQ ID NO: 6752 - protein, 1023 aa, Homo sapiens
MFHLRTCAAKLRPLTASQTVKTFSQNRPAAARTFQQIRCYSAPVAAEPFLSGTSSNYVEEMYCAWLENPKSVHKSWDIFFRNTNAGAPPGTAYQSPLPLSRGSLAAVAHAQSLVEAQPNVDKLVEDHLAVQSLIRAYQIRGHHVAQLDPLGILDADLDSSVPADIISSTDKLGFYGLDESDLDKVFHLPTTTFIGGQESALPLREIIRRLEMAYCQHIGVEFMFINDLEQCQWIRQKFETPGIMQFTNEEKRTLLARLVRSTRFEEFLQRKWSSEKRFGLEGCEVLIPALKTIIDKSSENGVDYVIMGMPHRGRLNVLANVIRKELEQIFCQFDSKLEAADEGSGDVKYHLGMYHRRINRVTDRNITLSLVANPSHLEAADPVVMGKTKAEQFYCGDTEGKKVMSILLHGDAAFAGQGIVYETFHLSDLPSYTTHGTVHVVVNNQIGFTTDPRMARSSPYPTDVARVVNAPIFHVNSDDPEAVMYVCKVAAEWRSTFHKDVVVDLVCYRRNGHNEMDEPMFTQPLMYKQIRKQKPVLQKYAELLVSQGVVNQPEYEEEISKYDKICEEAFARSKDEKILHIKHWLDSPWPGFFTLDGQPRSMSCPSTGLTEDILTHIGNVASSVPVENFTIHGGLSRILKTRGEMVKNRTVDWALAEYMAFGSLLKEGIHIRLSGQDVERGTFSHRHHVLHDQNVDKRTCIPMNHLWPNQAPYTVCNSSLSEYGVLGFELGFAMASPNALVLWEAQFGDFHNTAQCIIDQFICPGQAKWVRQNGIVLLLPHGMEGMGPEHSSARPERFLQMCNDDPDVLPDLKEANFDINQLYDCNWVVVNCSTPGNFFHVLRRQILLPFRKPLIIFTPKSLLRHPEARSSFDEMLPGTHFQRVIPEDGPAAQNPENVKRLLFCTGKVYYDLTRERKARDMVGQVAITRIEQLSPFPFDLLLKEVQKYPNAELAWCQEEHKNQGYYDYVKPRLRTTISRAKPVWYAGRDPAAAPATGNKKTHLTELQRLLDTAFDLDVFKNFS

SEQ ID NO: 6753 - protein, 1019 aa, Homo sapiens
MFHLRTCAAKLRPLTASQTVKTFSQNRPAAARTFQQIRCYSAPVAAEPFLSGTSSNYVEEMYCAWLENPKSVHKSWDIFFRNTNAGAPPGTAYQSPLPLSRGSLAAVAHAQSLVEAQPNVDKLVEDHLAVQSLIRAYQVRGHHIAKLDPLGISCVNFDDAPVTVSSNVGFYGLDESDLDKVFHLPTTTFIGGQESALPLREIIRRLEMAYCQHIGVEFMFINDLEQCQWIRQKFETPGIMQFTNEEKRTLLARLVRSTRFEEFLQRKWSSEKRFGLEGCEVLIPALKTIIDKSSENGVDYVIMGMPHRGRLNVLANVIRKELEQIFCQFDSKLEAADEGSGDVKYHLGMYHRRINRVTDRNITLSLVANPSHLEAADPVVMGKTKAEQFYCGDTEGKKVMSILLHGDAAFAGQGIVYETFHLSDLPSYTTHGTVHVVVNNQIGFTTDPRMARSSPYPTDVARVVNAPIFHVNSDDPEAVMYVCKVAAEWRSTFHKDVVVDLVCYRRNGHNEMDEPMFTQPLMYKQIRKQKPVLQKYAELLVSQGVVNQPEYEEEISKYDKICEEAFARSKDEKILHIKHWLDSPWPGFFTLDGQPRSMSCPSTGLTEDILTHIGNVASSVPVENFTIHGGLSRILKTRGEMVKNRTVDWALAEYMAFGSLLKEGIHIRLSGQDVERGTFSHRHHVLHDQNVDKRTCIPMNHLWPNQAPYTVCNSSLSEYGVLGFELGFAMASPNALVLWEAQFGDFHNTAQCIIDQFICPGQAKWVRQNGIVLLLPHGMEGMGPEHSSARPERFLQMCNDDPDVLPDLKEANFDINQLYDCNWVVVNCSTPGNFFHVLRRQILLPFRKPLIIFTPKSLLRHPEARSSFDEMLPGTHFQRVIPEDGPAAQNPENVKRLLFCTGKVYYDLTRERKARDMVGQVAITRIEQLSPFPFDLLLKEVQKYPNAELAWCQEEHKNQGYYDYVKPRLRTTISRAKPVWYAGRDPAAAPATGNKKTHLTELQRLLDTAFDLDVFKNFS

SEQ ID NO: 6754 - protein, 427 aa, Homo sapiens
MFHLRTCAAKLRPLTASQTVKTFSQNRPAAARTFQQIRCYSAPVAAEPFLSGTSSNYVEEMYCAWLENPKSVHKSWDIFFRNTNAGAPPGTAYQSPLPLSRGSLAAVAHAQSLVEAQPNVDKLVEDHLAVQSLIRAYQIRGHHVAQLDPLGILDADLDSSVPADIISSTDKLGFYGLDESDLDKVFHLPTTTFIGGQESALPLREIIRRLEMAYCQHIGVEFMFINDLEQCQWIRQKFETPGIMQFTNEEKRTLLARLVRSTRFEEFLQRKWSSEKRFGLEGCEVLIPALKTIIDKSSENGVDYVIMGMPHRGRLNVLANVIRKELEQIFCQFDSKLEAADEGSGDVKYHLGMYHRRINRVTDRNITLSLVANPSHLEAADPVVMGKTKAEQFYCGDTEGKKVRPRERRARQIVKAPCSSMEFRSPT

SEQ ID NO: 6755 - protein, 612 aa, Homo sapiens
MENQLAKSTEERTFQYQDSLPSLPVPSLEESLKKYLESVKPFANQEEYKKTEEIVQKFQSGIGEKLHQKLLERAKGKRNWLEEWWLNVAYLDVRIPSQLNVNFAGPAAHFEHYWPPKEGTQLERGSITLWHNLNYWQLLRKEKVPVHKVGNTPLDMNQFRMLFSTCKVPGITRDSIMNYFRTESEGRSPNHIVVLCRGRAFVFDVIHEGCLVTPPELLRQLTYIHKKCHSEPDGPGIAALTSEERTRWAKAREYLIGLDPENLALLEKIQSSLLVYSMEDSSPHVTPEDYSEIIAAILIGDPTVRWGDKSYNLISFSNGVFGCNCDHAPFDAMIMVNISYYVDEKIFQNEGRWKGSEKVRDIPLPEELIFIVDEKVLNDINQAKAQYLREASDLQIAAYAFTSFGKKLTKNKMLHPDTFIQLALQLAYYRLHGHPGCCYETAMTRHFYHGRTETMRSCTVEAVRWCQSMQDPSVNLRERQQKMLQAFAKHNKMMKDCSAGKGFDRHLLGLLLIAKEEGLPVPELFTDPLFSKSGGGGNFVLSTSLVGYLRVQGVVVPMVHNGYGFFYHIRDDRFVVACSAWKSCPETDAEKLVQLTFCAFHDMIQLMNSTHL

SEQ ID NO: 6756 - protein, 87 aa, Homo sapiens
MENQLAKSTEERTFQYQDSLPSLPVPSLEESLKKYLESVKPFANQEEYKKTEEIVQKFQSGIGEKLHQKLLERAKGKRNWVFVVIIE

SEQ ID NO: 6757 - protein, 640 aa, Homo sapiens
MENQLAKSTEERTFQYQDSLPSLPVPSLEESLKKYLESVTRTCYQIRGLDPDAKRGFLDLTREGIQVKPFANQEEYKKTEEIVQKFQSGIGEKLHQKLLERAKGKRNWLEEWWLNVAYLDVRIPSQLNVNFAGPAAHFEHYWPPKEGTQLERGSITLWHNLNYWQLLRKEKVPVHKVGNTPLDMNQFRMLFSTCKVPGITRDSIMNYFRTESEGRSPNHIVVLCRGRAFVFDVIHEGCLVTPPELLRQLTYIHKKCHSEPDGPGIAALTSEERTRWAKAREYLIGLDPENLALLEKIQSSLLVYSMEDSSPHVTPEDYSEIIAAILIGDPTVRWGDKSYNLISFSNGVFGCNCDHAPFDAMIMVNISYYVDEKIFQNEGRWKGSEKVRDIPLPEELIFIVDEKVLNDINQAKAQYLREASDLQIAAYAFTSFGKKLTKNKMLHPDTFIQLALQLAYYRLHGHPGCCYETAMTRHFYHGRTETMRSCTVEAVRWCQSMQDPSVNLRERQQKMLQAFAKHNKMMKDCSAGKGFDRHLLGLLLIAKEEGLPVPELFTDPLFSKSGGGGNFVLSTSLVGYLRVQGVVVPMVHNGYGFFYHIRDDRFVVACSAWKSCPETDAEKLVQLTFCAFHDMIQLMNSTHL

SEQ ID NO: 6758 - protein, 505 aa, Homo sapiens
MPLVEETSLLEDSSVTFPVVIIGNGPSGICLSYMLSGYRPYLSSEAIHPNTILNSKLEEARHLSIVDQDLEYLSEGLEGRSSNPVAVLFDTLLHPDADFGYDYPSVLHWKLEQHHYIPHVVLGKGPPGGAWHNMEGSMLTISFGSWMELPGLKFKDWVSSKRRSLKGDRVMPEEIARYYKHYVKVMGLQKNFRENTYITSVSRLYRDQDDDDIQDRDISTKHLQIEKSNFIKRNWEIRGYQRIADGSHVPFCLFAENVALATGTLDSPAHLEIEGEDFPFVFHSMPEFGAAINKGKLRGKVDPVLIVGSGLTAADAVLCAYNSNIPVIHVFRRRVTDPSLIFKQLPKKLYPEYHKVYHMMCTQSYSVDSNLLSDYTSFPEHRVLSFKSDMKCVLQSVSGLKKIFKLSAAVVLIGSHPNLSFLKDQGCYLGHKSSQPITCKGNPVEIDTYTYECIKEANLFALGPLVGDNFVRFLKGGALGVTRCLATRQKKKHLFVERGGGDGIA

SEQ ID NO: 6759 - protein, 549 aa, Homo sapiens
MPVWCCRCSLAGHFRNYSDTETEGEIFNSLVQYFGDNLGRKVKAMPLVEETSLLEDSSVTFPVVIIGNGPSGICLSYMLSGYRPYLSSEAIHPNTILNSKLEEARHLSIVDQDLEYLSEGLEGRSSNPVAVLFDTLLHPDADFGYDYPSVLHWKLEQHHYIPHVVLGKGPPGGAWHNMEGSMLTISFGSWMELPGLKFKDWVSSKRRSLKGDRVMPEEIARYYKHYVKVMGLQKNFRENTYITSVSRLYRDQDDDDIQDRDISTKHLQIEKSNFIKRNWEIRGYQRIADGSHVPFCLFAENVALATGTLDSPAHLEIEGEDFPFVFHSMPEFGAAINKGKLRGKVDPVLIVGSGLTAADAVLCAYNSNIPVIHVFRRRVTDPSLIFKQLPKKLYPEYHKVYHMMCTQSYSVDSNLLSDYTSFPEHRVLSFKSDMKCVLQSVSGLKKIFKLSAAVVLIGSHPNLSFLKDQGCYLGHKSSQPITCKGNPVEIDTYTYECIKEANLFALGPLVGDNFVRFLKGGALGVTRCLATRQKKKHLFVERGGGDGIA

SEQ ID NO: 6760 - protein, 435 aa, Homo sapiens
MSGFLEELLGEKLVTGGGEEVDVHSLGARGISLLGLYFGCSLSAPCAQLSASLAAFYGRLRGDAAAGPGPGAGAGAAAEPEPRRRLEIVFVSSDQDQRQWQDFVRDMPWLALPYKEKHRKLKLWNKYRISNIPSLIFLDATTGKVVCRNGLLVIRDDPEGLEFPWGPKPFREVIAGPLLRNNGQSLESSSLEGSHVGVYFSAHWCPPCRSLTRVLVESYRKIKEAGQNFEIIFVSADRSEESFKQYFSEMPWLAVPYTDEARRSRLNRLYGIQGIPTLIMLDPQGEVITRQGRVEVLNDEDCREFPWHPKPVLELSDSNAAQLNEGPCLVLFVDSEDDGESEAAKQLIQPIAEKIIAKYKAKEEEAPLLFFVAGEDDMTDSLRDYTNLPEAAPLLTILDMSARAKYVMDVEEITPAIVEAFVNDFLAEKLKPEPI

SEQ ID NO: 6761 - protein, 177 aa, Homo sapiens
MQELRNSLKLWNKYRISNIPSLIFLDATTGKVVCRNGLLVIRDDPEGLEFPWGPKPFREVIAGPLLRNNGQSLESSSLEGSHVGVYFSAHWCPPCRSLTRVLVESYRKIKEAGQNFEIIFVSADRSEESFKQYFSEMPWLAVPYTDEARRSRLNRLYGIQGRRSRPRLRVAPGNLLT

SEQ ID NO: 6762 - protein, 327 aa, Homo sapiens
MADVSLHRNPATLKLWNKYRISNIPSLIFLDATTGKVVCRNGLLVIRDDPEGLEFPWGPKPFREVIAGPLLRNNGQSLESSSLEGSHVGVYFSAHWCPPCRSLTRVLVESYRKIKEAGQNFEIIFVSADRSEESFKQYFSEMPWLAVPYTDEARRSRLNRLYGIQGIPTLIMLDPQGEVITRQGRVEVLNDEDCREFPWHPKPVLELSDSNAAQLNEGPCLVLFVDSEDDGESEAAKQLIQPIAEKIIAKYKAKEEEAPLLFFVAGEDDMTDSLRDYTNLPEAAPLLTILDMSARAKYVMDVEEITPAIVEAFVNDFLAEKLKPEPI

SEQ ID NO: 6763 - protein, 313 aa, Homo sapiens
MSPENQSSVSEFLLLGLPIRPEQQAVFFTLFLGMYLTTVLGNLLIMLLIQLDSHLHTPMYFFLSHLALTDISFSSVTVPKMLMDMRTKYKSILYEECISQMYFFIFFTDLDSFLITSMAYDRYVAICHPLHYTVIMREELCVFLVAVSWILSCASSLSHTLLLTRLSFCAANTIPHVFCDLAALLKLSCSDIFLNELVMFTVGVVVITLPFMCILVSYGYIGATILRVPSTKGIHKALSTCGSHLSVVSLYYGSIFGQYLFPTVSSSIDKDVIVALMYTVVTPMLNPFIYSLRNRDMKEALGKLFSRATFFSW

SEQ ID NO: 6764 - protein, 282 aa, Homo sapiens
MALVLILQLLTLWPLCHTDITPSVPPASYHPKPWLGAQPATVVTPGVNVTLRCRAPQPAWRFGLFKPGEIAPLLFRDVSSELAEFFLEEVTPAQGGIYRCCYRRPDWGPGVWSQPSDVLELLVTEELPRPSLVALPGPVVGPGANVSLRCAGRLRNMSFVLYREGVAAPLQYRHSAQPWADFTLLGARAPGTYSCYYHTPSAPYVLSQRSEVLVISWEGEGPEARPASSAPGMQAPGPPPSDPGAQAPSLSSFRPRGLVLQPLLPQTQDSWDPAPPPSDPGV

SEQ ID NO: 6765 - protein, 263 aa, Homo sapiens
MALVLILQLLTLWPLCHTDITPSVPPASYHPKPWLGAQPATVVTPGVNVTLRCRAPQPAWRFGLFKPGEIAPLLFRDVSSELAEFFLEEVTPAQGGIYRCCYRRPDWGPGVWSQPSDVLELLVTEELPRPSLVALPGPVVGPGANVSLRCAGRLRNMSFVLYREGVAAPLQYRHSAQPWADFTLLGARAPGTYSCYYHTPSAPYVLSQRSEVLVISWEDSGSSDYTRGNLVRLGLAGLVLISLGALVTFDWRSQNRAPAGIRP

SEQ ID NO: 6766 - protein, 267 aa, Homo sapiens
MALVLILQLLTLWPLCHTDITPSVAIIVPPASYHPKPWLGAQPATVVTPGVNVTLRCRAPQPAWRFGLFKPGEIAPLLFRDVSSELAEFFLEEVTPAQGGIYRCCYRRPDWGPGVWSQPSDVLELLVTEELPRPSLVALPGPVVGPGANVSLRCAGRLRNMSFVLYREGVAAPLQYRHSAQPWADFTLLGARAPGTYSCYYHTPSAPYVLSQRSEVLVISWEDSGSSDYTRGNLVRLGLAGLVLISLGALVTFDWRSQNRAPAGIRP

SEQ ID NO: 6767 - protein, 271 aa, Homo sapiens
MALVLILQLLTLFPPASYHPKPWLGAQPATVVTPGVNVTLRCRAPQPAWRFGLFKPGEIAPLLFRDVSSELAEFFLEEVTPAQGGIYRCCYRRPDWGPGVWSQPSDVLELLVTEELPRPSLVALPGPVVGPGANVSLRCAGRLRNMSFVLYREGVAAPLQYRHSAQPWADFTLLGARAPGTYSCYYHTPSAPYVLSQRSEVLVISWEGEGPEARPASSAPGMQAPGPPPSDPGAQAPSLSSFRPRGLVLQPLLPQTQDSWDPAPPPSDPGV

SEQ ID NO: 6768 - protein, 276 aa, Homo sapiens
MALVLILQLLTLWPLCHTDITPSVPPASYHPKPWLGAQPATVVTPGVNVTLRCRAPQPAWRFGLFKPGEIAPLLFRDVSSELAEFFLEEVTPAQGGIYRCCYRRPDWGPGVWSQPSDVLELLVTEELPLPGPVVGPGANVSLRCAGRLRNMSFVLYREGVAAPLQYRHSAQPWADFTLLGARAPGTYSCYYHTPSAPYVLSQRSEVLVISWEGEGPEARPASSAPGMQAPGPPPSDPGAQAPSLSSFRPRGLVLQPLLPQTQDSWDPAPPPSDPGV

SEQ ID NO: 6769 - protein, 286 aa, Homo sapiens
MALVLILQLLTLWPLCHTDITPSVAIIVPPASYHPKPWLGAQPATVVTPGVNVTLRCRAPQPAWRFGLFKPGEIAPLLFRDVSSELAEFFLEEVTPAQGGIYRCCYRRPDWGPGVWSQPSDVLELLVTEELPRPSLVALPGPVVGPGANVSLRCAGRLRNMSFVLYREGVAAPLQYRHSAQPWADFTLLGARAPGTYSCYYHTPSAPYVLSQRSEVLVISWEGEGPEARPASSAPGMQAPGPPPSDPGAQAPSLSSFRPRGLVLQPLLPQTQDSWDPAPPPSDPGV

SEQ ID NO: 6770 - protein, 252 aa, Homo sapiens
MALVLILQLLTLFPPASYHPKPWLGAQPATVVTPGVNVTLRCRAPQPAWRFGLFKPGEIAPLLFRDVSSELAEFFLEEVTPAQGGIYRCCYRRPDWGPGVWSQPSDVLELLVTEELPRPSLVALPGPVVGPGANVSLRCAGRLRNMSFVLYREGVAAPLQYRHSAQPWADFTLLGARAPGTYSCYYHTPSAPYVLSQRSEVLVISWEDSGSSDYTRGNLVRLGLAGLVLISLGALVTFDWRSQNRAPAGIRP

SEQ ID NO: 6771 - protein, 311 aa, Homo sapiens
MDNLTKVTEFLLMEFSGIWELQVLHAGLFLLIYLAVLVGNLLIIAVITLDQHLHTPMYFFLKNLSVLDLCYISVTVPKSIRNSLTRRSSISYLGCVAQVYFFSAFASAELAFLTVMSYDRYVAICHPLQYRAVMTSGGCYQMAVTTWLSCFSYAAVHTGNMFREHVCRSSVIHQFFRDIPHVLALVSCEVFFVEFLTLALSSCLVLGCFILMMISYFQIFSTVLRIPSGQSRAKAFSTCSPQLIVIMLFLTTGLFAALGPIAKALSIQDLVIALTYTVLPPFLNPIIYSLRNKEIKTAMWRLFVKIYFLQK

SEQ ID NO: 6772 - protein, 348 aa, Homo sapiens
MDNITWMASHTGWSDFILMGLFRQSKHPMANITWMANHTGWSDFILLGLFRQSKHPALLCVVIFVVFLMALSGNAVLILLIHCDAHLHTPMYFFISQLSLMDMAYISVTVPKMLLDQVMGVNKISAPECGMQMFFYVTLAGSEFFLLATMAYDRYVAICHPLRYPVLMNHRVCLFLSSGCWFLGSVDGFTFTPITMTFPFRGSREIHHFFCEVPAVLNLSCSDTSLYEIFMYLCCVLMLLIPVVIISSSYLLILLTIHGMNSAEGRKKAFATCSSHLTVVILFYGAAIYTYMLPSSYHTPEKDMMVSVFYTILTPVVNPLIYSLRNKDVMGALKKMLTVEPAFQKAME

SEQ ID NO: 6773 - protein, 326 aa, Homo sapiens
MSVQYSLSPQFMLLSNITQFSPIFYLTSFPGLEGIKHWIFIPFFFMYMVAISGNCFILIIIKTNPRLHTPMYYLLSLLALTDLGLCVSTLPTTMGIFWFNSHSIYFGACQIQMFCIHSFSFMESSVLLMMSFDRLVAICHPLRYSVIITGQQVVRAGLIVIFRGPVATIPIVLLLKAFPYCGSVVLSHSFCLHQEVIQLACTDITFNNLYGLMVVVFTVMLDLVLIALSYGLILHTVAGLASQEEQRRAFQTCTAPLCAVLVFFVPMMGLSLVHRFGKHAPPAIHLLMANVYLFVPPMLNPIIYSIKTKEIHRAIIKFLGLKKASK

SEQ ID NO: 6774 - protein, 312 aa, Homo sapiens
MSSSGSSHPFLLTGFPGLEEAHHWISVFFLFMYISILFGNGTLLLLIKEDHNLHEPMYFFLAMLAATDLGLALTTMPTVLGVLWLDHREIGSAACFSQAYFIHSLSFLESGILLAMAYDRFIAICNPLRYTSVLTNTRVVKIGLGVLMRGFVSVVPPIRPLYFFLYCHSHVLSHAFCLHQDVIKLACADTTFNRLYPAVLVVFIFVLDYLIIFISYVLILKTVLSIASREERAKALITCVSHICCVLVFYVTVIGLSLIHRFGKQVPHIVHLIMSYAYFLFPPLMNPITYSVKTKQIQNAILHLFTTHRIGT

SEQ ID NO: 6775 - protein, 312 aa, Homo sapiens
MENGSYTSYFILLGLFNHTRAHQVLFMMVLSIVLTSLFGNSLMILLIHWDHRLHTPMYFLLSQLSLMDVMLVSTTVPKMAADYLTGSKAISRAGCGAQIFFLPTLGGGECFLLAAMAYDRYAAVCHPLRYPTLMSWQLCLRMNLSCWLLGAADGLLQAVATLSFPYCGAHEIDHFFCETPVLVRLACADTSVFENAMYICCVLMLLVPFSLILSSYGLILAAVLHMRSTEARKKAFATCSSHVAVVGLFYGAAIFTYMRPKSHRSTNHDKVVSAFYTMFTPLLNPLIYSVKNSEVKGALTRCMGRCVALSRE

SEQ ID NO: 6776 - protein, 1150 aa, Homo sapiens
MAATYRLVVSTVNHYSSVVIDRRFEQAIHYCTGTCHTFTHGIDCIVVHHSVCADLLHIPVSQFKDADLNSMFLPHENGLSSAEGDYPQQAFTGIPRVKRGSTFQNTYNLKDIAGEAISFASGKIKEFSFEKLKNSNHAAYRKGRKVKSDSFNRRSVDLDLLCGHYNNDGNAPSFGLLRSSSVEEKPLSHRNSLDTNLTSMFLQNFSEEDLVTQILEKHKIDNFSSGTDIKMCLDILLKCSEDLKKCTDIIKQCIKKKSGSSISEGSGNDTISSSETVYMNVMTRLASYLKKLPFEFMQSGNNEALDLTELISNMPSLQLTPFSPVFGTEQPPKYEDVVQLSASDSGRFQTIELQNDKPNSRKMDTVQSIPNNSTNSLYNLEVNDPRTLKAVQVQSQSLTMNPLENVSSDDLMETLYIEEESDGKKALDKGQKTENGPSHELLKVNEHRAEFPEHATHLKKCPTPMQNEIGKIFEKSFVNLPKEDCKSKVSKFEEGDQRDFTNSSSQEEIDKLLMDLESFSQKMETSLREPLAKGKNSNFLNSHSQLTGQTLVDLEPKSKVSSPIEKVSPSCLTRIIETNGHKIEEEDRALLLRILESIEDFAQELVECKSSRGSLSQEKEMMQILQETLTTSSQANLSVCRSPVGDKAKDTTSAVLIQQTPEVIKIQNKPEKKPGTPLPPPATSPSSPRPLSPVPHVNNVVNAPLSINIPRFYFPEGLPDTCSNHEQTLSRIETAFMDIEEQKADIYEMGKIAKVCGCPLYWKAPMFRAAGGEKTGFVTAQSFIAMWRKLLNNHHDDASKFICLLAKPNCSSLEQEDFIPLLQDVVDTHPGLTFLKDAPEFHSRYITTVIQRIFYTVNRSWSGKITSTEIRKSNFLQTLALLEEEEDINQITDYFSYEHFYVIYCKFWELDTDHDLYISQADLSRYNDQASSSRIIERIFSGAVTRGKTIQKEGRMSYADFVWFLISEEDKRNPTSIEYWFRCMDVDGDGVLSMYELEYFYEEQCERMEAMGIEPLPFHDLLCQMLDLVKPAVDGKITLRDLKRCRMAHIFYDTFFNLEKYLDHEQRDPFAVQKDVENDGPEPSDWDRFAAEEYETLVAEESAQAQFQEGFEDYETDEPASPSEFGNKSNKILSASLPEKCGKLQSVDEE

SEQ ID NO: 6777 - protein, 529 aa, Homo sapiens
MMIKETSLRRDPDLRGELAFLARGCDFVLPSRFKKRLKSFQQTQIQNKPEKKPGTPLPPPATSPSSPRPLSPVPHVNNVVNAPLSINIPRFYFPEGLPDTCSNHEQTLSRIETAFMDIEEQKADIYEMGKIAKVCGCPLYWKAPMFRAAGGEKTGFVTAQSFIAMWRKLLNNHHDDASKFICLLAKPNCSSLEQEDFIPLLQDVVDTHPGLTFLKDAPEFHSRYITTVIQRIFYTVNRSWSGKITSTEIRKSNFLQTLALLEEEEDINQITDYFSYEHFYVIYCKFWELDTDHDLYISQADLSRYNDQASSSRIIERIFSGAVTRGKTIQKEGRMSYADFVWFLISEEDKRNPTSIEYWFRCMDVDGDGVLSMYELEYFYEEQCERMEAMGIEPLPFHDLLCQMLDLVKPAVDGKITLRDLKRCRMAHIFYDTFFNLEKYLDHEQRDPFAVQKDVENDGPEPSDWDRFAAEEYETLVAEESAQAQFQEGFEDYETDEPASPSEFGNKSNKILSASLPEKCGKLQSVDEE

SEQ ID NO: 6778 - protein, 414 aa, Homo sapiens
MDIEEQKADIYEMGKIAKVCGCPLYWKAPMFRAAGGEKTGFVTAQSFIAMWRKLLNNHHDDASKFICLLAKPNCSSLEQEDFIPLLQDVVDTHPGLTFLKDAPEFHSRYITTVIQRIFYTVNRSWSGKITSTEIRKSNFLQTLALLEEEEDINQITDYFSYEHFYVIYCKFWELDTDHDLYISQADLSRYNDQASSSRIIERIFSGAVTRGKTIQKEGRMSYADFVWFLISEEDKRNPTSIEYWFRCMDVDGDGVLSMYELEYFYEEQCERMEAMGIEPLPFHDLLCQMLDLVKPAVDGKITLRDLKRCRMAHIFYDTFFNLEKYLDHEQRDPFAVQKDVENDGPEPSDWDRFAAEEYETLVAEESAQAQFQEGFEDYETDEPASPSEFGNKSNKILSASLPEKCGKLQSVDEE

SEQ ID NO: 6779 - protein, 288 aa, Homo sapiens
MDDPKSEQQRILRRHQRERQELQAQIRSLKNSVPKTDKTKRKQLLQDVARMEAEMAQKHRQELEKFQDDSSIESVVEDLAKMNLENRPPRSSKAHRKRERMESEERERQESIFQAEMSEHLAGFKREEEEKLAAILGARGLEMKAIPADGHCMYRAIQDQLVFSVSVEMLRCRTASYMKKHVDEFLPFFSNPETSDSFGYDDFMIYCDNIVRTTAWGGQLELRALSHVLKTPIEVIQADSPTLIIGEEYVKKPIILVYLRYAYSLGEHYNSVTPLEAGAAGGVLPRLL

SEQ ID NO: 6780 - protein, 505 aa, Homo sapiens
MGETLGDSPIDPESDSFTDTLSANISQEMTMVDTEMPFWPTNFGISSVDLSVMEDHSHSFDIKPFTTVDFSSISTPHYEDIPFTRTDPVVADYKYDLKLQEYQSAIKVEPASPPYYSEKTQLYNKPHEEPSNSLMAIECRVCGDKASGFHYGVHACEGCKGFFRRTIRLKLIYDRCDLNCRIHKKSRNKCQYCRFQKCLAVGMSHNAIRFGRMPQAEKEKLLAEISSDIDQLNPESADLRALAKHLYDSYIKSFPLTKAKARAILTGKTTDKSPFVIYDMNSLMMGEDKIKFKHITPLQEQSKEVAIRIFQGCQFRSVEAVQEITEYAKSIPGFVNLDLNDQVTLLKYGVHEIIYTMLASLMNKDGVLISEGQGFMTREFLKSLRKPFGDFMEPKFEFAVKFNALELDDSDLAIFIAVIILSGDRPGLLNVKPIEDIQDNLLQALELQLKLNHPESSQLFAKLLQKMTDLRQIVTEHVQLLQVIKKTETDMSLHPLLQEIYKDLY

SEQ ID NO: 6781 - protein, 477 aa, Homo sapiens
MTMVDTEMPFWPTNFGISSVDLSVMEDHSHSFDIKPFTTVDFSSISTPHYEDIPFTRTDPVVADYKYDLKLQEYQSAIKVEPASPPYYSEKTQLYNKPHEEPSNSLMAIECRVCGDKASGFHYGVHACEGCKGFFRRTIRLKLIYDRCDLNCRIHKKSRNKCQYCRFQKCLAVGMSHNAIRFGRMPQAEKEKLLAEISSDIDQLNPESADLRALAKHLYDSYIKSFPLTKAKARAILTGKTTDKSPFVIYDMNSLMMGEDKIKFKHITPLQEQSKEVAIRIFQGCQFRSVEAVQEITEYAKSIPGFVNLDLNDQVTLLKYGVHEIIYTMLASLMNKDGVLISEGQGFMTREFLKSLRKPFGDFMEPKFEFAVKFNALELDDSDLAIFIAVIILSGDRPGLLNVKPIEDIQDNLLQALELQLKLNHPESSQLFAKLLQKMTDLRQIVTEHVQLLQVIKKTETDMSLHPLLQEIYKDLY

SEQ ID NO: 6782 - protein, 186 aa, Homo sapiens
MTMVDTEMPFWPTNFGISSVDLSVMEDHSHSFDIKPFTTVDFSSISTPHYEDIPFTRTDPVVADYKYDLKLQEYQSAIKVEPASPPYYSEKTQLYNKPHEEPSNSLMAIECRVCGDKASGFHYGVHACEGCKGFFRRTIRLKLIYDRCDLNCRIHKKSRNKCQYCRFQKCLAVGMSHNEELQKDSY

SEQ ID NO: 6783 - protein, 335 aa, Homo sapiens
MGPLSAPPCTEHIKWKGLLVTASLLNFWNLPTTAQVTIEAQPPKVSEGKDVLLLVHNLPQNLTGYIWYKGQIRDLYHYITSYVVDGQIIIYGPAYSGRETAYSNASLLIQNVTREDAGSYTLHIIKRGDGTRGVTGYFTFTLYLETPKPSISSSNLNPREAMETVILTCDPETPDTSYQWWMNGQSLPMTHRFQLSETNRTLFLFGVTKYTAGPYECEIRNSGSASRSDPVTLNLLHGPDLPRIHPSYTNYRSGDNLYLSCFANSNPPAQYSWTINGKFQQSGQNLFIPQITTKHSGLYVCSVRNSATGEESSTSLTVKVSASTRIGLLPLLNPT

SEQ ID NO: 6784 - protein, 79 aa, Homo sapiens
MLLGSLWGRCHPGRCALFLILALLLDAVGLVLLLLGILAPLSSWDFFIYTGALILALSLLLWIIWYSLNIEVSPEKLDL

SEQ ID NO: 6785 - protein, 224 aa, Homo sapiens
MTLFHFGNCFALAYFPYFITYKCSGLSEYNAFWKCVQAGVTYLFVQLCKMLFLATFFPTWEGGIYDFIGEFMKASVDVADLIGLNLVMSRNAGKGEYKIMVAALGWATAELIMSRCIPLWVGARGIEFDWKYIQMSIDSNISLVHYIVASAQVWMITRYDLYHTFRPAVLLLMFLSVYKAFVMETFVHLCSLGSWAALLARAVVTGLLALSTLALYVAVVNVHS

SEQ ID NO: 6786 - protein, 175 aa, Homo sapiens
MLFLATFFPTWEGGIYDFIGEFMKASVDVADLIGLNLVMSRNAGKGEYKIMVAALGWATAELIMSRCIPLWVGARGIEFDWKYIQMSIDSNISLVHYIVASAQVWMITRYDLYHTFRPAVLLLMFLSVYKAFVMETFVHLCSLGSWAALLARAVVTGLLALSTLALYVAVVNVHS

SEQ ID NO: 6787 - protein, 1066 aa, Homo sapiens
MQSTDLGNKESGKIWHRKPSPATRDGIIVNIIHNTSDYHPKVLRFLNVAFDGTGDCLIAGDHQGNIYVFDLHGNRFNLVQRTAQACTALAFNLRRKSEFLVALADYSIKCFDTVTKELVSWMRGHESSVFSISVHASGKYAITTSSDTAQLWDLDTFQRKRKLNIRQSVGIQKVFFLPLSNTILSCFKDNSIFAWECDTLFCKYQLPAPPESSSILYKVFAVTRDGRILAAGGKSNHLHLWCLEARQLFRIIQMPTKVRAIRHLEFLPDSFDAGSNQVLGVLSQDGIMRFINMQTCKLLFEIGSLDEGISSSAISPHGRYIASIMENGSLNIYSVQALTQEINKPPPPLVKVIEDLPKNKLSSSDLKMKVTSGRVQQPAKSRESKMQTRILKQDLTGDFESKKNELPDGLNKKRLQILLKGYGEYPTKYRMFIWRSLLQLPENHTAFSTLIDKGTHVAFLNLQKKYPIKSRKLLRVLQRTLSALAHWSVIFSDTPYLPLLAFPFVKLFQNNQLICFEVIATLIINWCQHWFEYFPNPPINILSMIENVLAFHDKELLQHFIDHDITSQLYAWPLLETVFSEVLTREEWLKLFDNIFSNHPSFLLMTVVAYNICSRTPLLSCNLKDDFEFFFHHRNNLDINVVIRQVYHLMETTPTDIHPDSMLNVFVALTKGQYPVFNQYPKFIVDYQTQERERIRNDELDYLRERQTVEDMQAKVDQQRVEDEAWYQKQELLRKAEETRREMLLQEEEKMIQQRQRLAAVKRELKVKEMHLQDAARRRFLKLQQDQQEMELRRLDDEIGRKVYMRDREIAATARDLEMRQLELESQKRLYEKNLTENQEALAKEMRADADAYRRKVDLEEHMFHKLIEAGETQSQKTQKVIKENLAKAEQACLNTDWQIQSLHKQKCDDLQRNKCYQEVAKLLRENRRKEIEIINAMVEEEAKKWKEAEGKEFRLRSAKKASALSDASRKWFLKQEINAAVEHAENPCHKEEPRFQNEQDSSCLPRTSQLNDSSEMDPSTQISLNRRAVEWDTTGQNLIKKVRNLRQRLTARARHRCQTPHLLAA
